United States Patent Application Publication US 2011/0183924 A1 - sequence listing, part 103

SEQ ID NO: 315168 - DNA, 2798 bp, Homo sapiens
  misc_feature (24)..(24): n is a, c, g, or t
aatgtgaggtttaaattgatggcnaaaataaaaaacaacagcactcacatgtacacgtcatgacgacagagatgatggtgtggattattgggccaaaagaggaagaggtcgtggtacttttcaacgtggcagagggcgctttaacttcaaaaaatcaggtagcagtcctaaatggactcatgacaaataccaaggggatgggattgttgaagatgaagaagagaccatggaaaataatgaagaaaagaaggacagacgcaaggaagaaaaggaataataaatatgaagtaagattacaacagagcagaacttgcacccaccattttttttacctgatttttgttttcaaataagaatgtaagcattttacttaaattttactgtttgcaagtagtctatagaaattttgttttaagtcttcaaatatcttgagaaatagtagactgtatgttgaaaattgtactgaaataaagtagaaaattgttacgtaccatatttgtaactatcaacttttaaaacttttaacgtttttgttacatgcattgtaattctgctttgtctataagatatggtcaagtacagctctgtgaaagttctgattctcttccttccctgtttgtcaatgttttattctgaagtaaacgttagctctacatataaatcctggaacagaaattgtttatagagactacactaattattttaactgtatacatctgtttaatttgaacacactacatcgtagggtgactgatttttgaagtataccacagacaaaaagttgttactatggtaaactaagctagtttaacacttgagcaaatgcttaagaaggaattaaaaaaaaaaagctttgccaatagctaaaaagtacaagctattaaaaatcagattgaaaagttttgagaaaatgttatttttactgaaagcaagcagtggcctataaagaacattcttaggagccttttctatttgcgttcaaaactgtgtgttctctttctattcctatttgatagtttgagtcatggtcttagatattagctatttgtgagaggaaactggtttgtaacaatactgcaaatagaaaccccatttctactgaacatcctagttttaaacagaagaaaaactgtaatcctggggttggtatgtaggaggtctatcctgcagaataagttgatacattagtacctgatttcatatcttacatatttatttgagctgaacattagtttgtagtgtaactattagtaaaaatagagaaacacagcatactgttcattaatagtattttaaaaaaattgtttttcaaatgtcaccaataaaagttttggcaggaagcttgttgcggcattgatctaacctttttcccccccatttcagttgcagtttttgtagaatggctttttctttttcctcttaagagttctattcttcaggtagataatttttcaaatgtgaattatcttttgtgtctatattgatagctcttaaaggagtgaaaatctaaaatagtaaatttcaatgttaagtgtctgctttatgggcatatataaaagtagacacatttcatttgttaatttagttgtgtgtgtgtgttaaaaggagctaatgcttattctgttaatgtaaacttttgaagatcttaagtgtattgctctttcatcttaaacactttcgaggatttgcagtgcgtctagcacctagattacagccaggaacattggttaagaactgttggaaacaaaactaaaagcaaactcaacatatgtgatgtttatggccctcagatccttagtattgtgtgattttcccccgttaacatgtctttctaaaattgtctattaaagcagaggaaatacctgccaaaggaagtatgtattgcattaatcagggcataactaatattctcctgttcagaataatacttatttacgtgtgaaagcaacatggatgtgattcccaacacagaattttcatgacccttttattgtatacaaataaataccataacagttacttggttagacatcaaatctgtgtgcatgactatgtgcttatccacttaagacaataggtaaaaggggatctgagaaattatgtaatagggagtgggaataaaactacttaattcctgtgggcaggttatattttaagttcaaatgcattgctttaacctttggttacttttattctgttaaacagaattgaagaaagagtattataccagagtgtagtaggctagggtgattgtaagaactctgtaatagaatgtcattgtggatgttacctttttcagatccaagcatataaaaagcctgtatattttttaaaaacacatcttaactccacgctttacgatattataaaagttgaatggttcctcttggtaaggatatttgcttacaagtgctaggaaataactcactgatacctgcgttaacatactttgttttgcctagagaggggcaataaaaatgaaccaaaggatatttccagaaaggattaagaaagctgtttaagaaggccatgactctttaggtgtgtatgtgtacctttcagcatcctaggaatttttatactaaaagcaaaatgttttttccagttagtcttcttcaaggaattactattgttccttttgtcacaggtaaaatcagtgttgggaattataatttgagaaaaatattacccagtaacattgaatgtagatggctaaacgattcttactcagtgtgatgtataatgatgcaacagggacccttgtaaattgtcatacgccaataaaatgtcacaagtaa

SEQ ID NO: 315169 - DNA, 3038 bp, Homo sapiens
tagcggcacccgaggccacgccccgagatcggaagtgacggagacgtgctagcgcgtcgaaggtagctctatggttttcctcgcgttcttgagtcgggaaatggccgctgtgtggttgcaacggagataaattcccggaaccgcgattcggcgtgtcaggaattcgaatttagagtttaatttctcagagcattctctccaggaagaatttttacagtatctcaaagacttcacttgacttcttgatcctgcataaaaccaaggagaaaagaaatgggtcgctccaattctagatcacattcttcaaggtcaaagtctagatcacagtctagttctcgatcaagatcaagatctcattctagaaagaagcgatacagttctaggtctcgttccagaacatattcaaggtctcgtagtagagatcgtatgtattctagagattatcgtcgcgattacagaaataatagaggaatgagacgaccttatgggtacagaggaaggggtagagggtattatcaaggaggaggaggtagatatcatcgaggtggttatagacctgtctggaatagaaggcactctaggagtcctagacgaggtcgttcacgttccaggagtccaaaaagaagatccgtttcttctcaaagatccagaagcagatctcgccggtcatatagatcttctaggtctccaagatcatcctcttctcgttcttcatccccatatagcaaatctcctgtttctaaaagacgagggtctcaggaaaaacaaaccaaaaaagctgaaggggaaccccaagaagagagtccgttgaaaagtaaatcacaggaggaaccgaaagatacatttgaacatgacccatctgagtctatcgatgaatttaataagtcatcagccacatccggtgatatttggcctggcctttcagcttatgataatagtcctagatcaccccatagtccttcacctattgctacaccacctagtcagagttcatcttgctctgatgctcccatgctcagtacagttcactctgcaaaaaatactccttctcagcattcacattccattcagcatagtcctgaaaggtctgggtctggttctgttggaaatggatctagtcgatacagtccttctcagaatagtccaattcatcacatcccttcacgaagaagtcctgcaaagacaatcgcaccacagaatgctccaagagatgagtctaggggccgttcctcgttttatcctgatggtggagatcaggaaactgcaaagactgggaagttcttaaaaaggttcacagatgaagagtctagagtattcctgcttgataggggtaataccagggataaagaggcttcaaaagagaaaggatcagagaaagggagggcagagggagaatgggaagatcaggaagctctagattacttcagtgataaagagtctggaaaacaaaagtttaatgattcagaaggggatgacacagaggagacagaggattatagacagttcaggaagtcagtcctcgcagatcagggtaaaagttttgctactgcatctcaccggaatactgaggaggaaggactcaagtacaagtccaaagtttcactgaaaggcaatagagaaagtgatggatttagagaagaaaaaaattataaacttaaagagactggatatgtagtggaaaggcctagcactacaaaagataagcacaaagaagaagacaaaaattctgaaagaataacagtaaagaaagaaactcagtcacctgagcaggtaaagtctgaaaagctcaaagacctctttgattacagtccccctctacacaagaatctggatgcacgagaaaagtctaccttcagagaggaaagcccacttaggatcaaaatgatagcgagtgattctcaccgtcctgaagtcaaactcaaaatggcacctgttcctcttgatgattctaacagacctgcttccttgactaaagacaggctgcttgctagtacacttgtccattctgtcaagaaggagcaagaattccgatccatctttgaccacattaagttgccacaggccagcaaaagcacttcagagtcatttattcaacacattgtgtccttggttcatcatgttaaagagcaatacttcaagtcagctgcaatgaccctaaacgagcggttcacttcgtatcagaaagccactgaagaacatagtactcggcaaaagagccctgaaatacacaggagaattgacatctcaccaagtaccctgaggaagcatacccgtttagcaggggaagagagagtttttaaagaagaaaatcaaaagggagataaaaaattaaggtgtgactctgctgaccttcggcatgacattgatcgccgtagaaaagaaagaagtaaagaacggggagattccaagggctccagggaatccagtggatcaagaaagcaggaaaaaactccaaaagattacaaggaatacaaatcttacaaagatgacagtaaacataaaagagagcaagatcattctcgatcttcatcctcttcagcatcaccttcttctcccagttctcgagaagaaaaggagagtaagaaggaaagagaagaagaatttaaaactcaccatgaaatgaaagaatactcaggctttgcaggagttagccgaccacgaggaacctttgtaagtgaaaaaattatctttgattgtttggtaggagtttatcttagagtactgtacataaggaaggtcatatacatgatttagagattgttatgtgtgtcattattcctaaagtcagagatagtattgaaacatgaagtggtgtttgaagtgctgtcttcatttagaaatgccattttgaggtctagaagcatctgtataaactaggtacttttcttgacttcgagatcaataactgtacctagtccttaaagaccaagagtcaaggaaagttactgatttgtaataacatttctttaatcacttagtttttgaaaaggtaccttaacgccttaataaaacccctgtatgttcatctctgtattaca

SEQ ID NO: 315170 - DNA, 2299 bp, Homo sapiens
tagcggcacccgaggccacgccccgagatcggaagtgacggagacgtgctagcgcgtcgaaggtagctctatggttttcctcgcgttcttgagtcgggaaatggccgctgtgtggttgcaacggagataaattcccggaaccgcgattcggcgtgtcaggaattcgaatttagagtttaatttctcagagcattctctccaggaagaatttttacagtatctcaaagacttcacttgacttcttgatcctgcataaaaccaaggagaaaagaaatgggtcgctccaattctagatcacattcttcaaggtcaaagtctagatcacagtctagttctcgatcaagatcaagatctcattctagaaagaagcgatacagttctaggtctcgttccagaacatattcaaggtctcgtagtagagatcgtatgtattctagagattatcgtcgcgattacagaaataatagaggaatgagacgaccttatgggtacagaggaaggggtagagggtattatcaaggaggaggaggtagatatcatcgaggtggttatagacctgtctggaatagaaggcactctaggagtcctagacgaggtcgttcacgttccaggagtccaaaaagaagatccgtttcttctcaaagatccagaagcagatctcgccggtcatatagatcttctaggtctccaagatcatcctcttctcgttcttcatccccatatagcaaatctcctgtttctaaaagacgagggtctcaggaaaaacaaaccaaaaaagctgaaggggaaccccaagaagagagtccgttgaaaagtaaatcacaggaggaaccgaaagatacatttgaacatgacccatctgagtctatcgatgaatttaataagtcatcagccacatccggtgatatttggcctggcctttcagcttatgataatagtcctagatcaccccatagtccttcacctattgctacaccacctagtcagagttcatcttgctctgatgctcccatgctcagtacagttcactctgcaaaaaatactccttctcagcattcacattccattcagcatagtcctgaaaggtctgggtctggttctgttggaaatggatctagtcgatacagtccttctcagaatagtccaattcatcacatcccttcacgaagaagtcctgcaaagacaatcgcaccacagaatgctccaagagatgagtctaggggccgttcctcgttttatcctgatggtggagatcaggaaactgcaaagactgggaagttcttaaaaaggttcacagatgaagagtctagagtattcctgcttgataggggtaataccagggataaagaggcttcaaaagagaaaggatcagagaaagggagggcagagggagaatgggaagatcaggaagctctagattacttcagtgataaagagtctggaaaacaaaagtttaatgattcagaaggggatgacacagaggagacagaggattatagacagttcaggaagtcagtcctcgcagatcagggtaaaagttttgctactgcatctcaccggaatactgaggaggaaggactcaagtacaagtccaaagtttcactgaaaggcaatagagaaagtgatggatttagagaagaaaaaaattataaacttaaagagactggatatgtagtggaaaggcctagcactacaaaagataagcacaaagaagaagacaaaaattctgaaagaataacagtaaagaaagaaactcagtcacctgagcaggtaaagtctgaaaagctcaaagacctctttgattacagtccccctctacacaagaatctggatgcacgagaaaagtctaccttcagagaggaaagcccacttaggatcaaaatgatagcgagtgattctcaccgtcctgaagtcaaactcaaaatggcacctgttcctcttgatgattctaacagacctgcttccttgactaaagacaggctgcttgctagtacacttgtccattctgtcaagaaggagcaagaattccgatccatctttgaccacattaagttgccacaggccagcaaaagcacttcagagtcatttattcaacacattgtgtccttggttcatcatgttaaagagcaatacttcaagtcagctgcaatgaccctaaacgagcggttcacttcgtatcagaaagccactgaagaacatagtactcggcaaaagagccctgaaatacacagcctcgcctcgcctttccctcagttgcttcagggggtatggagattaaccatagagagattcagtctct

SEQ ID NO: 315171 - DNA, 1404 bp, Homo sapiens
tagcggcacccgaggccacgccccgagatcggaagtgacggagacgtgctagcgcgtcgaaggtagctctatggttttcctcgcgttcttgagtcgggaaatggccgctgtgtggttgcaacggagataaattcccggaaccgcgattcggcgtgtcaggaattcgaatttagagtttaatttctcagagcattctctccaggaagaatttttacagtatctcaaagacttcacttgacttcttgatcctgcataaaaccaaggagaaaagaaatgggtcgctccaattctagatcacattcttcaaggtcaaagtctagatcacagtctagttctcgatcaagatcaagatctcattctagaaagaagcgatacagttctaggtctcgttccagaacatattcaaggtctcgtagtagagatcgtatgtattctagagattatcgtcgcgattacagaaataatagaggaatgagacgaccttatgggtacagaggaaggggtagagggtattatcaaggaggaggaggtagatatcatcgaggtggttatagacctgtctggaatagaaggcactctaggagtcctagacgaggtcgttcacgttccaggagtccaaaaagaagatccgtttcttctcaaagatccagaagcagatctcgccggtcatatagatcttctaggtctccaagatcatcctcttctcgttcttcatccccatatagcaaatctcctgtttctaaaagacgagggtctcaggaaaaacaaaccaaaaaagctgaaggggaaccccaagaagagagtccgttgaaaagtaaatcacaggaggaaccgaaagatacatttgaacatgacccatctgagtctatcgatgaatttaataagtcatcagccacatccggtgatatttggcctggcctttcagcttatgataatagtcctagatcaccccatagtccttcacctattgctacaccacctagtcagagttcatcttgctctgatgctcccatgctcagtacagttcactctgcaaaaaatactccttctcagcattcacattccattcagcatagtcctgaaaggtctgggtctggttctgttggaaatggatctagtcgatacagtccttctcagaatagtccaattcatcacatcccttcacgaagaagtcctgcaaagacaatcgcaccacagaatgctccaagagatgagtctaggggccgttcctcgttttatcctgatggtggagatcaggaaactgcaaagactgggaagttcttaaaaagtcacagatgaagagtctagagtattttttgcagagtgaactgtactgagcatgggagcatcagagcaagatgaactctgactaggtggtgtagcaataggtgaaggactatgggg

SEQ ID NO: 315172 - DNA, 348 bp, Homo sapiens
gaccttttggtgctgagcgcatgagtgacagaggcagagatgctgctgcaactggaagaagctggaaccagtcccagagaggctcggcctggaaacagtcccctgcccagagtcccctcagcctccatgacaggtccctccctggccccccaaccctcttcctcccttgccccaaccctgagaaagggtccagccactaccctgttggcaaacattcccttccatggtcagcctgccaggaggaggggagtcaccttggggctggaggcctctcagaccccatcctgacagcaggttgagtattcccactttcaataaaagactccactttcccggcacttgtgacga

SEQ ID NO: 315173 - DNA, 108 bp, Homo sapiens
tttgtagatatttgaaaagtagagccattgggactttctgatggatgggatatggggtatgtgagaaagagaagggttgagaatgactccaagatttctagtctgcag

SEQ ID NO: 315174 - DNA, 405 bp, Homo sapiens
gccagcggggcccgagcagaaggggagccccggctctcacgaagaaaatggagggcgacccacgggttaggggtcaggaaaggcgtggggcgcattatgccctgggaggggaaagcacggaacaagaggctctgagggacggagaggaaggagggcgacccacgagctaggtaaggcgggccaacccaggtctcggaaggaagggggcggggcaggacggggcgggaggggccgcgcagtagctgggctgtgaggacggttggcgagttcattccgggctcgggtcgggaagtgtccgcccctggagtcaagctggggagggtgagaggttgaagggcaatgacttaggttcccagcttctggccctgccaggctctgcagtagcccaagcccaccgctgcccgg

SEQ ID NO: 315175 - DNA, 3284 bp, Homo sapiens
tcaacgctccggggccgctcggctcgcctttcttccctcgcctttctctcctcttgcttcaccctccccccttcttttcacgttgctggttttttttgttgttgttttatgctttaggggttttgttcctcggctcgagctcatgggtgtacattatcatgctcttcttttgtagagcagcccgacggccatggaggctgaagagacgatggaatgccttcaggagttccctgaacatcataaaatgatcctcgaccgattgaatgaacagcgagagcaggaccggtttactgacatcaccctaattgtcgacggacaccattttaaggctcacaaggctgttttggctgcttgtagtaagttcttctacaaattctttcaggagtttacccaagaaccattggtggagatagaaggtgttagtaaaatggcctttcgccatttaattgagttcacatatacagcaaaattaatgatacaaggagaagaagaagccaatgatgtatggaaagcagcagagtttctacaaatgctagaagctatcaaagcccttgaagtcaggaacaaagaaaactcagctcccttagaggaaaataccacaggaaaaaatgaggccaaaaaaaggaagattgcagaaacttcaaatgttatcactgagtcattgccatctgcagaatcagaacctgttgaaattgaggtagagattgccgaaggcaccattgaagtggaagatgaaggcatcgaaacattagaggaagtggcttctgccaagcagtccgtaaagtacatacagagcacaggttcctctgatgattctgctctagcactgttggcagatattaccagcaagtaccgtcaaggtgacagaaaagggcagattaaagaagatggctgtccatctgaccccacgagcaaacaggagcacatgaaatcacactccactgagagtttcaagtgtgaaatatgcaataaacgatatcttcgagagagcgcatggaaacagcacctaaattgttaccaccttgaagaaggtggagtcagtaagaagcaaagaactgggaaaaaaattcatgtatgtcagtactgtgagaaacagtttgaccattttggacattttaaagaacatcttcgaaaacatacaggtgaaaaaccttttgaatgtccaaattgtcatgaacgatttgctagaaatagcactctgaaatgtcacctcactgcatgccaaactggagtaggggcaaaaaaaggaaggaagaagctctacgaatgccaggtctgcaacagtgtgtttaacagctgggaccagttcaaagatcacttggtaatacacactggagataaacccaaccattgtactttatgtgatttgtggtttatgcaaggaaatgaattaaggaggcatctcagtgatgctcacaatatttcagagcgtctagtaacggaagaagttctttcagtagaaacacgtgtgcaaactgaacctgtaacatcaatgactattatagaacaagttgggaaggtgcatgtgctaccattgcttcaggttcaggtggattcagcacaagtgactgtggaacaagtccatccagatctgctccaggacagccaggtgcacgattcacacatgagtgagcttccagagcaggtccaagtgagttatctagaagtgggccgaattcagactgaagaaggtactgaagtacatgtagaggagctgcatgttgaacgggtcaatcaaatgccagtggaagtacaaactgaacttctagaagcagatttggaccacgtgaccccagaaatcatgaaccaagaggagagagagtctagccaagcagatgctgctgaggctgccagggaagatcacgaagatgctgaggatttagagaccaagccaacagtggattctgaagcagaaaaggcagagaatgaggacagaacagctctgccagttttagaatgaaattacacatgaatatatttttaaatttacttgttgggtttttgaactgattatgggcagtttgactgtccttaattaagcctaacagacaagtggaccaaagttaagctgtttcctgttgtgctgaactgttgtccgttgaaacacattgattcccctccccctacttattgccacagaggagggatcttttccataactgaaggggagttttgagaagtatatttctggaaacttaaatggattatattcttattatatagttgggtacgaatgtatctattttcattgtggtaaaagttcttccttttctctttcccaggtcatgttcttcctcaaattttttccatattgtaaaatcaaacttaaatcattagaatacaagtttatgtattctaatgcatgttagaaaattgaataatataggaaacacaaggctgcatgatgaaaagtgcattgttactgtgcagttaaattttggcttctggctttctttagtttgaacaaacgttcttgtctaccccagtagtcacagatgccatctttgcaacagaaagagtggtggtggcaaaatttctagaatgttaaaaaaaaaaaaaaaatccacacccatgtgccttctcaaaaccaactgaacttctataaagcatctctggttctttcaaagtttgtgttgtaaggagcaatgtagatgatgctataatactttatatttttgcttataatgacaaccaccagttctttttcacttaagttaggttgagaaattttatttaatggccactgaagggccattttcaattgggaaaatttatttacatctgtggtaaactttattttgatgaaaagttgcactagtattttaccaccagatgagaaaaagatgagcagcatttaaaaattaatgtatttaaaataaagtacagagaaagacatgtatataattatcaggctttgttttgaatggaatcttttcccccaattcttaatgtaaagatcttgtgctataacttttaaagccatacaaataagagtgctaaactgtggacttaaaagtaggtgtgtaaatatttttaatcagtattacttggaaaataaaatataacaaacccatagaaaaaaaaaaaaaaaagggcggccgctcttttttttttttttttttttccttcagagcagtgattcctaggtatgagaaagctaagagtttcaaagtgctttagagttatttcttttttaaaaatgttaagaaaatcttgaaaaaataattcaaagacattttcaccaaccttccaattgagagcagtccccaaggttcaggtctttt

SEQ ID NO: 315176 - DNA, 3145 bp, Homo sapiens
gccagcggggcccgagcagaaggggagccccggctctcacgaagaaaatggagggcgacccacgggttaggggtcaggaaaggcgtggggcgcattatgccctgggaggggaaagcacggaacaagaggctctgagggacggagaggaaggagggcgacccacgagctagagcagcccgacggccatggaggctgaagagacgatggaatgccttcaggagttccctgaacatcataaaatgatcctcgaccgattgaatgaacagcgagagcaggaccggtttactgacatcaccctaattgtcgacggacaccattttaaggctcacaaggctgttttggctgcttgtagtaagttcttctacaaattctttcaggagtttacccaagaaccattggtggagatagaaggtgttagtaaaatggcctttcgccatttaattgagttcacatatacagcaaaattaatgatacaaggagaagaagaagccaatgatgtatggaaagcagcagagtttctacaaatgctagaagctatcaaagcccttgaagtcaggaacaaagaaaactcagctcccttagaggaaaataccacaggaaaaaatgaggccaaaaaaaggaagattgcagaaacttcaaatgttatcactgagtcattgccatctgcagaatcagaacctgttgaaattgaggtagagattgccgaaggcaccattgaagtggaagatgaaggcatcgaaacattagaggaagtggcttctgccaagcagtccgtaaagtacatacagagcacaggttcctctgatgattctgctctagcactgttggcagatattaccagcaagtaccgtcaaggtgacagaaaagggcagattaaagaagatggctgtccatctgaccccacgagcaaacaggagcacatgaaatcacactccactgagagtttcaagtgtgaaatatgcaataaacgatatcttcgagagagcgcatggaaacagcacctaaattgttaccaccttgaagaaggtggagtcagtaagaagcaaagaactgggaaaaaaattcatgtatgtcagtactgtgagaaacagtttgaccattttggacattttaaagaacatcttcgaaaacatacaggtgaaaaaccttttgaatgtccaaattgtcatgaacgatttgctagaaatagcactctgaaatgtcacctcactgcatgccaaactggagtaggggcaaaaaaaggaaggaagaagctctacgaatgccaggtctgcaacagtgtgtttaacagctgggaccagttcaaagatcacttggtaatacacactggagataaacccaaccattgtactttatgtgatttgtggtttatgcaaggaaatgaattaaggaggcatctcagtgatgctcacaatatttcagagcgtctagtaacggaagaagttctttcagtagaaacacgtgtgcaaactgaacctgtaacatcaatgactattatagaacaagttgggaaggtgcatgtgctaccattgcttcaggttcaggtggattcagcacaagtgactgtggaacaagtccatccagatctgctccaggacagccaggtgcacgattcacacatgagtgagcttccagagcaggtccaagtgagttatctagaagtgggccgaattcagactgaagaaggtactgaagtacatgtagaggagctgcatgttgaacgggtcaatcaaatgccagtggaagtacaaactgaacttctagaagcagatttggaccacgtgaccccagaaatcatgaaccaagaggagagagagtctagccaagcagatgctgctgaggctgccagggaagatcacgaagatgctgaggatttagagaccaagccaacagtggattctgaagcagaaaaggcagagaatgaggacagaacagctctgccagttttagaatgaaattacacatgaatatatttttaaatttacttgttgggtttttgaactgattatgggcagtttgactgtccttaattaagcctaacagacaagtggaccaaagttaagctgtttcctgttgtgctgaactgttgtccgttgaaacacattgattcccctccccctacttattgccacagaggagggatcttttccataactgaaggggagttttgagaagtatatttctggaaacttaaatggattatattcttattatatagttgggtacgaatgtatctattttcattgtggtaaaagttcttccttttctctttcccaggtcatgttcttcctcaaattttttccatattgtaaaatcaaacttaaatcattagaatacaagtttatgtattctaatgcatgttagaaaattgaataatataggaaacacaaggctgcatgatgaaaagtgcattgttactgtgcagttaaattttggcttctggctttctttagtttgaacaaacgttcttgtctaccccagtagtcacagatgccatctttgcaacagaaagagtggtggtggcaaaatttctagaatgttaaaaaaaaaaaaaaaatccacacccatgtgccttctcaaaaccaactgaacttctataaagcatctctggttctttcaaagtttgtgttgtaaggagcaatgtagatgatgctataatactttatatttttgcttataatgacaaccaccagttctttttcacttaagttaggttgagaaattttatttaatggccactgaagggccattttcaattgggaaaatttatttacatctgtggtaaactttattttgatgaaaagttgcactagtattttaccaccagatgagaaaaagatgagcagcatttaaaaattaatgtatttaaaataaagtacagagaaagacatgtatataattatcaggctttgttttgaatggaatcttttcccccaattcttaatgtaaagatcttgtgctataacttttaaagccatacaaataagagtgctaaactgtggacttaaaagtaggtgtgtaaatatttttaatcagtattacttggaaaataaaatataacaaacccatagaccaatatgctattttttttacctgttaaatattgggagttctttacattttttaagtaaactttaaaattatg

SEQ ID NO: 315177 - DNA, 3009 bp, Homo sapiens
cccgctctagctcgcgtctcccgactccaattagagcagcccgacggccatggaggctgaagagacgatggaatgccttcaggagttccctgaacatcataaaatgatcctcgaccgattgaatgaacagcgagagcaggaccggtttactgacatcaccctaattgtcgacggacaccattttaaggctcacaaggctgttttggctgcttgtagtaagttcttctacaaattctttcaggagtttacccaagaaccattggtggagatagaaggtgttagtaaaatggcctttcgccatttaattgagttcacatatacagcaaaattaatgatacaaggagaagaagaagccaatgatgtatggaaagcagcagagtttctacaaatgctagaagctatcaaagcccttgaagtcaggaacaaagaaaactcagctcccttagaggaaaataccacaggaaaaaatgaggccaaaaaaaggaagattgcagaaacttcaaatgttatcactgagtcattgccatctgcagaatcagaacctgttgaaattgaggtagagattgccgaaggcaccattgaagtggaagatgaaggcatcgaaacattagaggaagtggcttctgccaagcagtccgtaaagtacatacagagcacaggttcctctgatgattctgctctagcactgttggcagatattaccagcaagtaccgtcaaggtgacagaaaagggcagattaaagaagatggctgtccatctgaccccacgagcaaacaggagcacatgaaatcacactccactgagagtttcaagtgtgaaatatgcaataaacgatatcttcgagagagcgcatggaaacagcacctaaattgttaccaccttgaagaaggtggagtcagtaagaagcaaagaactgggaaaaaaattcatgtatgtcagtactgtgagaaacagtttgaccattttggacattttaaagaacatcttcgaaaacatacaggtgaaaaaccttttgaatgtccaaattgtcatgaacgatttgctagaaatagcactctgaaatgtcacctcactgcatgccaaactggagtaggggcaaaaaaaggaaggaagaagctctacgaatgccaggtctgcaacagtgtgtttaacagctgggaccagttcaaagatcacttggtaatacacactggagataaacccaaccattgtactttatgtgatttgtggtttatgcaaggaaatgaattaaggaggcatctcagtgatgctcacaatatttcagagcgtctagtaacggaagaagttctttcagtagaaacacgtgtgcaaactgaacctgtaacatcaatgactattatagaacaagttgggaaggtgcatgtgctaccattgcttcaggttcaggtggattcagcacaagtgactgtggaacaagtccatccagatctgctccaggacagccaggtgcacgattcacacatgagtgagcttccagagcaggtccaagtgagttatctagaagtgggccgaattcagactgaagaaggtactgaagtacatgtagaggagctgcatgttgaacgggtcaatcaaatgccagtggaagtacaaactgaacttctagaagcagatttggaccacgtgaccccagaaatcatgaaccaagaggagagagagtctagccaagcagatgctgctgaggctgccagggaagatcacgaagatgctgaggatttagagaccaagccaacagtggattctgaagcagaaaaggcagagaatgaggacagaacagctctgccagttttagaatgaaattacacatgaatatatttttaaatttacttgttgggtttttgaactgattatgggcagtttgactgtccttaattaagcctaacagacaagtggaccaaagttaagctgtttcctgttgtgctgaactgttgtccgttgaaacacattgattcccctccccctacttattgccacagaggagggatcttttccataactgaaggggagttttgagaagtatatttctggaaacttaaatggattatattcttattatatagttgggtacgaatgtatctattttcattgtggtaaaagttcttccttttctctttcccaggtcatgttcttcctcaaattttttccatattgtaaaatcaaacttaaatcattagaatacaagtttatgtattctaatgcatgttagaaaattgaataatataggaaacacaaggctgcatgatgaaaagtgcattgttactgtgcagttaaattttggcttctggctttctttagtttgaacaaacgttcttgtctaccccagtagtcacagatgccatctttgcaacagaaagagtggtggtggcaaaatttctagaatgttaaaaaaaaaaaaaaaatccacacccatgtgccttctcaaaaccaactgaacttctataaagcatctctggttctttcaaagtttgtgttgtaaggagcaatgtagatgatgctataatactttatatttttgcttataatgacaaccaccagttctttttcacttaagttaggttgagaaattttatttaatggccactgaagggccattttcaattgggaaaatttatttacatctgtggtaaactttattttgatgaaaagttgcactagtattttaccaccagatgagaaaaagatgagcagcatttaaaaattaatgtatttaaaataaagtacagagaaagacatgtatataattatcaggctttgttttgaatggaatcttttcccccaattcttaatgtaaagatcttgtgctataacttttaaagccatacaaataagagtgctaaactgtggacttaaaagtaggtgtgtaaatatttttaatcagtattacttggaaaataaaatataacaaacccatagaccaatatgctattttttttacctgttaaatattgggagttctttacattttttaagtaaactttaaaattatg

SEQ ID NO: 315178 - DNA, 3107 bp, Homo sapiens
tcaacgctccggggccgctcggctcgcctttcttccctcgcctttctctcctcttgcttcaccctccccccttcttttcacgttgctggttttttttgttgttgttttatgctttaggggttttgttcctcggctcgagctcatgggtgtacattatcatgctcttcttttgtagagcagcccgacggccatggaggctgaagagacgatggaatgccttcaggagttccctgaacatcataaaatgatcctcgaccgattgaatgaacagcgagagcaggaccggtttactgacatcaccctaattgtcgacggacaccattttaaggctcacaaggctgttttggctgcttgtagtaagttcttctacaaattctttcaggagtttacccaagaaccattggtggagatagaaggaacaaagaaaactcagctcccttagaggaaaataccacaggaaaaaatgaggccaaaaaaaggaagattgcagaaacttcaaatgttatcactgagtcattgccatctgcagaatcagaacctgttgaaattgaggtagagattgccgaaggcaccattgaagtggaagatgaaggcatcgaaacattagaggaagtggcttctgccaagcagtccgtaaagtacatacagagcacaggttcctctgatgattctgctctagcactgttggcagatattaccagcaagtaccgtcaaggtgacagaaaagggcagattaaagaagatggctgtccatctgaccccacgagcaaacaggtagaaggtattgaaattgtggaacttcagctgtcacatgtgaaggacttgttccattgtgagaaatgtaaccgttcatttaaattgttttaccattttaaggagcacatgaaatcacactccactgagagtttcaagtgtgaaatatgcaataaacgatatcttcgagagagcgcatggaaacagcacctaaattgttaccaccttgaagaaggtggagtcagtaagaagcaaagaactgggaaaaaaattcatgtatgtcagtactgtgagaaacagtttgaccattttggacattttaaagaacatcttcgaaaacatacaggtgaaaaaccttttgaatgtccaaattgtcatgaacgatttgctagaaatagcactctgaaatgtcacctcactgcatgccaaactggagtaggggcaaaaaaaggaaggaagaagctctacgaatgccaggtctgcaacagtgtgtttaacagctgggaccagttcaaagatcacttggtaatacacactggagataaacccaaccattgtactttatgtgatttgtggtttatgcaaggaaatgaattaaggaggcatctcagtgatgctcacaatatttcagagcgtctagtaacggaagaagttctttcagtagaaacacgtgtgcaaactgaacctgtaacatcaatgactattatagaacaagttgggaaggtgcatgtgctaccattgcttcaggttcaggtggattcagcacaagtgactgtggaacaagtccatccagatctgctccaggacagccaggtgcacgattcacacatgagtgagcttccagagcaggtccaagtgagttatctagaagtgggccgaattcagactgaagaaggtactgaagtacatgtagaggagctgcatgttgaacgggtcaatcaaatgccagtggaagtacaaactgaacttctagaagcagatttggaccacgtgaccccagaaatcatgaaccaagaggagagagagtctagccaagcagatgctgctgaggctgccagggaagatcacgaagatgctgaggatttagagaccaagccaacagtggattctgaagcagaaaaggcagagaatgaggacagaacagctctgccagttttagaatgaaattacacatgaatatatttttaaatttacttgttgggtttttgaactgattatgggcagtttgactgtccttaattaagcctaacagacaagtggaccaaagttaagctgtttcctgttgtgctgaactgttgtccgttgaaacacattgattcccctccccctacttattgccacagaggagggatcttttccataactgaaggggagttttgagaagtatatttctggaaacttaaatggattatattcttattatatagttgggtacgaatgtatctattttcattgtggtaaaagttcttccttttctctttcccaggtcatgttcttcctcaaattttttccatattgtaaaatcaaacttaaatcattagaatacaagtttatgtattctaatgcatgttagaaaattgaataatataggaaacacaaggctgcatgatgaaaagtgcattgttactgtgcagttaaattttggcttctggctttctttagtttgaacaaacgttcttgtctaccccagtagtcacagatgccatctttgcaacagaaagagtggtggtggcaaaatttctagaatgttaaaaaaaaaaaaaaaatccacacccatgtgccttctcaaaaccaactgaacttctataaagcatctctggttctttcaaagtttgtgttgtaaggagcaatgtagatgatgctataatactttatatttttgcttataatgacaaccaccagttctttttcacttaagttaggttgagaaattttatttaatggccactgaagggccattttcaattgggaaaatttatttacatctgtggtaaactttattttgatgaaaagttgcactagtattttaccaccagatgagaaaaagatgagcagcatttaaaaattaatgtatttaaaataaagtacagagaaagacatgtatataattatcaggctttgttttgaatggaatcttttcccccaattcttaatgtaaagatcttgtgctataacttttaaagccatacaaataagagtgctaaactgtggacttaaaagtaggtgtgtaaatatttttaatcagtattacttggaaaataaaatataacaaacccatagaccaatatgctattttttttacctgttaaatattgggagttctttacattttttaagtaaactttaaaattatg

SEQ ID NO: 315179 - DNA, 3306 bp, Homo sapiens
tcaacgctccggggccgctcggctcgcctttcttccctcgcctttctctcctcttgcttcaccctccccccttcttttcacgttgctggttttttttgttgttgttttatgctttaggggttttgttcctcggctcgagctcatgggtgtacattatcatgctcttcttttgtagagcagcccgacggccatggaggctgaagagacgatggaatgccttcaggagttccctgaacatcataaaatgatcctcgaccgattgaatgaacagcgagagcaggaccggtttactgacatcaccctaattgtcgacggacaccattttaaggctcacaaggctgttttggctgcttgtagtaagttcttctacaaattctttcaggagtttacccaagaaccattggtggagatagaaggtgttagtaaaatggcctttcgccatttaattgagttcacatatacagcaaaattaatgatacaaggagaagaagaagccaatgatgtatggaaagcagcagagtttctacaaatgctagaagctatcaaagcccttgaagtcaggaacaaagaaaactcagctcccttagaggaaaataccacaggaaaaaatgaggccaaaaaaaggaagattgcagaaacttcaaatgttatcactgagtcattgccatctgcagaatcagaacctgttgaaattgaggtagagattgccgaaggcaccattgaagtggaagatgaaggcatcgaaacattagaggaagtggcttctgccaagcagtccgtaaagtacatacagagcacaggttcctctgatgattctgctctagcactgttggcagatattaccagcaagtaccgtcaaggtgacagaaaagggcagattaaagaagatggctgtccatctgaccccacgagcaaacaggagcacatgaaatcacactccactgagagtttcaagtgtgaaatatgcaataaacgatatcttcgagagagcgcatggaaacagcacctaaattgttaccaccttgaagaaggtggagtcagtaagaagcaaagaactgggaaaaaaattcatgtatgtcagtactgtgagaaacagtttgaccattttggacattttaaagaacatcttcgaaaacatacaggtgaaaaaccttttgaatgtccaaattgtcatgaacgatttgctagaaatagcactctgaaatgtcacctcactgcatgccaaactggagtaggggcaaaaaaaggaaggaagaagctctacgaatgccaggtctgcaacagtgtgtttaacagctgggaccagttcaaagatcacttggtaatacacactggagataaacccaaccattgtactttatgtgatttgtggtttatgcaaggaaatgaattaaggaggcatctcagtgatgctcacaatatttcagagcgtctagtaacggaagaagttctttcagtagaaacacgtgtgcaaactgaacctgtaacatcaatgactattatagaacaagttgggaaggtgcatgtgctaccattgcttcaggttcaggtggattcagcacaagtgactgtggaacaagtccatccagatctgctccaggacagccaggtgcacgattcacacatgagtgagcttccagagcaggtccaagtgagttatctagaagtgggccgaattcagactgaagaaggtactgaagtacatgtagaggagctgcatgttgaacgggtcaatcaaatgccagtggaagtacaaactgaacttctagaagcagatttggaccacgtgaccccagaaatcatgaaccaagaggagagagagtctagccaagcagatgctgctgaggctgccagggaagatcacgaagatgctgaggatttagagaccaagccaacagtggattctgaagcagaaaaggcagagaatgaggacagaacagctctgccagttttagaatgaaattacacatgaatatatttttaaatttacttgttgggtttttgaactgattatgggcagtttgactgtccttaattaagcctaacagacaagtggaccaaagttaagctgtttcctgttgtgctgaactgttgtccgttgaaacacattgattcccctccccctacttattgccacagaggagggatcttttccataactgaaggggagttttgagaagtatatttctggaaacttaaatggattatattcttattatatagttgggtacgaatgtatctattttcattgtggtaaaagttcttccttttctctttcccaggtcatgttcttcctcaaattttttccatattgtaaaatcaaacttaaatcattagaatacaagtttatgtattctaatgcatgttagaaaattgaataatataggaaacacaaggctgcatgatgaaaagtgcattgttactgtgcagttaaattttggcttctggctttctttagtttgaacaaacgttcttgtctaccccagtagtcacagatgccatctttgcaacagaaagagtggtggtggcaaaatttctagaatgttaaaattccaaacccgtgtgtgtgcctttttaaaaacccaaatgtgaatttctatataaagcatactcggggtacattaacaaaagttggatgatatgataagggagacatgtgttaaaatgattgctattaaaatacttaaatatatataggcgattataaatgacaaacacacacaagttaatattatcacacataaaaagataagagttgaagaacatttatagttaaaatgggccacatgaaagggacaatttacaaaatgggagaaaaatttatatacaatctgtgagaaaacatatataatatatagatagaaaagttgcacaatagatatttatcacacacagaattgaaacaaaaagatgagcaacgaattgtaaaaacttataagtgtattacaaaaataaaagttacaagagaaaagacaatgtatataaataataaggaataggataatgaatggacatctttaccaccaaatttctaaaagtgtaaagaatcgtgaggcataataaccaatattaaaagggaccaattacaaatataagaagtgcataaaagtgttgagcactttaaacaagtagggatgtgtaaaaatatttaaaaaacaagagtattaacgtgtggaacaaataagatatataaaagaaccaattagaacacaaatatgataaatatattaaacacttgataaacaatatcgggagcgaatacatatacacattataataaagtcaccccttaacaactttcttcac

SEQ ID NO: 315180 - DNA, 1224 bp, Homo sapiens
tcaacgctccggggccgctcggctcgcctttcttccctcgcctttctctcctcttgcttcaccctccccccttcttttcacgttgctggttttttttgttgttgttttatgctttaggggttttgttcctcggctcgagctcatgggtgtacattatcatgctcttcttttgtagagcagcccgacggccatggaggctgaagagacgatggaatgccttcaggagttccctgaacatcataaaatgatcctcgaccgattgaatgaacagcgagagcaggaccggtttactgacatcaccctaattgtcgacggacaccattttaaggctcacaaggctgttttggctgcttgtagtcatgttcttcctcaaattttttccatattgtaaaatcaaacttaaatcattagaatacaagtttatgtattctaatgcatgttagaaaattgaataatataggaaacacaaggctgcatgatgaaaagtgcattgttactgtgcagttaaattttggcttctggctttctttagtttgaacaaacgttcttgtctaccccagtagtcacagatgccatctttgcaacagaaagagtggtggtggcaaaatttctagaatgttaaaaaaaaaaaaaaaatccacacccatgtgccttctcaaaaccaactgaacttctataaagcatctctggttctttcaaagtttgtgttgtaaggagcaatgtagatgatgctataatactttatatttttgcttataatgacaaccaccagttctttttcacttaagttaggttgagaaattttatttaatggccactgaagggccattttcaattgggaaaatttatttacatctgtggtaaactttattttgatgaaaagttgcactagtattttaccaccagatgagaaaaagatgagcagcatttaaaaattaatgtatttaaaataaagtacagagaaagacatgtatataattatcaggctttgttttgaatggaatcttttcccccaattcttaatgtaaagatcttgtgctataacttttaaagccatacaaataagagtgctaaactgtggacttaaaagtaggtgtgtaaatatttttaatcagtattacttggaaaataaaatataacaaacccatagaccaatatgctattttttttacctgttaaatattgggagttctttacattttttaagtaaactttaaaattatg

SEQ ID NO: 315181 - DNA, 1019 bp, Homo sapiens
tcaacgctccggggccgctcggctcgcctttcttccctcgcctttctctcctcttgcttcaccctccccccttcttttcacgttgctggttttttttgttgttgttttatgctttaggggttttgttcctcggctcgagctcatgggtgtacattatcatgctcttcttttgtagagcagcccgacggccatggaggctgaagagacgatggaatgccttcaggagttccctgaacatcataaaatgatcctcgaccgattgaatgaacagcgagagcaggaccggtttactgacatcaccctaattgtcgacggacaccattttaaggctcacaaggctgttttggctgcttgtagtaagttcttctacaaattctttcaggagtttacccaagaaccattggtggagatagaaggaacaaagaaaactcagctcccttagaggaaaataccacaggaaaaaatgaggccaaaaaaaggaagattgcagaaacttcaaatgttatcactgagtcattgccatctgcagaatcagaacctgttgaaattgaggtagagattgccgaaggcaccattgaagtggaagatgaaggcatcgaaacattagaggaagtggcttctgccaagcagtccgtaaagtacatacagagcacaggttcctctgatgattctgctctagcactgttggcagatattaccagcaagtaccgtcaaggtgacagaaaagggcagattaaagaagatggctgtccatctgaccccacgagcaaacaggagcgcatgaacatcacactccactgaagacgtacaacggtggaaatcttgccacaccacgatatcttacgagagagcgcaggcaaccggacctacaatggtccagctgcagaaggggaggcagcaaaaggcacgcacggcacaagtccggcattgcagcgtgggaacacagccgcacatccgggcccaaagcacaacgagaccagacggggcaaccatgaagcacacgcaaaccttcctgacaa

SEQ ID NO: 315182 - DNA, 3150 bp, Homo sapiens
tcaacgctccggggccgctcggctcgcctttcttccctcgcctttctctcctcttgcttcaccctccccccttcttttcacgttgctggttttttttgttgttgttttatgctttaggggttttgttcctcggctcgagctcatgggtgtacattatcatgctcttcttttgtagagcagcccgacggccatggaggctgaagagacgatggaatgccttcaggagttccctgaacatcataaaatgatcctcgaccgattgaatgaacagcgagagcaggaccggtttactgacatcaccctaattgtcgacggacaccattttaaggctcacaaggctgttttggctgcttgtagtaagttcttctacaaattctttcaggagtttacccaagaaccattggtggagatagaaggtgttagtaaaatggcctttcgccatttaattgagttcacatatacagcaaaattaatgatacaaggagaagaagaagccaatgatgtatggaaagcagcagagtttctacaaatgctagaagctatcaaagcccttgaagtcaggaacaaagaaaactcagctcccttagaggaaaataccacaggaaaaaatgaggccaaaaaaaggaagattgcagaaacttcaaatgttatcactgagtcattgccatctgcagaatcagaacctgttgaaattgaggtagagattgccgaaggcaccattgaagtggaagatgaaggcatcgaaacattagaggaagtggcttctgccaagcagtccgtaaagtacatacagagcacaggttcctctgatgattctgctctagcactgttggcagatattaccagcaagtaccgtcaaggtgacagaaaagggcagattaaagaagatggctgtccatctgaccccacgagcaaacaggagcacatgaaatcacactccactgagagtttcaagtgtgaaatatgcaataaacgatatcttcgagagagcgcatggaaacagcacctaaattgttaccaccttgaagaaggtggagtcagtaagaagcaaagaactgggaaaaaaattcatgtatgtcagtactgtgagaaacagtttgaccattttggacattttaaagaacatcttcgaaaacatacaggtgaaaaaccttttgaatgtccaaattgtcatgaacgatttgctagaaatagcactctgaaatgtcacctcactgcatgccaaactggagtaggggcaaaaaaaggaaggaagaagctctacgaatgccaggtctgcaacagtgtgtttaacagctgggaccagttcaaagatcacttggtaatacacactggagataaacccaaccattgtactttatgtgatttgtggtttatgcaaggaaatgaattaaggaggcatctcagtgatgctcacaatatttcagagcgtctagtaacggaagaagttctttcagtagaaacacgtgtgcaaactgaacctgtaacatcaatgactattatagaacaagttgggaaggtgcatgtgctaccattgcttcaggttcaggtggattcagcacaagtgactgtggaacaagtccatccagatctgctccaggacagccaggtgcacgattcacacatgagtgagcttccagagcaggtccaagtgagttatctagaagtgggccgaattcagactgaagaaggtactgaagtacatgtagaggagctgcatgttgaacgggtcaatcaaatgccagtggaagtacaaactgaacttctagaagcagatttggaccacgtgaccccagaaatcatgaaccaagaggagagagagtctagccaagcagatgctgctgaggctgccagggaagatcacgaagatgctgaggatttagagaccaagccaacagtggattctgaagcagaaaaggcagagaatgaggacagaacagctctgccagttttagaatgaaattacacatgaatatatttttaaatttacttgttgggtttttgaactgattatgggcagtttgactgtccttaattaagcctaacagacaagtggaccaaagttaagctgtttcctgttgtgctgaactgttgtccgttgaaacacattgattcccctccccctacttattgccacagaggagggatcttttccataactgaaggggagttttgagaagtatatttctggaaacttaaatggattatattcttattatatagttgggtacgaatgtatctattttcattgtggtaaaagttcttccttttctctttcccaggtcatgttcttcctcaaattttttccatattgtaaaatcaaacttaaatcattagaatacaagtttatgtattctaatgcatgttagaaaattgaataatataggaaacacaaggctgcatgatgaaaagtgcattgttactgtgcagttaaattttggcttctggctttctttagtttgaacaaacgttcttgtctaccccagtagtcacagatgccatctttgcaacagaaagagtggtggtggcaaaatttctagaatgttaaaaaaaaaaaaaaaatccacacccatgtgccttctcaaaaccaactgaacttctataaagcatctctggttctttcaaagtttgtgttgtaaggagcaatgtagatgatgctataatactttatatttttgcttataatgacaaccaccagttctttttcacttaagttaggttgagaaattttatttaatggccactgaagggccattttcaattgggaaaatttatttacatctgtggtaaactttattttgatgaaaagttgcactagtattttaccaccagatgagaaaaagatgagcagcatttaaaaattaatgtatttaaaataaagtacagagaaagacatgtatataattatcaggctttgttttgaatggaatcttttcccccaattcttaatgtaaagatcttgtgctataacttttaaagccatacaaataagagtgctaaactgtggacttaaaagtaggtgtgtaaatatttttaatcagtattacttggaaaataaaatataacaaacccatagaccaatatgctattttttttacctgttaaatattgggagttctttacattttttaagtaaactttaaaattatg

SEQ ID NO: 315183 - DNA, 3252 bp, Homo sapiens
tcaacgctccggggccgctcggctcgcctttcttccctcgcctttctctcctcttgcttcaccctccccccttcttttcacgttgctggttttttttgttgttgttttatgctttaggggttttgttcctcggctcgagctcatgggtgtacattatcatgctcttcttttgtagagcagcccgacggccatggaggctgaagagacgatggaatgccttcaggagttccctgaacatcataaaatgatcctcgaccgattgaatgaacagcgagagcaggaccggtttactgacatcaccctaattgtcgacggacaccattttaaggctcacaaggctgttttggctgcttgtagtaagttcttctacaaattctttcaggagtttacccaagaaccattggtggagatagaaggtgttagtaaaatggcctttcgccatttaattgagttcacatatacagcaaaattaatgatacaaggagaagaagaagccaatgatgtatggaaagcagcagagtttctacaaatgctagaagctatcaaagcccttgaagtcaggaacaaagaaaactcagctcccttagaggaaaataccacaggaaaaaatgaggccaaaaaaaggaagattgcagaaacttcaaatgttatcactgagtcattgccatctgcagaatcagaacctgttgaaattgaggtagagattgccgaaggcaccattgaagtggaagatgaaggcatcgaaacattagaggaagtggcttctgccaagcagtccgtaaagtacatacagagcacaggttcctctgatgattctgctctagcactgttggcagatattaccagcaagtaccgtcaaggtgacagaaaagggcagattaaagaagatggctgtccatctgaccccacgagcaaacaggtagaaggtattgaaattgtggaacttcagctgtcacatgtgaaggacttgttccattgtgagaaatgtaaccgttcatttaaattgttttaccattttaaggagcacatgaaatcacactccactgagagtttcaagtgtgaaatatgcaataaacgatatcttcgagagagcgcatggaaacagcacctaaattgttaccaccttgaagaaggtggagtcagtaagaagcaaagaactgggaaaaaaattcatgtatgtcagtactgtgagaaacagtttgaccattttggacattttaaagaacatcttcgaaaacatacaggtgaaaaaccttttgaatgtccaaattgtcatgaacgatttgctagaaatagcactctgaaatgtcacctcactgcatgccaaactggagtaggggcaaaaaaaggaaggaagaagctctacgaatgccaggtctgcaacagtgtgtttaacagctgggaccagttcaaagatcacttggtaatacacactggagataaacccaaccattgtactttatgtgatttgtggtttatgcaaggaaatgaattaaggaggcatctcagtgatgctcacaatatttcagagcgtctagtaacggaagaagttctttcagtagaaacacgtgtgcaaactgaacctgtaacatcaatgactattatagaacaagttgggaaggtgcatgtgctaccattgcttcaggttcaggtggattcagcacaagtgactgtggaacaagtccatccagatctgctccaggacagccaggtgcacgattcacacatgagtgagcttccagagcaggtccaagtgagttatctagaagtgggccgaattcagactgaagaaggtactgaagtacatgtagaggagctgcatgttgaacgggtcaatcaaatgccagtggaagtacaaactgaacttctagaagcagatttggaccacgtgaccccagaaatcatgaaccaagaggagagagagtctagccaagcagatgctgctgaggctgccagggaagatcacgaagatgctgaggatttagagaccaagccaacagtggattctgaagcagaaaaggcagagaatgaggacagaacagctctgccagttttagaatgaaattacacatgaatatatttttaaatttacttgttgggtttttgaactgattatgggcagtttgactgtccttaattaagcctaacagacaagtggaccaaagttaagctgtttcctgttgtgctgaactgttgtccgttgaaacacattgattcccctccccctacttattgccacagaggagggatcttttccataactgaaggggagttttgagaagtatatttctggaaacttaaatggattatattcttattatatagttgggtacgaatgtatctattttcattgtggtaaaagttcttccttttctctttcccaggtcatgttcttcctcaaattttttccatattgtaaaatcaaacttaaatcattagaatacaagtttatgtattctaatgcatgttagaaaattgaataatataggaaacacaaggctgcatgatgaaaagtgcattgttactgtgcagttaaattttggcttctggctttctttagtttgaacaaacgttcttgtctaccccagtagtcacagatgccatctttgcaacagaaagagtggtggtggcaaaatttctagaatgttaaaaaaaaaaaaaaaatccacacccatgtgccttctcaaaaccaactgaacttctataaagcatctctggttctttcaaagtttgtgttgtaaggagcaatgtagatgatgctataatactttatatttttgcttataatgacaaccaccagttctttttcacttaagttaggttgagaaattttatttaatggccactgaagggccattttcaattgggaaaatttatttacatctgtggtaaactttattttgatgaaaagttgcactagtattttaccaccagatgagaaaaagatgagcagcatttaaaaattaatgtatttaaaataaagtacagagaaagacatgtatataattatcaggctttgttttgaatggaatcttttcccccaattcttaatgtaaagatcttgtgctataacttttaaagccatacaaataagagtgctaaactgtggacttaaaagtaggtgtgtaaatatttttaatcagtattacttggaaaataaaatataacaaacccatagaccaatatgctattttttttacctgttaaatattgggagttctttacattttttaagtaaactttaaaattatg

SEQ ID NO: 315184 - DNA, 2678 bp, Homo sapiens
tcaacgctccggggccgctcggctcgcctttcttccctcgcctttctctcctcttgcttcaccctccccccttcttttcacgttgctggttttttttgttgttgttttatgctttaggggttttgttcctcggctcgagctcatgggtgtacattatcatgctcttcttttgtagagcagcccgacggccatggaggctgaagagacgatggaatgccttcaggagttccctgaacatcataaaatgatcctcgaccgattgaatgaacagcgagagcaggaccggtttactgacatcaccctaattgtcgacggacaccattttaaggctcacaaggctgttttggctgcttgtagtaagttcttctacaaattctttcaggagtttacccaagaaccattggtggagatagaaggtgttagtaaaatggcctttcgccatttaattgagttcacatatacagcaaaattaatgatacaaggagaagaagaagccaatgatgtatggaaagcagcagagtttctacaaatgctagaagctatcaaagcccttgaagtcaggaacaaagaaaactcagctcccttagaggaaaataccacaggaaaaaatgaggccaaaaaaaggaagattgcagaaacttcaaatgttatcactgagtcattgccatctgcagaatcagaacctgttgaaattgaggtagagattgccgaaggcaccattgaagtggaagatgaaggcatcgaaacattagaggaagtggcttctgccaagcagtccgtaaagtacatacagagcacaggttcctctgatgattctgctctagcactgttggcagatattaccagcaagtaccgtcaaggtgacagaaaagggcagattaaagaagatggctgtccatctgaccccacgagcaaacaggtagaaggtattgaaattgtggaacttcagctgtcacatgtgaaggacttgttccattgtgagaaatgtaaccgttcatttaaattgttttaccattttaaggagcacatgaaatcacactccactgagagtttcaagtgtgaaatatgcaataaacgatatcttcgagagagcgcatggaaacagcacctaaattgttaccaccttgaagaaggtggagtcagtaagaagcaaagaactgggaaaaaaattcatgtatgtcagtactgtgagaaacagtttgaccattttggacattttaaagaacatcttcgaaaacatacaggtgaaaaaccttttgaatgtccaaattgtcatgaacgatttgctagaaatagcactctgaaatgtcacctcactgcatgccaaactggagtaggggcaaaaaaaggaaggaagaagctctacgaatgccaggtctgcaacagtgtgtttaacagctgggaccagttcaaagatcacttggtaatacacactggagataaacccaaccattgtactttatgtgatttgtggtttatgcaaggaaatgaattaaggaggcatctcagtgatgctcacaatatttcagagcgtctagtaacggaagaagttctttcagtagaaacacgtgtgcaaactgaacctgtaacatcaatgactattatagaacaagttgggaaggtgcatgtgctaccattgcttcaggttcaggtggattcagcacaagtgactgtggaacaagtccatccagatctgctccaggacagccaggtgcacgattcacacatgagtgagcttccagagcaggtccaagtgagttatctagaagtgggccgaattcagactgaagaaggtactgaagtacatgtagaggagctgcatgttgaacgggtcaatcaaatgccagtggaagtacaaactgaacttctagaagcagatttggaccacgtgaccccagaaatcatgaaccaagaggagagagagtctagccaagcagatgctgctgaggctgccagggaagatcacgaagatgctgaggatttagagaccaagccaacagtggattctgaagcagaaaaggcagagaatgaggacagaacagctctgccagttttagaatgaaattacacatgaatatatttttaaatttacttgttgggtttttgaactgattatgggcagtttgactgtccttaattaagcctaacagacaagtggaccaaagttaagctgtttcctgttgtgctgaactgttgtccgttgaaacacattgattcccctccccctacttattgccacagaggagggatcttttccataactgaaggggagttttgagaagtatatttctggaaacttaaatggattatattcttattatatagttgggtacgaatgtatctattttcattgtggtaaaagttcttccttttctctttcccaggtcatgttcttcctcaaattttttccatattgtaaaatcaaacttaaatcattagaatacaagtttatgtattctaatgcatgttagaaaattgaataatataggaaacacaaggctgcatgatgaaaagtgcattgttactgtgcagttaaattttggcttctggctttctttagtttgaacaaacgttcttgtctaccccagtagtcacagatgccatctttgcaacagaaagagtggtggtggcaaaatttctagaatgttaaaactttagagcacactggggtaccggat

SEQ ID NO: 315185 - DNA, 2297 bp, Homo sapiens
gcgtcgacgtaagtgacgcgcaagcctgggccgctcctccttccctcaagcagcccgacggccatggaggctgaagagacgatggaatgccttcaggagttccctgaacatcataaaatgatcctcgaccgattgaatgaacagcgagagcaggaccggtttactgacatcaccctaattgtcgacggacaccattttaaggctcacaaggctgttttggctgcttgtagtaagttcttctacaaattctttcaggagtttacccaagaaccattggtggagatagaaggtgaaaaaccttttgaatgtccaaattgtcatgaacgatttgctagaaatagcactctgaaatgtcacctcactgcatgccaaactggagtaggggcaaaaaaaggaaggaagaagctctacgaatgccaggtctgcaacagtgtgtttaacagctgggaccagttcaaagatcacttggtaatacacactggagataaacccaaccattgtactttatgtgatttgtggtttatgcaaggaaatgaattaaggaggcatctcagtgatgctcacaatatttcagagcgtctagtaacggaagaagttctttcagtagaaacacgtgtgcaaactgaacctgtaacatcaatgactattatagaacaagttgggaaggtgcatgtgctaccattgcttcaggttcaggtggattcagcacaagtgactgtggaacaagtccatccagatctgctccaggacagccaggtgcacgattcacacatgagtgagcttccagagcaggtccaagtgagttatctagaagtgggccgaattcagactgaagaaggtactgaagtacatgtagaggagctgcatgttgaacgggtcaatcaaatgccagtggaagtacaaactgaacttctagaagcagatttggaccacgtgaccccagaaatcatgaaccaagaggagagagagtctagccaagcagatgctgctgaggctgccagggaagatcacgaagatgctgaggatttagagaccaagccaacagtggattctgaagcagaaaaggcagagaatgaggacagaacagctctgccagttttagaatgaaattacacatgaatatatttttaaatttacttgttgggtttttgaactgattatgggcagtttgactgtccttaattaagcctaacagacaagtggaccaaagttaagctgtttcctgttgtgctgaactgttgtccgttgaaacacattgattcccctccccctacttattgccacagaggagggatcttttccataactgaaggggagttttgagaagtatatttctggaaacttaaatggattatattcttattatatagttgggtacgaatgtatctattttcattgtggtaaaagttcttccttttctctttcccaggtcatgttcttcctcaaattttttccatattgtaaaatcaaacttaaatcattagaatacaagtttatgtattctaatgcatgttagaaaattgaataatataggaaacacaaggctgcatgatgaaaagtgcattgttactgtgcagttaaattttggcttctggctttctttagtttgaacaaacgttcttgtctaccccagtagtcacagatgccatctttgcaacagaaagagtggtggtggcaaaatttctagaatgttaaaaaaaaaaaaaaaatccacacccatgtgccttctcaaaaccaactgaacttctataaagcatctctggttctttcaaagtttgtgttgtaaggagcaatgtagatgatgctataatactttatatttttgcttataatgacaaccaccagttctttttcacttaagttaggttgagaaattttatttaatggccactgaagggccattttcaattgggaaaatttatttacatctgtggtaaactttattttgatgaaaagttgcactagtattttaccaccagatgagaaaaagatgagcagcatttaaaaattaatgtatttaaaataaagtacagagaaagacatgtatataattatcaggctttgttttgaatggaatcttttcccccaattcttaatgtaaagatcttgtgctataacttttaaagccatacaaataagagtgctaaactgtggacttaaaagtaggtgtgtaaatatttttaatcagtattacttggaaaataaaatataacaaacccatagaccaatatgctattttttttacctgttaaatattgggagttctttacattttttaagtaaactttaaaattatg

SEQ ID NO: 315186 - DNA, 2289 bp, Homo sapiens
tcaacgctccggggccgctcggctcgcctttcttccctcgcctttctctcctcttgcttcaccctccccccttcttttcacgttgctggttttttttgttgttgttttatgctttaggggttttgttcctcggctcgagctcatgggtgtacattatcatgctcttcttttgtagagcagcccgacggccatggaggctgaagagacgatggaatgccttcaggagttccctgaacatcataaaatgatcctcgaccgattgaatgaacagcgagagcaggaccggtttactgacatcaccctaattgtcgacggacaccattttaaggctcacaaggctgttttggctgcttgtagtaagttcttctacaaattctttcaggagtttacccaagaaccattggtggagatagaaggtgttagtaaaatggcctttcgccatttaattgagttcacatatacagcaaaattaatgatacaaggagaagaagaagccaatgatgtatggaaagcagcagagtttctacaaatgctagaagctatcaaagcccttgaagtcaggaacaaagaaaactcagctcccttagaggaaaataccacaggaaaaaatgaggccaaaaaaaggaagattgcagaaacttcaaatgttatcactgagtcattgccatctgcagaatcagaacctgttgaaattgaggtagagattgccgaaggcaccattgaagtggaagatgaaggcatcgaaacattagaggaagtggcttctgccaagcagtccgtaaagtacatacagagcacaggttcctctgatgattctgctctagcactgttggcagatattaccagcaagtaccgtcaaggtgacagaaaagggcagattaaagaagatggctgtccatctgaccccacgagcaaacaggagcacatgaaatcacactccactgagagtttcaagtgtgaaatatgcaataaacgatatcttcgagagagcgcatggaaacagcacctaaattgttaccaccttgaagaaggtggagtcagtaagaagcaaagaactgggaaaaaaattcatgtatgtcagtactgtgagaaacagtttgaccattttggacattttaaagaacatcttcgaaaacatacagttctggatgctaagaagttcactgttatgaggccacatctggtgagagccctgccagtggcgactctgcagagtcctgaggccatgcagggcatcacatggtgaaaaaccttttgaatgtccaaattgtcatgaacgatttgctagaaatagcactctgaaatgtcacctcactgcatgccaaactggagtaggggcaaaaaaaggaaggaagaagctctacgaatgccaggtctgcaacagtgtgtttaacagctgggaccagttcaaagatcacttggtcatgttcttcctcaaattttttccatattgtaaaatcaaacttaaatcattagaatacaagtttatgtattctaatgcatgttagaaaattgaataatataggaaacacaaggctgcatgatgaaaagtgcattgttactgtgcagttaaattttggcttctggctttctttagtttgaacaaacgttcttgtctaccccagtagtcacagatgccatctttgcaacagaaagagtggtggtggcaaaatttctagaatgttaaaaaaaaaaaaaaaatccacacccatgtgccttctcaaaaccaactgaacttctataaagcatctctggttctttcaaagtttgtgttgtaaggagcaatgtagatgatgctataatactttatatttttgcttataatgacaaccaccagttctttttcacttaagttaggttgagaaattttatttaatggccactgaagggccattttcaattgggaaaatttatttacatctgtggtaaactttattttgatgaaaagttgcactagtattttaccaccagatgagaaaaagatgagcagcatttaaaaattaatgtatttaaaataaagtacagagaaagacatgtatataattatcaggctttgttttgaatggaatcttttcccccaattcttaatgtaaagatcttgtgctataacttttaaagccatacaaataagagtgctaaactgtggacttaaaagtaggtgtgtaaatatttttaatcagtattacttggaaaataaaatataacaaacccatagaccaatatgctattttttttacctgttaaatattgggagttctttacattttttaagtaaactttaaaattatg

SEQ ID NO: 315187 - DNA, 2614 bp, Homo sapiens
ttgggcgttggaccccgcatcttattagcaaccagggagatttctccattttcctcttgtctacagtgcggctacaaatctgggatttttttattacttctttttttttcgaactacacttgggctcctttttttgtgctcgacttttccaccctttttccctccctcctgtgctgctgctttttgatctcttcgactaaaatttttttatccggagtgtatttaatcggttctgttctgtcctctccaccacccccacccccctccctccggtgtgtgtgccgctgccgctgttgccgccgccgctgctgctgctgctcgccccgtcgttacaccaacccgaggctctttgtttcccctcttggatctgttgagtttctttgttgaagaagccagcatgggtgcccagttctccaagaccgcagcgaagggagaagccgccgcggagaggcctggggaggcggctgtggcctcgtcgccttccaaagcgaacggacaggagaatggccacgtgaaggtaaacggcgacgcttcgcccgcggccgccgagtcgggcgccaaggaggagctgcaggccaacggcagcgccccggccgccgacaaggaggagcccgcggccgccgggagcggggcggcgtcgccctccgcggccgagaaaggtgagccggccgccgccgctgcccccgaggccggggccagcccggtagagaaggaggcccccgcggaaggcgaggctgccgagcccggctcgcccacggccgcggagggagaggccgcgtcggccgcctcctcgacttcttcgcccaaggccgaggacggggccacgccctcgcccagcaacgagaccccgaaaaaaaaaaagaagcgcttttccttcaagaagtctttcaagctgagcggcttctccttcaagaagaacaagaaggaggctggagaaggcggtgaggctgaggcgcccgctgccgaaggcggcaaggacgaggccgccgggggcgcagctgcggccgccgccgaggcgggcgcggcctccggggagcaggcagcggcgccgggcgaggaggcggcagcgggcgaggagggggcggcgggtggcgacccgcaggaggccaagccccaggaggccgctgtcgcgccagagaagccgcccgccagcgacgagaccaaggccgccgaggagcccagcaaggtggaggagaaaaaggccgaggaggccggggccagcgccgccgcctgcgaggccccctccgccgccgggcccggcgcgcccccggagcaggaggcagcccccgcggaggagcccgcggccgccgcagcctcgtcagcctgcgcagccccctcacaggaggcccagcccgagtgcagtccagaagcccccccagcggaggcggcagagtaaaagagcaagcttttgtgagataatcgaagaacttttctcccccgtttgtttgttggagtggtgccaggtactggttttggagaacttgtctacaaccagggattgattttaaagatgtctttttttattttacttttttttaagcaccaaattttgttgttttttttttctcccctccccacagatcccatctcaaatcattctgttaaccaccattccaacaggtcgaggagagcttaaacaccttcttcctctgccttgtttctcttttattttttattttttcgcatcagtattaatgtttttgcatactttgcatctttattcaaaagtgtaaactttctttgtcaatctatggacatgcccatatatgaaggagatgggtgggtcaaaaagggatatcaaatgaagtgataggggtcacaatggggaaattgaagtggtgcataacattgccaaaatagtgtgccactagaaatggtgtaaaggctgtctttttttttttttttaaagaaaagttattaccatgtattttgtgaggcaggtttacaacactacaagtcttgagttaagaaggaaagaggaaaaaagaaaaaacaccaatacccagatttaaaaaaaaaaaaacgatcatagtcttaggagttcatttaaaccataggaacttttcacttatctcatgttagctgtaccagtcagtgattaagtagaactacaagttgtataggctttattgtttattgctggtttatgaccttaataaagtgtaattatgtattaccagcagggtgtttttaactgtgactattgtataaaaacaaatcttgatatccagaagcacatgaagtttgcaactttccaccctgcccatttttgtaaaactgcagtcatcttggaccttttaaaacacaaattttaaactcaaccaagctgtgataagtggaatggttactgtttatactgtggtatgtttttgattacagcagataatgctttcttttccagtcgtctttgagaataaaggaaaaaaaatcttcagatgcaatggttttgtgtagcatcttgtctatcatgttttgtaaatactggagaagctttgaccaatttgacttagagatggaatgtaactttgcttacaaaaattgctattaaactcctgcttaaggtgttctaattttctgtgagcacactaaaagcgaaaaataaatgtgaataaaa

SEQ ID NO: 315188 - DNA, 711 bp, Homo sapiens
atttcggattttaattcgactccccaatagggaatttgggcccttcagggccaagaattcgggcacgaggaaagaggaaaaaagaaaaaacaccaatacccagatttaaaaaaaaaaaaacgatcatagtcttaggagttcatttaaaccataggaacttttcacttatctcatgttagctgtaccagtcagtgattaagtagaactacaagttgtataggctttattgtttattgctggtttatgaccttaataaagtgtaattatgtattaccagcagggtgtttttaactgtgactattgtataaaaacaaatcttgatatccagaagcacatgaagtttgcaactttccaccctgcccatttttgtaaaactgcagtcatcttggaccttttaaaacacaaattttaaactcaaccaagctgtgataagtggaatggttactgtttatactgtggtatgtttttgattacagcagataatgctttcttttccagtcgtctttgagaataaaggaaaaaaaatcttcagatgcaatggttttgtgtagcatcttgtctatcatgttttgtaaatactggagaagctttgaccaatttgacttagagatggaatgtaactttgcttacaaaaattgctattaaactcctgcttaaggtgttctaattttctgtgagcacactaaaagcgaaaaataaatgtgaataaaa

SEQ ID NO: 315189 - DNA, 515 bp, Homo sapiens
ccatgctcatagctgactctagaggataaaattcctctcatcgaaccttaattcgtggcgagagctgttcccggagaagaaaaccgccgctgctgctgctgctcgccccgtcgttacaccaacccgaggctctttgtttcccctcttggatctgttgagtttctttgttgaagaagccagcatgggtgcccagttctccaagaccgcagcgaagggagaagccgccgcggagaggcctggggaggcggctgtggcctcgtcgccttccaaagcgaacggacaggtaaattctacctgtggttgtggtcatttatttcgtgtctttctctccttccctcctggtggctcccaaggctcattcgtggagaggagtgtggctggattctagtctgaaagttgaatggaaatggatagcctaaattgtggatttttcatagccggggtccccccacaccaaaggagtggttccttagaatcctggagaattcttgagtagacgggaggaaaggagtgat

SEQ ID NO: 315190 - DNA, 4297 bp, Homo sapiens
ttgggcgttggaccccgcatcttattagcaaccagggagatttctccattttcctcttgtctacagtgcggctacaaatctgggatttttttattacttctttttttttcgaactacacttgggctcctttttttgtgctcgacttttccaccctttttccctccctcctgtgctgctgctttttgatctcttcgactaaaatttttttatccggagtgtatttaatcggttctgttctgtcctctccaccacccccacccccctccctccggtgtgtgtgccgctgccgctgttgccgccgccgctgctgctgctgctcgccccgtcgttacaccaacccgaggctctttgtttcccctcttggatctgttgagtttctttgttgaagaagccagcatgggtgcccagttctccaagaccgcagcgaagggagaagccgccgcggagaggcctggggaggcggctgtggcctcgtcgccttccaaagcgaacggacaggagaatggccacgtgaaggtaaacggcgacgcttcgcccgcggccgccgagtcgggcgccaaggaggagctgcaggccaacggcagcgccccggccgccgacaaggaggagcccgcggccgccgggagcggggcggcgtcgccctccgcggccgagaaaggtgagccggccgccgccgctgcccccgaggccggggccagcccggtagagaaggaggcccccgcggaaggcgaggctgccgagcccggctcgcccacggccgcggagggagaggccgcgtcggccgcctcctcgacttcttcgcccaaggccgaggacggggccacgccctcgcccagcaacgagaccccgaaaaaaaaaaagaagcgcttttccttcaagaagtctttcaagctgagcggcttctccttcaagaagaacaagaaggaggctggagaaggcggtgaggctgaggcgcccgctgccgaaggcggcaaggacgaggccgccgggggcgcagctgcggccgccgccgaggcgggcgcggcctccggggagcaggcagcggcgccgggcgaggaggcggcagcgggcgaggagggggcggcgggtggcgacccgcaggaggccaagccccaggaggccgctgtcgcgccagagaagccgcccgccagcgacgagaccaaggccgccgaggagcccagcaaggtggaggagaaaaaggccgaggaggccggggccagcgccgccgcctgcgaggccccctccgccgccgggcccggcgcgcccccggagcaggaggcagcccccgcggaggagcccgcggccgccgcagcctcgtcagcctgcgcagccccctcacaggaggcccagcccgagtgcagtccagaagcccccccagcggaggcggcagagtaaaagagcaagcttttgtgagataatcgaagaacttttctcccccgtttgtttgttggagtggtgccaggtactggttttggagaacttgtctacaaccagggattgattttaaagatgtctttttttattttacttttttttaagcaccaaattttgttgttttttttttctcccctccccacagatcccatctcaaatcattctgttaaccaccattccaacaggtcgaggagagcttaaacaccttcttcctctgccttgtttctcttttattttttattttttcgcatcagtattaatgtttttgcatactttgcatctttattcaaaagtgtaaactttctttgtcaatctatggacatgcccatatatgaaggagatgggtgggtcaaaaagggatatcaaatgaagtgataggggtcacaatggggaaattgaagtggtgcataacattgccaaaatagtgtgccactagaaatggtgtaaaggctgtctttttttttttttttaaagaaaagttattaccatgtattttgtgaggcaggtttacaacactacaagtcttgagttaagaaggaaagaggaaaaaagaaaaaacaccaatacccagatttaaaaaaaaaaaaacgatcatagtcttaggagttcatttaaaccataggaacttttcacttatctcatgttagctgtaccagtcagtgattaagtagaactacaagttgtataggctttattgtttattgctggtttatgaccttaataaagtgtaattatgtattaccagcagggtgtttttaactgtgactattgtataaaaacaaatcttgatatccagaagcacatgaagtttgcaactttccaccctgcccatttttgtaaaactgcagtcatcttggaccttttaaaacacaaattttaaactcaaccaagctgtgataagtggaatggttactgtttatactgtggtatgtttttgattacagcagataatgctttcttttccagtcgtctttgagaataaaggaaaaaaaatcttcagatgcaatggttttgtgtagcatcttgtctatcatgttttgtaaatactggagaagctttgaccaatttgacttagagatggaatgtaactttgcttacaaaaattgctattaaactcctgcttaaggtgttctaattttctgtgagcacactaaaagcgaaaaataaatgtgaataaaatgtaaaaatttgttgtgtttttttatgttctaataatactgagacttctaggtcttaggttaatttttaggaagatcttgcatgccatcaggagtaaattttattgtggttcttaatctgaagttttcaagctctgaaattcataatccgcagtgtcagattacgtagaggaagatcttacaacattccatgtcaaatctgttaccatttattggcatttagttttcatttaagaattgaacataattatttttattgtagctatatagcatgtcagattaaatcatttacaacaaaaggggtgtgaacctaagactatttaaatgtcttatgagaaaatttcataaagccattctcttgtcattcaggtccagaaacaaattttaaactgagtgagagtctatagaatccatactgcagatgggtcatgaaatgtgaccaaatgtgtttcaaaaattgatggtgtattacctgctattgtaattgcttagtgcttggctaatttccaaattattgcataatatgttctaccttaagaaaacaggtttatgtaacaaagtaatggtgttgaatggatgatgtcagttcatgggcctttagcatagttttaagcatcctttttttttttttttttttgaaagtgtgttagcatcttgttactcaaaggataagacagacaataatacttcactgaatattaataatctttactagtttacctcctctgctctttgccacccgataactggatatcttttccttcaaaggaccctaaactgattgaaatttaagatatgtatcaaaaacattatttcatttaatgcacatctgttttgctgtttttgagcagtgtgcagtttagggttcatgataaatcattgaaccacatgtgtaacaactgaatgccaaatcttaaactcattagaaaaataacaaattaggttttgacacgcattcttaattggaataatggatcaaaaatagtggttcatgaccttaccaaacacccttgctactaataaaatcaaataacacttagaagggtatgtatttttagttagggtttcttgatcttggaggatgtttgaaagttaaaaattgaatttggtaaccaaaggactgatttatgggtctttcctatcttaaccaacgttttcttagttacctagatggccaagtacagtgcctggtatgtagtaagactcagtaaaaaagtggatttttaaaaataactcccaaagtgaatagtcaaaaatcctgttagcaaactgttatatattgctaagtttgttcttttaacagctggaatttattaagatgcattattttgattttattcactgcctaaaacactttgggtggtattgatggagttggtggattttcctccaagtgattaaatgaaatttgacgtatcttttcatccaaagttttgtacatcatgttttctaacggaaaaaaatgttaatatggcttttttgtattactaaaaatagctttgagattaaggaaaaataaataactcttgtacagttcagtattgtctattaaatctgtattggcagtatgtataatggcatttgctgtggttacaaaatacttcctctgggttataataatcatttgatccaattcctattgcttgtaaaataaagttttaccagttgatataaaaaaacctgc

SEQ ID NO: 315191 - DNA, 4243 bp, Homo sapiens
ttgggcgttggaccccgcatcttattagcaaccagggagatttctccattttcctcttgtctacagtgcggctacaaatctgggatttttttattacttctttttttttcgaactacacttgggctcctttttttgtgctcgacttttccaccctttttccctccctcctgtgctgctgctttttgatctcttcgactaaaatttttttatccggagtgtatttaatcggttctgttctgtcctctccaccacccccacccccctccctccggtgtgtgtgccgctgccgctgttgccgccgccgctgctgctgctgctcgccccgtcgttacaccaacccgaggctctttgtttcccctcttggatctgttgagtttctttgttgaagaagccagcatgggtgcccagttctccaagaccgcagcgaagggagaagccgccgcggagaggcctggggaggcggctgtggcctcgtcgccttccaaagcgaacggacaggagaatggccacgtgaaggtaaacggcgacgcttcgcccgcggccgccgagtcgggcgccaaggaggagctgcaggccaacggcagcgccccggccgccgacaaggaggagcccgcggccgccgggagcggggcggcgtcgccctccgcggccgagaaaggtgagccggccgccgccgctgcccccgaggccggggccagcccggtagagaaggaggcccccgcggaaggcgaggctgccgagcccggctcgcccacggccgcggagggagaggccgcgtcggccgcctcctcgacttcttcgcccaaggccgaggacggggccacgccctcgcccagcaacgagaccccgaaaaaaaaaaagaagcgcttttccttcaagaagtctttcaagctgagcggcttctccttcaagaagaacaagaaggaggctggagaaggcggtgaggctgaggcgcccgctgccgaaggcggcaaggacgaggccgccgggggcgcagctgcggccgccgccgaggcgggcgcggcctccggggagcaggcagcggcgccgggcgaggaggcggcagcgggcgaggagggggcggcgggtggcgacccgcaggaggccaagccccaggaggccgctgtcgcgccagagaagccgcccgccagcgacgagaccaaggccgccgaggagcccagcaaggtggaggagaaaaaggccgaggaggccggggccagcgccgccgcctgcgaggccccctccgccgccgggcccggcgcgcccccggagcaggaggcagcccccgcggaggagcccgcggccgccgcagcctcgtcagcctgcgcagccccctcacaggaggcccagcccgagtgcagtccagaagcccccccagcggaggcggcagagtaaaagagcaagcttttgtgagataatcgaagaacttttctcccccgtttgtttgttggagtggtgccaggtactggttttggagaacttgtctacaaccagggattgattttaaagatgtctttttttattttacttttttttaagcaccaaattttgttgttttttttttctcccctccccacagatcccatctcaaatcattctgttaaccaccattccaacaggtcgaggagagcttaaacaccttcttcctctgccttgtttctcttttattttttattttttcgcatcagtattaatgtttttgcatactttgcatctttattcaaaagtgtaaactttctttgtcaatctatggacatgcccatatatgaaggagatgggtgggtcaaaaagggatatcaaatgaagtgataggggtcacaatggggaaattgaagtggtgcataacattgccaaaatagtgtgccactagaaatggtgtaaaggctgtctttttttttttttttaaagaaaagttattaccatgtattttgtgaggcaggtttacaacactacaagtcttgagttaagaaggaaagaggaaaaaagaaaaaacaccaatacccagatttaaaaaaaaaaaaacgatcatagtcttaggagttcatttaaaccataggaacttttcacttatctcatgttagctgtaccagtcagtgattaagtagaactacaagttgtataggctttattgtttattgctggtttatgaccttaataaagtgtaattatgtattaccagcagggtgtttttaactgtgactattgtataaaaacaaatcttgatatccagaagcacatgaagtttgcaactttccaccctgcccatttttgtaaaactgcagtcatcttggactgtttatactgtggtatgtttttgattacagcagataatgctttcttttccagtcgtctttgagaataaaggaaaaaaaatcttcagatgcaatggttttgtgtagcatcttgtctatcatgttttgtaaatactggagaagctttgaccaatttgacttagagatggaatgtaactttgcttacaaaaattgctattaaactcctgcttaaggtgttctaattttctgtgagcacactaaaagcgaaaaataaatgtgaataaaatgtaaaaatttgttgtgtttttttatgttctaataatactgagacttctaggtcttaggttaatttttaggaagatcttgcatgccatcaggagtaaattttattgtggttcttaatctgaagttttcaagctctgaaattcataatccgcagtgtcagattacgtagaggaagatcttacaacattccatgtcaaatctgttaccatttattggcatttagttttcatttaagaattgaacataattatttttattgtagctatatagcatgtcagattaaatcatttacaacaaaaggggtgtgaacctaagactatttaaatgtcttatgagaaaatttcataaagccattctcttgtcattcaggtccagaaacaaattttaaactgagtgagagtctatagaatccatactgcagatgggtcatgaaatgtgaccaaatgtgtttcaaaaattgatggtgtattacctgctattgtaattgcttagtgcttggctaatttccaaattattgcataatatgttctaccttaagaaaacaggtttatgtaacaaagtaatggtgttgaatggatgatgtcagttcatgggcctttagcatagttttaagcatcctttttttttttttttttttgaaagtgtgttagcatcttgttactcaaaggataagacagacaataatacttcactgaatattaataatctttactagtttacctcctctgctctttgccacccgataactggatatcttttccttcaaaggaccctaaactgattgaaatttaagatatgtatcaaaaacattatttcatttaatgcacatctgttttgctgtttttgagcagtgtgcagtttagggttcatgataaatcattgaaccacatgtgtaacaactgaatgccaaatcttaaactcattagaaaaataacaaattaggttttgacacgcattcttaattggaataatggatcaaaaatagtggttcatgaccttaccaaacacccttgctactaataaaatcaaataacacttagaagggtatgtatttttagttagggtttcttgatcttggaggatgtttgaaagttaaaaattgaatttggtaaccaaaggactgatttatgggtctttcctatcttaaccaacgttttcttagttacctagatggccaagtacagtgcctggtatgtagtaagactcagtaaaaaagtggatttttaaaaataactcccaaagtgaatagtcaaaaatcctgttagcaaactgttatatattgctaagtttgttcttttaacagctggaatttattaagatgcattattttgattttattcactgcctaaaacactttgggtggtattgatggagttggtggattttcctccaagtgattaaatgaaatttgacgtatcttttcatccaaagttttgtacatcatgttttctaacggaaaaaaatgttaatatggcttttttgtattactaaaaatagctttgagattaaggaaaaataaataactcttgtacagttcagtattgtctattaaatctgtattggcagtatgtataatggcatttgctgtggttacaaaatacttcctctgggttataataatcatttgatccaattcctattgcttgtaaaataaagttttaccagttgatataaaaaaacctgc

SEQ ID NO: 315192 - DNA, 3103 bp, Homo sapiens
  misc_feature (2663)..(2663): n is a, c, g, or t
  misc_feature (2667)..(2667): n is a, c, g, or t
  misc_feature (2670)..(2670): n is a, c, g, or t
  misc_feature (2677)..(2677): n is a, c, g, or t
ttgggcgttggaccccgcatcttattagcaaccagggagatttctccattttcctcttgtctacagtgcggctacaaatctgggatttttttattacttctttttttttcgaactacacttgggctcctttttttgtgctcgacttttccaccctttttccctccctcctgtgctgctgctttttgatctcttcgactaaaatttttttatccggagtgtatttaatcggttctgttctgtcctctccaccacccccacccccctccctccggtgtgtgtgccgctgccgctgttgccgccgccgctgctgctgctgctcgccccgtcgttacaccaacccgaggctctttgtttcccctcttggatctgttgagtttctttgttgaagaagccagcatgggtgcccagttctccaagaccgcagcgaagggagaagccgccgcggagaggcctggggaggcggctgtggcctcgtcgccttccaaagcgaacggacaggagaatggccacgtgaaggtaaacggcgacgcttcgcccgcggccgccgagtcgggcgccaaggaggagctgcaggccaacggcagcgccccggccgccgacaaggaggagcccgcggccgccgggagcggggcggcgtcgccctccgcggccgagaaaggtgagccggccgccgccgctgcccccgaggccggggccagcccggtagagaaggaggcccccgcggaaggcgaggctgccgagcccggctcgcccacggccgcggagggagaggccgcgtcggccgcctcctcgacttcttcgcccaaggccgaggacggggccacgccctcgcccagcaacgagaccccgaaaaaaaaaaagaagcgcttttccttcaagaagtctttcaagctgagcggcttctccttcaagaagaacaagaaggaggctggagaaggcggtgaggctgaggcgcccgctgccgaaggcggcaaggacgaggccgccgggggcgcagctgcggccgccgccgaggcgggcgcggcctccggggagcaggcagcggcgccgggcgaggaggcggcagcgggcgaggagggggcggcgggtggcgacccgcaggaggccaagccccaggaggccgctgtcgcgccagagaagccgcccgccagcgacgagaccaaggccgccgaggagcccagcaaggtggaggagaaaaaggccgaggaggccggggccagcgccgccgcctgcgaggccccctccgccgccgggcccggcgcgcccccggagcaggaggcagcccccgcggaggagcccgcggccgccgcagcctcgtcagcctgcgcagccccctcacaggaggcccagcccgagtgcagtccagaagcccccccagcggaggcggcagagtaaaagagcaagcttttgtgagataatcgaagaacttttctcccccgtttgtttgttggagtggtgccaggtactggttttggagaacttgtctacaaccagggattgattttaaagatgtctttttttattttacttttttttaagcaccaaattttgttgttttttttttctcccctccccacagatcccatctcaaatcattctgttaaccaccattccaacaggtcgaggagagcttaaacaccttcttcctctgccttgtttctcttttattttttattttttcgcatcagtattaatgtttttgcatactttgcatctttattcaaaagtgtaaactttctttgtcaatctatggacatgcccatatatgaaggagatgggtgggtcaaaaagggatatcaaatgaagtgataggggtcacaatggggaaattgaagtggtgcataacattgccaaaatagtgtgccactagaaatggtgtaaaggctgtctttttttttttttttaaagaaaagttattaccatgtattttgtgaggcaggtttacaacactacaagtcttgagttaagaaggaaagaggaaaaaagaaaaaacaccaatacccagatttaaaaaaaaaaaaacgatcatagtcttaggagttcatttaaaccataggaacttttcacttatctcatgttagctgtaccagtcagtgattaagtagaactacaagttgtataggctttattgtttattgctggtttatgaccttaataaagtgtaattatgtattaccagcagggtgtttttaactgtgactattgtataaaaacaaatcttgatatccagaagcacatgaagtttgcaactttccaccctgcccatttttgtaaaactgcagtcatcttggaccttttaaaacacaaattttaaactcaaccaagctgtgataagtggaatggttactgtttatactgtggtatgtttttgattacagcagataatgctttcttttccagtcgtctttgagaataaaggaaaaaaaatcttcagatgcaatggttttgtgtagcatcttgtctatcatgttttgtaaatactggagaagctttgaccaatttgacttagagatggaatgtaactttgcttacaaaaattgctattaaactcctgcttaaggtgttctaattttctgtgagcacactaaaagcgaaaaataaatgtgaataaaatgtaaaacaaaaaaaaaaaaaacaaagaaagaaaaacacacaacaaacnaaancancaaacanaaggggggggcgcgcgccgcaaataaattcctcccggagggggcgccccaaatagggcgacccccacagcttttttgtaaaacagggggcgcgccccataagggggacgcgtctatataaacagcgggcggcggggggcgcgcggagtgtaaaaaaacagcgcctcgggagcgggggcaaaaaacgatgggctatgaggcgggaacctactgtgagagagaggaacaccccccaaacttcgcggggggggagcacaacatattgggggccacactcaccccacgacaggaagaattaagagccctctggggggaaacaatcaaaacacctcggagcaggtcatttcacagcggggggtccaaaacgacaaccgcgcggaataatccgcgccgccgcagagaagaacatcttgtgccacaccgagat

SEQ ID NO: 315193 - DNA, 2683 bp, Homo sapiens
ttgggcgttggaccccgcatcttattagcaaccagggagatttctccattttcctcttgtctacagtgcggctacaaatctgggatttttttattacttctttttttttcgaactacacttgggctcctttttttgtgctcgacttttccaccctttttccctccctcctgtgctgctgctttttgatctcttcgactaaaatttttttatccggagtgtatttaatcggttctgttctgtcctctccaccacccccacccccctccctccggtgtgtgtgccgctgccgctgttgccgccgccgctgctgctgctgctcgccccgtcgttacaccaacccgaggctctttgtttcccctcttggatctgttgagtttctttgttgaagaagccagcatgggtgcccagttctccaagaccgcagcgaagggagaagccgccgcggagaggcctggggaggcggctgtggcctcgtcgccttccaaagcgaacggacaggagaatggccacgtgaaggtaaacggcgacgcttcgcccgcggccgccgagtcgggcgccaaggaggagctgcaggccaacggcagcgccccggccgccgacaaggaggagcccgcggccgccgggagcggggcggcgtcgccctccgcggccgagaaaggtgagccggccgccgccgctgcccccgaggccggggccagcccggtagagaaggaggcccccgcggaaggcgaggctgccgagcccggctcgcccacggccgcggagggagaggccgcgtcggccgcctcctcgacttcttcgcccaaggccgaggacggggccacgccctcgcccagcaacgagaccccgaaaaaaaaaaagaagcgcttttccttcaagaagtctttcaagctgagcggcttctccttcaagaagaacaagaaggaggctggagaaggcggtgaggctgaggcgcccgctgccgaaggcggcaaggacgaggccgccgggggcgcagctgcggccgccgccgaggcgggcgcggcctccggggagcaggcagcggcgccgggcgaggaggcggcagcgggcgaggagggggcggcgggtggcgacccgcaggaggccaagccccaggaggccgctgtcgcgccagagaagccgcccgccagcgacgagaccaaggccgccgaggagcccagcaaggtggaggagaaaaaggccgaggaggccggggccagcgccgccgcctgcgaggccccctccgccgccgggcccggcgcgcccccggagcaggaggcagcccccgcggaggagcccgcggccgccgcagcctcgtcagcctgcgcagccccctcacaggaggcccagcccgagtgcagtccagaagcccccccagcggaggcggcagagtaaaagagcaagcttttgtgagataatcgaagaacttttctcccccgtttgtttgttggagtggtgccaggtactggttttggagaacttgtctacaaccagggattgattttaaagatgtctttttttattttacttttttttaagcaccaaattttgttgttttttttttctcccctccccacagatcccatctcaaatcattctgttaaccaccattccaacaggtcgaggagagcttaaacaccttcttcctctgccttgtttctcttttattttttattttttcgcatcagtattaatgtttttgcatactttgcatctttattcaaaagtgtaaactttctttgtcaatctatggacatgcccatatatgaaggagatgggtgggtcaaaaagggatatcaaatgaagtgataggggtcacaatggggaaattgaagtggtgcataacattgccaaaatagtgtgccactagaaatggtgtaaaggctgtctttttttttttttttaaagaaaagttattaccatgtattttgtgaggcaggtttacaacactacaagtcttgagttaagaaggaaagaggaaaaaagaaaaaacaccaatacccagatttaaaaaaaaaaaaacgatcatagtcttaggagttcatttaaaccataggaacttttcacttatctcatgttagctgtaccagtcagtgattaagtagaactacaagttgtataggctttattgtttattgctggtttatgaccttaataaagtgtaattatgtattaccagcagggtgtttttaactgtgactattgtataaaaacaaatcttgatatccagaagcacatgaagtttgcaactttccaccctgcccatttttgtaaaactgcagtcatcttggaccttttaaaacacaaattttaaactcaaccaagctgtgataagtggaatggttactgtttatactgtggtatgtttttgattacagcagataatgctttcttttccagtcgtctttgagaataaaggaaaaaaaatcttcagatgcaatggttttgtgtagcatcttgtctatcatgttttgtaaatactggagaagctttgaccaatttgacttagagatggaatgtaactttgcttacaaaaattgctattaaactcctgcttaaggtgttctaattttctgtgagcacactaaaagcgaaaaataaatgtgaataaaatgtaaaaaacactggcgtcgtttacacgttgtgactgtctttgcggtacccctttcgcttgtggtttcc

SEQ ID NO: 315194 - DNA, 2954 bp, Homo sapiens
ttgggcgttggaccccgcatcttattagcaaccagggagatttctccattttcctcttgtctacagtgcggctacaaatctgggatttttttattacttctttttttttcgaactacacttgggctcctttttttgtgctcgacttttccaccctttttccctccctcctgtgctgctgctttttgatctcttcgactaaaatttttttatccggagtgtatttaatcggttctgttctgtcctctccaccacccccacccccctccctccggtgtgtgtgccgctgccgctgttgccgccgccgctgctgctgctgctcgccccgtcgttacaccaacccgaggctctttgtttcccctcttggatctgttgagtttctttgttgaagaagccagcatgggtgcccagttctccaagaccgcagcgaagggagaagccgccgcggagaggcctggggaggcggctgtggcctcgtcgccttccaaagcgaacggacaggagaatggccacgtgaaggtaaacggcgacgcttcgcccgcggccgccgagtcgggcgccaaggaggagctgcaggccaacggcagcgccccggccgccgacaaggaggagcccgcggccgccgggagcggggcggcgtcgccctccgcggccgagaaaggtgagccggccgccgccgctgcccccgaggccggggccagcccggtagagaaggaggcccccgcggaaggcgaggctgccgagcccggctcgcccacggccgcggagggagaggccgcgtcggccgcctcctcgacttcttcgcccaaggccgaggacggggccacgccctcgcccagcaacgagaccccgaaaaaaaaaaagaagcgcttttccttcaagaagtctttcaagctgagcggcttctccttcaagaagaacaagaaggaggctggagaaggcggtgaggctgaggcgcccgctgccgaaggcggcaaggacgaggccgccgggggcgcagctgcggccgccgccgaggcgggcgcggcctccggggagcaggcagcggcgccgggcgaggaggcggcagcgggcgaggagggggcggcgggtggcgacccgcaggaggccaagccccaggaggccgctgtcgcgccagagaagccgcccgccagcgacgagaccaaggccgccgaggagcccagcaaggtggaggagaaaaaggccgaggaggccggggccagcgccgccgcctgcgaggccccctccgccgccgggcccggcgcgcccccggagcaggaggcagcccccgcggaggagcccgcggccgccgcagcctcgtcagcctgcgcagccccctcacaggaggcccagcccgagtgcagtccagaagcccccccagcggaggcggcagagtaaaagagcaagcttttgtgagataatcgaagaacttttctcccccgtttgtttgttggagtggtgccaggtactggttttggagaacttgtctacaaccagggattgattttaaagatgtctttttttattttacttttttttaagcaccaaattttgttgttttttttttctcccctccccacagatcccatctcaaatcattctgttaaccaccattccaacaggtcgaggagagcttaaacaccttcttcctctgccttgtttctcttttattttttattttttcgcatcagtattaatgtttttgcatactttgcatctttattcaaaagtgtaaactttctttgtcaatctatggacatgcccatatatgaaggagatgggtgggtcaaaaagggatatcaaatgaagtgataggggtcacaatggggaaattgaagtggtgcataacattgccaaaatagtgtgccactagaaatggtgtaaaggctgtctttttttttttttttaaagaaaagttattaccatgtattttgtgaggcaggtttacaacactacaagtcttgagttaagaaggaaagaggaaaaaagaaaaaacaccaatacccagatttaaaaaaaaaaaaacgatcatagtcttaggagttcatttaaaccataggaacttttcacttatctcatgttagctgtaccagtcagtgattaagtagaactacaagttgtataggctttattgtttattgctggtttatgaccttaataaagtgtaattatgtattaccagcagggtgtttttaactgtgactattgtataaaaacaaatcttgatatccagaagcacatgaagtttgcaactttccaccctgcccatttttgtaaaactgcagtcatcttggaccttttaaaacacaaattttaaactcaaccaagctgtgataagtggaatggttactgtttatactgtggtatgtttttgattacagcagataatgctttcttttccagtcgtctttgagaataaaggaaaaaaaatcttcagatgcaatggttttgtgtagcatcttgtctatcatgttttgtaaatactggagaagctttgaccaatttgacttagagatggaatgtaactttgcttacaaaaattgctattaaactcctgcttaaggtgttctaattttctgtgagcacactaaaagcgaaaaataaatgtgaataaaatgtaaaacaaaaaaaaaaaaaacaaactctcacaaaaaaattaaaactacaacaaaaatatctaactatctatcatcaactaactactaaaaacgcttctccctacaaacaacccatcttttaacatccttctgctgcccgtctcgtcctctctcttttttatctctgacaccattttttttccccctccttattccccgtctctttcccaaccctcccactaaccacccgctcaccataacctcgcccgcgttcttacaaaactcttggcctgaacctccgtcttaccccaattaatcgcctctccacccaaacccctcttttcctaactgggctatcc

SEQ ID NO: 315195 - DNA, 2292 bp, Homo sapiens
ttgggcgttggaccccgcatcttattagcaaccagggagatttctccattttcctcttgtctacagtgcggctacaaatctgggatttttttattacttctttttttttcgaactacacttgggctcctttttttgtgctcgacttttccaccctttttccctccctcctgtgctgctgctttttgatctcttcgactaaaatttttttatccggagtgtatttaatcggttctgttctgtcctctccaccacccccacccccctccctccggtgtgtgtgccgctgccgctgttgccgccgccgctgctgctgctgctcgccccgtcgttacaccaacccgaggctctttgtttcccctcttggatctgttgagtttctttgttgaagaagccagcatgggtgcccagttctccaagaccgcagcgaagggagaagccgccgcggagaggccgcgtcggccgcctcctcgacttcttcgcccaaggccgaggacggggccacgccctcgcccagcaacgagaccccgaaaaaaaaaaagaagcgcttttccttcaagaagtctttcaagctgagcggcttctccttcaagaagaacaagaaggaggctggagaaggcggtgaggctgaggcgcccgctgccgaaggcggcaaggacgaggccgccgggggcgcagctgcggccgccgccgaggcgggcgcggcctccggggagcaggcagcggcgccgggcgaggaggcggcagcgggcgaggagggggcggcgggtggcgacccgcaggaggccaagccccaggaggccgctgtcgcgccagagaagccgcccgccagcgacgagaccaaggccgccgaggagcccagcaaggtggaggagaaaaaggccgaggaggccggggccagcgccgccgcctgcgaggccccctccgccgccgggcccggcgcgcccccggagcaggaggcagcccccgcggaggagcccgcggccgccgcagcctcgtcagcctgcgcagccccctcacaggaggcccagcccgagtgcagtccagaagcccccccagcggaggcggcagagtaaaagagcaagcttttgtgagataatcgaagaacttttctcccccgtttgtttgttggagtggtgccaggtactggttttggagaacttgtctacaaccagggattgattttaaagatgtctttttttattttacttttttttaagcaccaaattttgttgttttttttttctcccctccccacagatcccatctcaaatcattctgttaaccaccattccaacaggtcgaggagagcttaaacaccttcttcctctgccttgtttctcttttattttttattttttcgcatcagtattaatgtttttgcatactttgcatctttattcaaaagtgtaaactttctttgtcaatctatggacatgcccatatatgaaggagatgggtgggtcaaaaagggatatcaaatgaagtgataggggtcacaatggggaaattgaagtggtgcataacattgccaaaatagtgtgccactagaaatggtgtaaaggctgtctttttttttttttttaaagaaaagttattaccatgtattttgtgaggcaggtttacaacactacaagtcttgagttaagaaggaaagaggaaaaaagaaaaaacaccaatacccagatttaaaaaaaaaaaaacgatcatagtcttaggagttcatttaaaccataggaacttttcacttatctcatgttagctgtaccagtcagtgattaagtagaactacaagttgtataggctttattgtttattgctggtttatgaccttaataaagtgtaattatgtattaccagcagggtgtttttaactgtgactattgtataaaaacaaatcttgatatccagaagcacatgaagtttgcaactttccaccctgcccatttttgtaaaactgcagtcatcttggaccttttaaaacacaaattttaaactcaaccaagctgtgataagtggaatggttactgtttatactgtggtatgtttttgattacagcagataatgctttcttttccagtcgtctttgagaataaaggaaaaaaaatcttcagatgcaatggttttgtgtagcatcttgtctatcatgttttgtaaatactggagaagctttgaccaatttgacttagagatggaatgtaactttgcttacaaaaattgctattaaactcctgcttaaggtgttctaattttctgtgagcacactaaaagcgaaaaataaatgtgaataaaa

SEQ ID NO: 315196 - DNA, 2217 bp, Homo sapiens
ccagctctggctctgtgccttcttccaaagggcgtttgctgtgtcaactagtccctggcaccttttttcccccaagcccccgataaagcgagggctggcatggagaatggccacgtgaaggtaaacggcgacgcttcgcccgcggccgccgagtcgggcgccaaggaggagctgcaggccaacggcagcgccccggccgccgacaaggaggagcccgcggccgccgggagcggggcggcgtcgccctccgcggccgagaaaggtgagccggccgccgccgctgcccccgaggccggggccagcccggtagagaaggaggcccccgcggaaggcgaggctgccgagcccggctcgcccacggccgcggagggagaggccgcgtcggccgcctcctcgacttcttcgcccaaggccgaggacggggccacgccctcgcccagcaacgagaccccgaaaaaaaaaaagaagcgcttttccttcaagaagtctttcaagctgagcggcttctccttcaagaagaacaagaaggaggctggagaaggcggtgaggctgaggcgcccgctgccgaaggcggcaaggacgaggccgccgggggcgcagctgcggccgccgccgaggcgggcgcggcctccggggagcaggcagcggcgccgggcgaggaggcggcagcgggcgaggagggggcggcgggtggcgacccgcaggaggccaagccccaggaggccgctgtcgcgccagagaagccgcccgccagcgacgagaccaaggccgccgaggagcccagcaaggtggaggagaaaaaggccgaggaggccggggccagcgccgccgcctgcgaggccccctccgccgccgggcccggcgcgcccccggagcaggaggcagcccccgcggaggagcccgcggccgccgcagcctcgtcagcctgcgcagccccctcacaggaggcccagcccgagtgcagtccagaagcccccccagcggaggcggcagagtaaaagagcaagcttttgtgagataatcgaagaacttttctcccccgtttgtttgttggagtggtgccaggtactggttttggagaacttgtctacaaccagggattgattttaaagatgtctttttttattttacttttttttaagcaccaaattttgttgttttttttttctcccctccccacagatcccatctcaaatcattctgttaaccaccattccaacaggtcgaggagagcttaaacaccttcttcctctgccttgtttctcttttattttttattttttcgcatcagtattaatgtttttgcatactttgcatctttattcaaaagtgtaaactttctttgtcaatctatggacatgcccatatatgaaggagatgggtgggtcaaaaagggatatcaaatgaagtgataggggtcacaatggggaaattgaagtggtgcataacattgccaaaatagtgtgccactagaaatggtgtaaaggctgtctttttttttttttttaaagaaaagttattaccatgtattttgtgaggcaggtttacaacactacaagtcttgagttaagaaggaaagaggaaaaaagaaaaaacaccaatacccagatttaaaaaaaaaaaaacgatcatagtcttaggagttcatttaaaccataggaacttttcacttatctcatgttagctgtaccagtcagtgattaagtagaactacaagttgtataggctttattgtttattgctggtttatgaccttaataaagtgtaattatgtattaccagcagggtgtttttaactgtgactattgtataaaaacaaatcttgatatccagaagcacatgaagtttgcaactttccaccctgcccatttttgtaaaactgcagtcatcttggaccttttaaaacacaaattttaaactcaaccaagctgtgataagtggaatggttactgtttatactgtggtatgtttttgattacagcagataatgctttcttttccagtcgtctttgagaataaaggaaaaaaaatcttcagatgcaatggttttgtgtagcatcttgtctatcatgttttgtaaatactggagaagctttgaccaatttgacttagagatggaatgtaactttgcttacaaaaattgctattaaactcctgcttaaggtgttctaattttctgtgagcacactaaaagcgaaaaataaatgtgaataaaa

SEQ ID NO: 315197 - DNA, 2708 bp, Homo sapiens
  misc_feature (2632)..(2632): n is a, c, g, or t
ttgggcgttggaccccgcatcttattagcaaccagggagatttctccattttcctcttgtctacagtgcggctacaaatctgggatttttttattacttctttttttttcgaactacacttgggctcctttttttgtgctcgacttttccaccctttttccctccctcctgtgctgctgctttttgatctcttcgactaaaatttttttatccggagtgtatttaatcggttctgttctgtcctctccaccacccccacccccctccctccggtgtgtgtgccgctgccgctgttgccgccgccgctgctgctgctgctcgccccgtcgttacaccaacccgaggctctttgtttcccctcttggatctgttgagtttctttgttgaagaagccagcatgggtgcccagttctccaagaccgcagcgaagggagaagccgccgcggagaggcctggggaggcggctgtggcctcgtcgccttccaaagcgaacggacaggagaatggccacgtgaaggtaaacggcgacgcttcgcccgcggccgccgagtcgggcgccaaggaggagctgcaggccaacggcagcgccccggccgccgacaaggaggagcccgcggccgccgggagcggggcggcgtcgccctccgcggccgagaaaggtgagccggccgccgccgctgcccccgaggccggggccagcccggtagagaaggaggcccccgcggaaggcgaggctgccgagcccggctcgcccacggccgcggagggagaggccgcgtcggccgcctcctcgacttcttcgcccaaggccgaggacggggccacgccctcgcccagcaacgagaccccgaaaaaaaaaaagaagcgcttttccttcaagaagtctttcaagctgagcggcttctccttcaagaagaacaagaaggaggctggagaaggcggtgaggctgaggcgcccgctgccgaaggcggcaaggacgaggccgccgggggcgcagctgcggccgccgccgaggcgggcgcggcctccggggagcaggcagcggcgccgggcgaggaggcggcagcgggcgaggagggggcggcgggtggcgacccgcaggaggccaagccccaggaggccgctgtcgcgccagagaagccgcccgccagcgacgagaccaaggccgccgaggagcccagcaaggtggaggagaaaaaggccgaggaggccggggccagcgccgccgcctgcgaggccccctccgccgccgggcccggcgcgcccccggagcaggaggcagcccccgcggaggagcccgcggccgccgcagcctcgtcagcctgcgcagccccctcacaggaggcccagcccgagtgcagtccagaagcccccccagcggaggcggcagagtaaaagagcaagcttttgtgagataatcgaagaacttttctcccccgtttgtttgttggagtggtgccaggtactggttttggagaacttgtctacaaccagggattgattttaaagatgtctttttttattttacttttttttaagcaccaaattttgttgttttttttttctcccctccccacagatcccatctcaaatcattctgttaaccaccattccaacaggtcgaggagagcttaaacaccttcttcctctgccttgtttctcttttattttttattttttcgcatcagtattaatgtttttgcatactttgcatctttattcaaaagtgtaaactttctttgtcaatctatggacatgcccatatatgaaggagatgggtgggtcaaaaagggatatcaaatgaagtgataggggtcacaatggggaaattgaagtggtgcataacattgccaaaatagtgtgccactagaaatggtgtaaaggctgtctttttttttttttttaaagaaaagttattaccatgtattttgtgaggcaggtttacaacactacaagtcttgagttaagaaggaaagaggaaaaaagaaaaaacaccaatacccagatttaaaaaaaaaaaaacgatcatagtcttaggagttcatttaaaccataggaacttttcacttatctcatgttagctgtaccagtcagtgattaagtagaactacaagttgtataggctttattgtttattgctggtttatgaccttaataaagtgtaattatgtattaccagcagggtgtttttaactgtgactattgtataaaaacaaatcttgatatccagaagcacatgaagtttgcaactttccaccctgcccatttttgtaaaactgcagtcatcttggaccttttaaaacacaaattttaaactcaaccaagctgtgataagtggaatggttactgtttatactgtggtatgtttttgattacagcagataatgctttcttttccagtcgtctttgagaataaaggaaaaaaaatcttcagatgcaatggttttgtgtagcatcttgtctatcatgttttgtaaatactggagaagctttgaccaatttgacttagagatggaatgtaactttgcttacaaaaattgctattaaacatctcctcgataacagaggaaagtatggggaaggagccagcaggagacgttcacctttgccttaactttggtcttcattcantgtgtgatcatgcctgtgtttgccagatctgtggatcgtacccggagctggctctatgctgcctagttctatctca

SEQ ID NO: 315198 - DNA, 1852 bp, Homo sapiens
cggcacgaggcgaagaacttttctcccccgtttgtttgttggagtggtgccaggtactggttttggagaacttgtctacaaccagggattgattttaaagaagcgcttttccttcaagaagtctttcaagctgagcggcttctccttcaagaagaacaagaaggaggctggagaaggcggtgaggctgaggcgcccgctgccgaaggcggcaaggacgaggccgccgggggcgcagctgcggccgccgccgaggcgggcgcggcctccggggagcaggcagcggcgccgggcgaggaggcggcagcgggcgaggagggggcggcgggtggcgacccgcaggaggccaagccccaggaggccgctgtcgcgccagagaagccgcccgccagcgacgagaccaaggccgccgaggagcccagcaaggtggaggagaaaaaggccgaggaggccggggccagcgccgccgcctgcgaggccccctccgccgccgggcccggcgcgcccccggagcaggaggcagcccccgcggaggagcccgcggccgccgcagcctcgtcagcctgcgcagccccctcacaggaggcccagcccgagtgcagtccagaagcccccccagcggaggcggcagagtaaaagagcaagcttttgtgagataatcgaagaacttttctcccccgtttgtttgttggagtggtgccaggtactggttttggagaacttgtctacaaccagggattgattttaaagatgtctttttttattttacttttttttaagcaccaaattttgttgttttttttttctcccctccccacagatcccatctcaaatcattctgttaaccaccattccaacaggtcgaggagagcttaaacaccttcttcctctgccttgtttctcttttattttttattttttcgcatcagtattaatgtttttgcatactttgcatctttattcaaaagtgtaaactttctttgtcaatctatggacatgcccatatatgaaggagatgggtgggtcaaaaagggatatcaaatgaagtgataggggtcacaatggggaaattgaagtggtgcataacattgccaaaatagtgtgccactagaaatggtgtaaaggctgtctttttttttttttttaaagaaaagttattaccatgtattttgtgaggcaggtttacaacactacaagtcttgagttaagaaggaaagaggaaaaaagaaaaaacaccaatacccagatttaaaaaaaaaaaaacgatcatagtcttaggagttcatttaaaccataggaacttttcacttatctcatgttagctgtaccagtcagtgattaagtagaactacaagttgtataggctttattgtttattgctggtttatgaccttaataaagtgtaattatgtattaccagcagggtgtttttaactgtgactattgtataaaaacaaatcttgatatccagaagcacatgaagtttgcaactttccaccctgcccatttttgtaaaactgcagtcatcttggaccttttaaaacacaaattttaaactcaaccaagctgtgataagtggaatggttactgtttatactgtggtatgtttttgattacagcagataatgctttcttttccagtcgtctttgagaataaaggaaaaaaaatcttcagatgcaatggttttgtgtagcatcttgtctatcatgttttgtaaatactggagaagctttgaccaatttgacttagagatggaatgtaactttgcttacaaaaattgctattaaactcctgcttaaggtgttctaattttctgtgagcacactaaaagcgaaaaataaatgtgaataaaa

SEQ ID NO: 315199 - DNA, 2574 bp, Homo sapiens
ttgggcgttggaccccgcatcttattagcaaccagggagatttctccattttcctcttgtctacagtgcggctacaaatctgggatttttttattacttctttttttttcgaactacacttgggctcctttttttgtgctcgacttttccaccctttttccctccctcctgtgctgctgctttttgatctcttcgactaaaatttttttatccggagtgtatttaatcggttctgttctgtcctctccaccacccccacccccctccctccggtgtgtgtgccgctgccgctgttgccgccgccgctgctgctgctgctcgccccgtcgttacaccaacccgaggctctttgtttcccctcttggatctgttgagtttctttgttgaagaagccagcatgggtgcccagttctccaagaccgcagcgaagggagaagccgccgcggagaggcctggggaggcggctgtggcctcgtcgccttccaaagcgaacggacaggagaatggccacgtgaaggtaaacggcgacgcttcgcccgcggccgccgagtcgggcgccaaggaggagctgcaggccaacggcagcgccccggccgccgacaaggaggagcccgcggccgccgggagcggggcggcgtcgccctccgcggccgagaaaggtgagccggccgccgccgctgcccccgaggccggggccagcccggtagagaaggaggcccccgcggaaggcgaggctgccgagcccggctcgcccacggccgcggagggagaggccgcgtcggccgcctcctcgacttcttcgcccaaggccgaggacggggccacgccctcgcccagcaacgagaccccgaaaaaaaaaaagaagcgcttttccttcaagaagtctttcaagctgagcggcttctccttcaagaagaacaagaaggaggctggagaaggcggtgaggctgaggcgcccgctgccgaaggcggcaaggacgaggccgccgggggcgcagctgcggccgccgccgaggcgggcgcggcctccggggagcaggcagcggcgccgggcgaggaggcggcagcgggcgaggagggggcggcgggtggcgacccgcaggaggccaagccccaggaggccgctgtcgcgccagagaagccgcccgccagcgacgagaccaaggccgccgaggagcccagcaaggtggaggagaaaaaggccgaggaggccggggccagcgccgccgcctgcgaggccccctccgccgccgggcccggcgcgcccccggagcaggaggcagcccccgcggaggagcccgcggccgccgcagcctcgtcagcctgcgcagccccctcacaggaggcccagcccgagtgcagtccagaagcccccccagcggaggcggcagagtaaaagagcaagcttttgtgagataatcgaagaacttttctcccccgtttgtttgttggagtggtgccagtttaaagatgtctttttttattttacttttttttaagcaccaaattttgttgttttttttttctcccctccccacagatcccatctcaaatcattctgttaaccaccattccaacaggtcgaggagagcttaaacaccttcttcctctgccttgtttctcttttattttttattttttcgcatcagtattaatgtttttgcatactttgcatctttattcaaaagtgtaaactttctttgtcaatctatggacatgcccatatatgaaggagatgggtgggtcaaaaagggatatcaaatgaagtgataggggtcacaatggggaaattgaagtggtgcataacattgccaaaatagtgtgccactagaaatggtgtaaaggctgtctttttttttttttttaaagaaaagttattaccatgtattttgtgaggcaggtttacaacactacaagtcttgagttaagaaggaaagaggaaaaaagaaaaaacaccaatacccagatttaaaaaaaaaaaaacgatcatagtcttaggagttcatttaaaccataggaacttttcacttatctcatgttagctgtaccagtcagtgattaagtagaactacaagttgtataggctttattgtttattgctggtttatgaccttaataaagtgtaattatgtattaccagcagggtgtttttaactgtgactattgtataaaaacaaatcttgatatccagaagcacatgaagtttgcaactttccaccctgcccatttttgtaaaactgcagtcatcttggaccttttaaaacacaaattttaaactcaaccaagctgtgataagtggaatggttactgtttatactgtggtatgtttttgattacagcagataatgctttcttttccagtcgtctttgagaataaaggaaaaaaaatcttcagatgcaatggttttgtgtagcatcttgtctatcatgttttgtaaatactggagaagctttgaccaatttgacttagagatggaatgtaactttgcttacaaaaattgctattaaactcctgcttaaggtgttctaattttctgtgagcacactaaaagcgaaaaataaatgtgaataaaa

SEQ ID NO: 315200 - DNA, 1600 bp, Homo sapiens
ttgggcgttggaccccgcatcttattagcaaccagggagatttctccattttcctcttgtctacagtgcggctacaaatctgggatttttttattacttctttttttttcgaactacacttgggctcctttttttgtgctcgacttttccaccctttttccctccctcctgtgctgctgctttttgatctcttcgactaaaatttttttatccggagtgtatttaatcggttctgttctgtcctctccaccacccccacccccctccctccggtgtgtgtgccgctgccgctgttgccgcctcgtcagcctgcgcagccccctcacaggaggcccagcccgagtgcagtccagaagcccccccagcggaggcggcagagtaaaagagcaagcttttgtgagataatcgaagaacttttctcccccgtttgtttgttggagtggtgccaggtactggttttggagaacttgtctacaaccagggattgattttaaagatgtctttttttattttacttttttttaagcaccaaattttgttgttttttttttctcccctccccacagatcccatctcaaatcattctgttaaccaccattccaacaggtcgaggagagcttaaacaccttcttcctctgccttgtttctcttttattttttattttttcgcatcagtattaatgtttttgcatactttgcatctttattcaaaagtgtaaactttctttgtcaatctatggacatgcccatatatgaaggagatgggtgggtcaaaaagggatatcaaatgaagtgataggggtcacaatggggaaattgaagtggtgcataacattgccaaaatagtgtgccactagaaatggtgtaaaggctgtctttttttttttttttaaagaaaagttattaccatgtattttgtgaggcaggtttacaacactacaagtcttgagttaagaaggaaagaggaaaaaagaaaaaacaccaatacccagatttaaaaaaaaaaaaacgatcatagtcttaggagttcatttaaaccataggaacttttcacttatctcatgttagctgtaccagtcagtgattaagtagaactacaagttgtataggctttattgtttattgctggtttatgaccttaataaagtgtaattatgtattaccagcagggtgtttttaactgtgactattgtataaaaacaaatcttgatatccagaagcacatgaagtttgcaactttccaccctgcccatttttgtaaaactgcagtcatcttggaccttttaaaacacaaattttaaactcaaccaagctgtgataagtggaatggttactgtttatactgtggtatgtttttgattacagcagataatgctttcttttccagtcgtctttgagaataaaggaaaaaaaatcttcagatgcaatggttttgtgtagcatcttgtctatcatgttttgtaaatactggagaagctttgaccaatttgacttagagatggaatgtaactttgcttacaaaaattgctattaaactcctgcttaaggtgttctaattttctgtgagcacactaaaagcgaaaaataaatgtgaataaaa

SEQ ID NO: 315201 - DNA, 600 bp, Homo sapiens
  misc_feature (33)..(33): n is a, c, g, or t
  misc_feature (37)..(37): n is a, c, g, or t
ggactctagagagatcccgttcatgtttctacncaanccataggaacttttcacttatctcatgttagctgtaccagtcagtgattaagtagaactacaagttgtataggctttattgtttattgctggtttatgaccttaataaagtgtaattatgtattaccagcagggtgtttttaactgtgactattgtataaaaacaaatcttgatatccagaagcacatgaagtttgcaactttccaccctgcccatttttgtaaaactgcagtcatcttggaccttttaaaacacaaattttaaactcaaccaagctgtgataagtggaatggttactgtttatactgtggtatgtttttgattacagcagataatgctttcttttccagtcgtctttgagaataaaggaaaaaaaatcttcagatgcaatggttttgtgtagcatcttgtctatcatgttttgtaaatactggagaagctttgaccaatttgacttagagatggaatgtaactttgcttacaaaaattgctattaaactcctgcttaaggtgttctaattttctgtgagcacactaaaagcgaaaaataaatgtgaataaaa

SEQ ID NO: 315202 - DNA, 2329 bp, Homo sapiens
aaaagaacaggataacagcaattgttcagggaataagagagataaccttaaactctgaccaacagtgagcctggtggaacagagtcatatttctcttctttcaaaagcaaatgggagaaatatcgctgaattctttttctcagcaaggaacatccctgagaaagagaatgcacccctgagggtgggtctataaatggcctccttgggtgtggccatcttctatggtcgagactgtagggatgaaataaaccccagtctcccatagcgctcccaggcttattaggaagaggaaattcccgcctaataaattttggtcagaccggttgcttttaaaacacaaattttaaactcaaccaagctgtgataagtggaatggttactgtttatactgtggtatgtttttgattacagcagataatgctttcttttccagtcgtctttgagaataaaggaaaaaaaatcttcagatgcaatggttttgtgtagcatcttgtctatcatgttttgtaaatactggagaagctttgaccaatttgacttagagatggaatgtaactttgcttacaaaaattgctattaaactcctgcttaaggtgttctaattttctgtgagcacactaaaagcgaaaaataaatgtgaataaaatgtaaaaatttgttgtgtttttttatgttctaataatactgagacttctaggtcttaggttaatttttaggaagatcttgcatgccatcaggagtaaattttattgtggttcttaatctgaagttttcaagctctgaaattcataatccgcagtgtcagattacgtagaggaagatcttacaacattccatgtcaaatctgttaccatttattggcatttagttttcatttaagaattgaacataattatttttattgtagctatatagcatgtcagattaaatcatttacaacaaaaggggtgtgaacctaagactatttaaatgtcttatgagaaaatttcataaagccattctcttgtcattcaggtccagaaacaaattttaaactgagtgagagtctatagaatccatactgcagatgggtcatgaaatgtgaccaaatgtgtttcaaaaattgatggtgtattacctgctattgtaattgcttagtgcttggctaatttccaaattattgcataatatgttctaccttaagaaaacaggtttatgtaacaaagtaatggtgttgaatggatgatgtcagttcatgggcctttagcatagttttaagcatcctttttttttttttttttttgaaagtgtgttagcatcttgttactcaaaggataagacagacaataatacttcactgaatattaataatctttactagtttacctcctctgctctttgccacccgataactggatatcttttccttcaaaggaccctaaactgattgaaatttaagatatgtatcaaaaacattatttcatttaatgcacatctgttttgctgtttttgagcagtgtgcagtttagggttcatgataaatcattgaaccacatgtgtaacaactgaatgccaaatcttaaactcattagaaaaataacaaattaggttttgacacgcattcttaattggaataatggatcaaaaatagtggttcatgaccttaccaaacacccttgctactaataaaatcaaataacacttagaagggtatgtatttttagttagggtttcttgatcttggaggatgtttgaaagttaaaaattgaatttggtaaccaaaggactgatttatgggtctttcctatcttaaccaacgttttcttagttacctagatggccaagtacagtgcctggtatgtagtaagactcagtaaaaaagtggatttttaaaaataactcccaaagtgaatagtcaaaaatcctgttagcaaactgttatatattgctaagtttgttcttttaacagctggaatttattaagatgcattattttgattttattcactgcctaaaacactttgggtggtattgatggagttggtggattttcctccaagtgattaaatgaaatttgacgtatcttttcatccaaagttttgtacatcatgttttctaacggaaaaaaatgttaatatggcttttttgtattactaaaaatagctttgagattaaggaaaaataaataactcttgtacagttcagtattgtctattaaatctgtattggcagtatgtataatggcatttgctgtggttacaaaatacttcctctgggttataataatcatttgatccaattcctattgcttgtaaaataaagttttaccagttgatataaaaaaacctgc

SEQ ID NO: 315203 - DNA, 1972 bp, Homo sapiens
  misc_feature (41)..(41): n is a, c, g, or t
gagagagagagagagagagagagagagagagagagagaganagagagagagcagcagataatgctttcttttccagtcgtctttgagaataaaggaaaaaaaatcttcagatgcaatggttttgtgtagcatcttgtctatcatgttttgtaaatactggagaagctttgaccaatttgacttagagatggaatgtaactttgcttacaaaaattgctattaaactcctgcttaaggtgttctaattttctgtgagcacactaaaagcgaaaaataaatgtgaataaaatgtaaaaatttgttgtgtttttttatgttctaataatactgagacttctaggtcttaggttaatttttaggaagatcttgcatgccatcaggagtaaattttattgtggttcttaatctgaagttttcaagctctgaaattcataatccgcagtgtcagattacgtagaggaagatcttacaacattccatgtcaaatctgttaccatttattggcatttagttttcatttaagaattgaacataattatttttattgtagctatatagcatgtcagattaaatcatttacaacaaaaggggtgtgaacctaagactatttaaatgtcttatgagaaaatttcataaagccattctcttgtcattcaggtccagaaacaaattttaaactgagtgagagtctatagaatccatactgcagatgggtcatgaaatgtgaccaaatgtgtttcaaaaattgatggtgtattacctgctattgtaattgcttagtgcttggctaatttccaaattattgcataatatgttctaccttaagaaaacaggtttatgtaacaaagtaatggtgttgaatggatgatgtcagttcatgggcctttagcatagttttaagcatcctttttttttttttttttttgaaagtgtgttagcatcttgttactcaaaggataagacagacaataatacttcactgaatattaataatctttactagtttacctcctctgctctttgccacccgataactggatatcttttccttcaaaggaccctaaactgattgaaatttaagatatgtatcaaaaacattatttcatttaatgcacatctgttttgctgtttttgagcagtgtgcagtttagggttcatgataaatcattgaaccacatgtgtaacaactgaatgccaaatcttaaactcattagaaaaataacaaattaggttttgacacgcattcttaattggaataatggatcaaaaatagtggttcatgaccttaccaaacacccttgctactaataaaatcaaataacacttagaagggtatgtatttttagttagggtttcttgatcttggaggatgtttgaaagttaaaaattgaatttggtaaccaaaggactgatttatgggtctttcctatcttaaccaacgttttcttagttacctagatggccaagtacagtgcctggtatgtagtaagactcagtaaaaaagtggatttttaaaaataactcccaaagtgaatagtcaaaaatcctgttagcaaactgttatatattgctaagtttgttcttttaacagctggaatttattaagatgcattattttgattttattcactgcctaaaacactttgggtggtattgatggagttggtggattttcctccaagtgattaaatgaaatttgacgtatcttttcatccaaagttttgtacatcatgttttctaacggaaaaaaatgttaatatggcttttttgtattactaaaaatagctttgagattaaggaaaaataaataactcttgtacagttcagtattgtctattaaatctgtattggcagtatgtataatggcatttgctgtggttacaaaatacttcctctgggttataataatcatttgatccaattcctattgcttgtaaaataaagttttaccagttgatataaaaaaacctgc

SEQ ID NO: 315204 - DNA, 1015 bp, Homo sapiens
ctaaactgattgaaatttaaggtcctttgaaggaaaagatatccagttatcgggtggcaaagagcagaggaggtaaactggatatcttttccttcaaaggaccctaaactgattgaaatttaagatatgtatcaaaaacattatttcatttaatgcacatctgttttgctgtttttgagcagtgtgcagtttagggttcatgataaatcattgaaccacatgtgtaacaactgaatgccaaatcttaaactcattagaaaaataacaaattaggttttgacacgcattcttaattggaataatggatcaaaaatagtggttcatgaccttaccaaacacccttgctactaataaaatcaaataacacttagaagggtatgtatttttagttagggtttcttgatcttggaggatgtttgaaagttaaaaattgaatttggtaaccaaaggactgatttatgggtctttcctatcttaaccaacgttttcttagttacctagatggccaagtacagtgcctggtatgtagtaagactcagtaaaaaagtggatttttaaaaataactcccaaagtgaatagtcaaaaatcctgttagcaaactgttatatattgctaagtttgttcttttaacagctggaatttattaagatgcattattttgattttattcactgcctaaaacactttgggtggtattgatggagttggtggattttcctccaagtgattaaatgaaatttgacgtatcttttcatccaaagttttgtacatcatgttttctaacggaaaaaaatgttaatatggcttttttgtattactaaaaatagctttgagattaaggaaaaataaataactcttgtacagttcagtattgtctattaaatctgtattggcagtatgtataatggcatttgctgtggttacaaaatacttcctctgggttataataatcatttgatccaattcctattgcttgtaaaataaagttttaccagttgatataaaaaaacctgc

SEQ ID NO: 315205 - DNA, 1927 bp, Homo sapiens
ttgggcgttggaccccgcatcttattagcaaccagggagatttctccattttcctcttgtctacagtgcggctacaaatctgggatttttttattacttctttttttttcgaactacacttgggctcctttttttgtgctcgacttttccaccctttttccctccctcctgtgctgctgctttttgatctcttcgactaaaatttttttatccggagtgtatttaatcggttctgttctgtcctctccaccacccccacccccctccctccggtgtgtgtgccgctgccgctgttgccgccgccgctgctgctgctgctcgccccgtcgttacaccaacccgaggctctttgtttcccctcttggatctgttgagtttctttgttgaagaagccagcatgggtgcccagttctccaagaccgcagcgaagggagaagccgccgcggagaggcctggggaggcggctgtggcctcgtcgccttccaaagcgaacggacaggagaatggccacgtgaaggtaaacggcgacgcttcgcccgcggccgccgagtcgggcgccaaggaggagctgcaggccaacggcagcgccccggccgccgacaaggaggagcccgcggccgccgcagcctcgtcagcctgcgcagccccctcacaggaggcccagcccgagtgcagtccagaagcccccccagcggaggcggcagagtaaaagagcaagcttttgtgagataatcgaagaacttttctcccccgtttgtttgttggagtggtgccaggtactggttttggagaacttgtctacaaccagggattgattttaaagatgtctttttttattttacttttttttaagcaccaaattttgttgttttttttttctcccctccccacagatcccatctcaaatcattctgttaaccaccattccaacaggtcgaggagagcttaaacaccttcttcctctgccttgtttctcttttattttttattttttcgcatcagtattaatgtttttgcatactttgcatctttattcaaaagtgtaaactttctttgtcaatctatggacatgcccatatatgaaggagatgggtgggtcaaaaagggatatcaaatgaagtgataggggtcacaatggggaaattgaagtggtgcataacattgccaaaatagtgtgccactagaaatggtgtaaaggctgtctttttttttttttttaaagaaaagttattaccatgtattttgtgaggcaggtttacaacactacaagtcttgagttaagaaggaaagaggaaaaaagaaaaaacaccaatacccagatttaaaaaaaaaaaaacgatcatagtcttaggagttcatttaaaccataggaacttttcacttatctcatgttagctgtaccagtcagtgattaagtagaactacaagttgtataggctttattgtttattgctggtttatgaccttaataaagtgtaattatgtattaccagcagggtgtttttaactgtgactattgtataaaaacaaatcttgatatccagaagcacatgaagtttgcaactttccaccctgcccatttttgtaaaactgcagtcatcttggaccttttaaaacacaaattttaaactcaaccaagctgtgataagtggaatggttactgtttatactgtggtatgtttttgattacagcagataatgctttcttttccagtcgtctttgagaataaaggaaaaaaaatcttcagatgcaatggttttgtgtagcatcttgtctatcatgttttgtaaatactggagaagctttgaccaatttgacttagagatggaatgtaactttgcttacaaaaattgctattaaactcctgcttaaggtgttctaattttctgtgagcacactaaaagcgaaaaataaatgtgaataaaa

SEQ ID NO: 315206 - DNA, 4147 bp, Homo sapiens
ttgggcgttggaccccgcatcttattagcaaccagggagatttctccattttcctcttgtctacagtgcggctacaaatctgggatttttttattacttctttttttttcgaactacacttgggctcctttttttgtgctcgacttttccaccctttttccctccctcctgtgctgctgctttttgatctcttcgactaaaatttttttatccggagtgtatttaatcggttctgttctgtcctctccaccacccccacccccctccctccggtgtgtgtgccgctgccgctgttgccgccgccgctgctgctgctgctcgccccgtcgttacaccaacccgaggctctttgtttcccctcttggatctgttgagtttctttgttgaagaagccagcatgggtgcccagttctccaagaccgcagcgaagggagaagccgccgcggagaggcctggggaggcggctgtggcctcgtcgccttccaaagcgaacggacaggagaatggccacgtgaaggtaaacggcgacgcttcgcccgcggccgccgagtcgggcgccaaggaggagctgcaggccaacggcagcgccccggccgccgacaaggaggagcccgcggccgccgggagcggggcggcgtcgccctccgcggccgagaaaggtgagccggccgccgccgctgcccccgaggccggggccagcccggtagagaaggaggcccccgcggaaggcgaggctgccgagcccggctcgcccacggccgcggagggagaggccgcgtcggccgcctcctcgacttcttcgcccaaggccgaggacggggccacgccctcgcccagcaacgagaccccgaaaaaaaaaaagaagcgcttttccttcaagaagtctttcaagctgagcggcttctccttcaagaagaacaagaaggaggctggagaaggcggtgaggctgaggcgcccgctgccgaaggcggcaaggacgaggccgccgggggcgcagctgcggccgccgccgaggcgggcgcggcctccggggagcaggcagcggcgccgggcgaggaggcggcagcgggcgaggagggggcggcgggtggcgacccgcaggaggccaagccccaggaggccgctgtcgcgccagagaagccgcccgccagcgacgagaccaaggccgccgaggagcccagcaaggtggaggagaaaaaggccgaggaggccggggccagcgccgccgcctgcgaggccccctccgccgccgggcccggcgcgcccccggagcaggaggcagcccccgcggaggagcccgcggccgccgcagcctcgtcagcctgcgcagccccctcacaggaggcccagcccgagtgcagtccagaagcccccccagcggaggcggcagagtaaaagagcaagcttttgtgagataatcgaagaacttttctcccccgtttgtttgttggagtggtgccaggtactggttttggagaacttgtctacaaccagggattgattttaaagatgtctttttttattttacttttttttaagcaccaaattttgttgttttttttttctcccctccccacagatcccatctcaaatcattctgttaaccaccattccaacaggtcgaggagagcttaaacaccttcttcctctgccttgtttctcttttattttttattttttcgcatcagtattaatgtttttgcatactttgcatctttattcaaaagtgtaaactttctttgtcaatctatggacatgcccatatatgaaggagatgggtgggtcaaaaagggatatcaaatgaagtgataggggtcacaatggggaaattgaagtggtgcataacattgccaaaatagtgtgccactagaaatggtgtaaaggctgtctttttttttttttttaaagaaaagttattaccatgtattttgtgaggcaggtttacaacactacaagtcttgagttaagaaggaaagaggaaaaaagaaaaaacaccaatacccagatttaaaaaaaaaaaaacgatcatagtcttaggagttcatttaaaccataggaacttttcacttatctcatgttagctgtaccagtcagtgattaagtagaactacaagttgtataggctttattgtttattgctggtttatgaccttaataaagtgtaattatgtattaccagcagggtgtttttaactgtgactattgtataaaaacaaatcttgatatccagaagcacatgaagtttgcaactttccaccctgcccatttttgtaaaactgcagtcatcttggaccttttaaaacacaaattttaaactcaaccaagctgtgataagtggaatggttactgtttatactgtggtatgtttttgattacagcagataatgctttcttttccagtcgtctttgagaataaaggaaaaaaaatcttcagatgcaatggttttgtgtagcatcttgtctatcatgttttgtaaatactggagaagctttgaccaatttgacttagagatggaatgtaactttgcttacaaaaattgctattaaactcctgcttaaggtgttctaattttctgtgagcacactaaaagcgaaaaataaatgtgaataaaatgtaaaaatttgttgtgtttttttatgttctaataatactgagacttctaggtcttaggttaatttttaggaagatcttgcatgccatcaggagtaaattttattgtggttcttaatctgaagttttcaagctctgaaattcataatccgcagtgtcagattacgtagaggaagatcttacaacattccatgtcaaatctgttaccatttattggcatttagttttcatttaagaattgaacataattatttttattgtagctatatagcatgtcagattaaatcatttacaacaaaaggggtgtgaacctaagactatttaaatgtcttatgagaaaatttcataaagccattctcttgtcattcaggtccagaaacaaattttaaactgagtgagagtctatagaatccatactgcagatgggtcatgaaatgtgaccaaatgtgtttcaaaaattgatggtgtattacctgctattgtaattgcttagtgcttggctaatttccaaattattgcataatatgttctaccttaagaaaacaggtttatgtaacaaagtaatggtgttgaatggatgatgtcagttcatgggcctttagcatagttttaagcatcctttttttttttttttttttgaaagtgtgttagcatcttgttactcaaaggataagacagacaataatacttcactgaatattaataatctttactagtttacctcctctgctctttgccacccgataactggatatcttttccttcaaaggaccctaaactgattgaaatttaagatatgtatcaaaaacattatttcatttaatgcacatctgttttgctgtttttgagcagtgtgcagtttagggttcatgataaatcattgaaccacatgtgtaacaactgaatgccaaatcttaaactcattagaaaaataacaaattaggttttgacacgcattcttaattggaataatggatcaaaaatagtggttcatgaccttaccaaacacccttgctactaataaaatcaaataacacttagaagggtatgtatttttagttagggtttcttgatcttggaggatgtttgaaagttaaaaattgaatttggtaaccaaaggactgatttatgggtctttcctatcttaaccaacgttttcttagttacctagatggccaagtacagtgcctggtatgtagtaagactcagtaaaaaagtggatttttaaaaataactcccaaagtgaatagtcaaaaatcctgttagcaaactgttatatattgctaagtttgttcttttaacagctggaatttattaagatgcattattttgattttattcactgcctaaaacactttgggtggtattgatggagttggtggattttcctccaagtgattaaatgaaatttgacgtatcttttcatccaaagttttgtacatcatgttttctaacggaaaaaaatgttaatatggcttttttgtattactaaaaatagctttgagattaaggaaaaataaataactcttgtacag

SEQ ID NO: 315207 - DNA, 2756 bp, Homo sapiens
ttgggcgttggaccccgcatcttattagcaaccagggagatttctccattttcctcttgtctacagtgcggctacaaatctgggatttttttattacttctttttttttcgaactacacttgggctcctttttttgtgctcgacttttccaccctttttccctccctcctgtgctgctgctttttgatctcttcgactaaaatttttttatccggagtgtatttaatcggttctgttctgtcctctccaccacccccacccccctccctccggtgtgtgtgccgctgccgctgttgccgccgccgctgctgctgctgctcgccccgtcgttacaccaacccgaggctctttgtttcccctcttggatctgttgagtttctttgttgaagaagccagcatgggtgcccagttctccaagaccgcagcgaagggagaagccgccgcggagaggcctggggaggcggctgtggcctcgtcgccttccaaagcgaacggacaggagaatggccacgtgaaggtaaacggcgacgcttcgcccgcggccgccgagtcgggcgccaaggaggagctgcaggccaacggcagcgccccggccgccgacaaggaggagcccgcggccgccgggagcggggcggcgtcgccctccgcggccgagaaaggtgagccggccgccgccgctgcccccgaggccggggccagcccggtagagaaggaggcccccgcggaaggcgaggctgccgagcccggctcgcccacggccgcggagggagaggccgcgtcggccgcctcctcgacttcttcgcccaaggccgaggacggggccacgccctcgcccagcaacgagaccccgaaaaaaaaaaagaagcgcttttccttcaagaagtctttcaagctgagcggcttctccttcaagaagaacaagaaggaggctggagaaggcggtgaggctgaggcgcccgctgccgaaggcggcaaggacgaggccgccgggggcgcagctgcggccgccgccgaggcgggcgcggcctccggggagcaggcagcggcgccgggcgaggaggcggcagcgggcgaggagggggcggcgggtggcgacccgcaggaggccaagccccaggaggccgctgtcgcgccagagaagccgcccgccagcgacgagaccaaggccgccgaggagcccagcaaggtggaggagaaaaaggccgaggaggccggggccagcgccgccgcctgcgaggccccctccgccgccgggcccggcgcgcccccggagcaggaggcagcccccgcggaggagcccgcggccgccgcagcctcgtcagcctgcgcagccccctcacaggaggcccagcccgagtgcagtccagaagcccccccagcggaggcggcagagtaaaagagcaagcttttgtgagataatcgaagaacttttctcccccgtttgtttgttggagtggtgccaggtactggttttggagaacttgtctacaaccagggattgattttaaagatgtctttttttattttacttttttttaagcaccaaattttgttgttttttttttctcccctccccacagatcccatctcaaatcattctgttaaccaccattccaacaggtcgaggagagcttaaacaccttcttcctctgccttgtttctcttttattttttattttttcgcatcagtattaatgtttttgcatactttgcatctttattcaaaagtgtaaactttctttgtcaatctatggacatgcccatatatgaaggagatgggtgggtcaaaaagggatatcaaatgaagtgataggggtcacaatggggaaattgaagtggtgcataacattgccaaaatagtgtgccactagaaatggtgtaaaggctgtctttttttttttttttaaagaaaagttattaccatgtattttgtgaggcaggtttacaacactacaagtcttgagttaagaaggaaagaggaaaaaagaaaaaacaccaatacccagatttaaaaaaaaaaaaacgatcatagtcttaggagttcatttaaaccataggaacttttcacttatctcatgttagctgtaccagtcagtgattaagtagaactacaagttgtataggctttattgtttattgctggtttatgaccttaataaagtgtaattatgtattaccagcagggtgtttttaactgtgactattgtataaaaacaaatcttgatatccagaagcacatgaagtttgcaactttccaccctgcccatttttgtaaaactgcagtcatcttggaccttttaaaacacaaattttaaactcaaccaagctgtgataagtggaatggttactgtttatactgtggtatgtttttgattacagcagataatgctttcttttccagtcgtctttgagaataaaggaaaaaaaatcttcagatgcaatggttttgtgtagcatcttgtctatcatgttttgtaaatactggagaagctttgaccaatttgacttagagatggaatgtaactttgcttacaaaaattgctattaaactcctgcttaaggtgttctaattttctgtgagcacactaaaagcgaaaaataaatgtgaataaaatgtaaaaaaaaaaaaaaactcgaggggggggcccgtacccaattcgccccattatggagtcgtatttacgcccccctcacttggccggcgtttttacaaacgttcctgaactggggaaaaaaccctgggcgttaccccaaat

SEQ ID NO: 315208 - DNA, 2491 bp, Homo sapiens
tagacagctacctaaagcctgaaagactgacagcaacacagaaaaaaagaaacaggcagaaagagagacaagaaatcaagacaccaggcagcaggacacacacacactcacatacactcacacacatagagaccacccccctccctccggtgtgtgtgccgctgccgctgttgccgccgccgctgctgctgctgctcgccccgtcgttacaccaacccgaggctctttgtttcccctcttggatctgttgagtttctttgttgaagaagccagcatgggtgcccagttctccaagaccgcagcgaagggagaagccgccgcggagaggcctggggaggcggctgtggcctcgtcgccttccaaagcgaacggacaggagaatggccacgtgaaggtaaacggcgacgcttcgcccgcggccgccgagtcgggcgccaaggaggagctgcaggccaacggcagcgccccggccgccgacaaggaggagcccgcggccgccgggagcggggcggcgtcgccctccgcggccgagaaaggtgagccggccgccgccgctgcccccgaggccggggccagcccggtagagaaggaggcccccgcggaaggcgaggctgccgagcccggctcgcccacggccgcggagggagaggccgcgtcggccgcctcctcgacttcttcgcccaaggccgaggacggggccacgccctcgcccagcaacgagaccccgaaaaaaaaaaagaagcgcttttccttcaagaagtctttcaagctgagcggcttctccttcaagaagaacaagaaggaggctggagaaggcggtgaggctgaggcgcccgctgccgaaggcggcaaggacgaggccgccgggggcgcagctgcggccgccgccgaggcgggcgcggcctccggggagcaggcagcggcgccgggcgaggaggcggcagcgggcgaggagggggcggcgggtggcgacccgcaggaggccaagccccaggaggccgctgtcgcgccagagaagccgcccgccagcgacgagaccaaggccgccgaggagcccagcaaggtggaggagaaaaaggccgaggaggccggggccagcgccgccgcctgcgaggccccctccgccgccgggcccggcgcgcccccggagcaggaggcagcccccgcggaggagcccgcggccgccgcagcctcgtcagcctgcgcagccccctcacaggaggcccagcccgagtgcagtccagaagcccccccagcggaggcggcagagtaaaagagcaagcttttgtgagataatcgaagaacttttctcccccgtttgtttgttggagtggtgccaggtactggttttggagaacttgtctacaaccagggattgattttaaagatgtctttttttattttacttttttttaagcaccaaattttgttgttttttttttctcccctccccacagatcccatctcaaatcattctgttaaccaccattccaacaggtcgaggagagcttaaacaccttcttcctctgccttgtttctcttttattttttattttttcgcatcagtattaatgtttttgcatactttgcatctttattcaaaagtgtaaactttctttgtcaatctatggacatgcccatatatgaaggagatgggtgggtcaaaaagggatatcaaatgaagtgataggggtcacaatggggaaattgaagtggtgcataacattgccaaaatagtgtgccactagaaatggtgtaaaggctgtctttttttttttttttaaagaaaagttattaccatgtattttgtgaggcaggtttacaacactacaagtcttgagttaagaaggaaagaggaaaaaagaaaaaacaccaatacccagatttaaaaaaaaaaaaacgatcatagtcttaggagttcatttaaaccataggaacttttcacttatctcatgttagctgtaccagtcagtgattaagtagaactacaagttgtataggctttattgtttattgctggtttatgaccttaataaagtgtaattatgtattaccagcagggtgtttttaactgtgactattgtataaaaacaaatcttgatatccagaagcacatgaagtttgcaactttccaccctgcccatttttgtaaaactgcagtcatcttggaccttttaaaacacaaattttaaactcaaccaagctgtgataagtggaatggttactgtttatactgtggtatgtttttgattacagcagataatgctttcttttccagtcgtctttgagaataaaggaaaaaaaatcttcagatgcaatggttttgtgtagcatcttgtctatcatgttttgtaaatactggagaagctttgaccaatttgacttagagatggaatgtaactttgcttacaaaaattgctattaaactcctgcttaaggtgttctaattttctgtgagcacactaaaagcgaaaaataaatgtgaataaaa

SEQ ID NO: 315209 - DNA, 3125 bp, Homo sapiens
  misc_feature (2685)..(2685): n is a, c, g, or t
  misc_feature (2689)..(2689): n is a, c, g, or t
  misc_feature (2692)..(2692): n is a, c, g, or t
  misc_feature (2699)..(2699): n is a, c, g, or t
ttgggcgttggaccccgcatcttattagcaaccagggagatttctccattttcctcttgtctacagtgcggctacaaatctgggatttttttattacttctttttttttcgaactacacttgggctcctttttttgtgctcgacttttccaccctttttccctccctcctgtgctgctgctttttgatctcttcgactaaaatttttttatccggagtgtatttaatcggttctgttctgtcctctccaccacccccacccccctccctccggtgtgtgtgccgctgccgctgttgccgccgccgctgctgctgctgctcgccccgtcgttacaccaacccgaggctctttgtttcccctcttggatctgttgagtttctttgttgaagaagccagcatgggtgcccagttctccaagaccgcagcgaagggagaagccgccgcggagaggcctggggaggcggctgtggcctcgtcgccttccaaagcgaacggacaggagaatggccacgtgaaggtaaacggcgacgcttcgcccgcggccgccgagtcgggcgccaaggaggagctgcaggccaacggcagcgccccggccgccgacaaggaggagcccgcggccgccgggagcggggcggcgtcgccctccgcggccgagaaaggtgagccggccgccgccgctgcccccgaggccggggccagcccggtagagaaggaggcccccgcggaaggcgaggctgccgagcccggctcgcccacggccgcggagggagaggccgcgtcggccgcctcctcgacttcttcgcccaaggccgaggacggggccacgccctcgcccagcaacgagaccccgaaaaaaaaaaagaagcgcttttccttcaagaagtctttcaagctgagcggcttctccttcaagaagaacaagaaggaggctggagaaggcggtgaggctgaggcgcccgctgccgaaggcggcaaggacgaggccgccgggggcgcagctgcggccgccgccgaggcgggcgcggcctccggggagcaggcagcggcgccgggcgaggaggcggcagcgggcgaggagggggcggcgggtggcgacccgcaggaggccaagccccaggaggccgctgtcgcgccagagaagccgcccgccagcgacgagaccaaggccgccgaggagcccagcaaggtggaggagaaaaaggccgaggaggccggggccagcgccgccgcctgcgaggccccctccgccgccgggcccggcgcgcccccggagcaggaggcagcccccgcggaggagcccgcggccgccgcagcctcgtcagcctgcgcagccccctcacaggaggcccagcccgagtgcagtccagaagcccccccagcggaggcggcagagtaaaagagcaagcttttgtgagataatcgaagaacttttctcccccgtttgtttgttggagtggtgccaggtactggttttggagaacttgtctacaaccagggattgattttaaagatgtctttttttattttacttttttttaagcaccaaattttgttgttttttttttctcccctccccacagatcccatctcaaatcattctgttaaccaccattccaacaggtcgaggagagcttaaacaccttcttcctctgccttgtttctcttttattttttattttttcgcatcagtattaatgtttttgcatactttgcatctttattcaaaagtgtaaactttctttgtcaatctatggacatgcccatatatgaaggagatgggtgggtcaaaaagggatatcaaatgaagtgataggggtcacaatggggaaattgaagtggtgcataacattgccaaaatagtgtgccactagaaatggtgtaaaggctgtctttttttttttttttaaagaaaagttattaccatgtattttgtgaggcaggtttacaacactacaagtcttgagttaagaaggaaagaggaaaaaagaaaaaacaccaatacccagatttaaaaaaaaaaaaacgatcatagtcttaggagttcatttaaaccataggaacttttcacttatctcatgttagctgtaccagtcagtgattaagtagaactacaagttgtataggctttattgtttattgctggtttatgaccttaataaagtgtaattatgtattaccagcagggtgtttttaactgtgactattgtataaaaacaaatcttgatatccagaagcacatgaagtttgcaactttccaccctgcccatttttgtaaaactgcagtcatcttggaccttttaaaacacaaattttaaactcaaccaagctgtgataagtggaatggttactgtttatactgtggtatgtttttgattacagcagataatgctttcttttccagtcgtctttgagaataaaggaaaaaaaatcttcagatgcaatggttttgtgtagcatcttgtctatcatgttttgtaaatactggagaagctttgaccaatttgacttagagatggaatgtaactttgcttacaaaaattgctattaaactcctgcttaaggtgttctaattttctgtgagcacactaaaagcgaaaaataaatgtgaataaaatgtaagctccaaaaacaaacaaaacacaacaaaaaaaaaaaaaacaaagaaagaaaaacacacaacaaacnaaancancaaacanaaggggggggcgcgcgccgcaaataaattcctcccggagggggcgccccaaatagggcgacccccacagcttttttgtaaaacagggggcgcgccccataagggggacgcgtctatataaacagcgggcggcggggggcgcgcggagtgtaaaaaaacagcgcctcgggagcgggggcaaaaaacgatgggctatgaggcgggaacctactgtgagagagaggaacaccccccaaacttcgcggggggggagcacaacatattgggggccacactcaccccacgacaggaagaattaagagccctctggggggaaacaatcaaaacacctcggagcaggtcatttcacagcggggggtccaaaacgacaaccgcgcggaataatccgcgccgccgcagagaagaacatcttgtgccacaccgagat

SEQ ID NO: 315210 - DNA, 2527 bp, Homo sapiens
ccagctctggctctgtgccttcttccaaagggcgtttgctgtgtcaactagtccctggcaccttttttcccccaagcccccgataaagcgagggctggcatggttagcctttgcttgctacgtttcggacttcgtctttagggcacttgctgaatggctgggaggccattgccgtacttgggggctacagttgtgttttgggggggtctccaggcagcggtgcccatttcctcgttcgtggggctctcttctgggcatccacccgcgcctccctccccacaacggcgggggtggggtctcgatggccacaggggccttagggggaagcggggcactcccggtccagggctgggggcgggaatggcggcgccccggccgcttcagtgacgctcccgctttctctgccccttaggagaatggccacgtgaaggtaaacggcgacgcttcgcccgcggccgccgagtcgggcgccaaggaggagctgcaggccaacggcagcgccccggccgccgacaaggaggagcccgcggccgccgggagcggggcggcgtcgccctccgcggccgagaaaggtgagccggccgccgccgctgcccccgaggccggggccagcccggtagagaaggaggcccccgcggaaggcgaggctgccgagcccggctcgcccacggccgcggagggagaggccgcgtcggccgcctcctcgacttcttcgcccaaggccgaggacggggccacgccctcgcccagcaacgagaccccgaaaaaaaaaaagaagcgcttttccttcaagaagtctttcaagctgagcggcttctccttcaagaagaacaagaaggaggctggagaaggcggtgaggctgaggcgcccgctgccgaaggcggcaaggacgaggccgccgggggcgcagctgcggccgccgccgaggcgggcgcggcctccggggagcaggcagcggcgccgggcgaggaggcggcagcgggcgaggagggggcggcgggtggcgacccgcaggaggccaagccccaggaggccgctgtcgcgccagagaagccgcccgccagcgacgagaccaaggccgccgaggagcccagcaaggtggaggagaaaaaggccgaggaggccggggccagcgccgccgcctgcgaggccccctccgccgccgggcccggcgcgcccccggagcaggaggcagcccccgcggaggagcccgcggccgccgcagcctcgtcagcctgcgcagccccctcacaggaggcccagcccgagtgcagtccagaagcccccccagcggaggcggcagagtaaaagagcaagcttttgtgagataatcgaagaacttttctcccccgtttgtttgttggagtggtgccaggtactggttttggagaacttgtctacaaccagggattgattttaaagatgtctttttttattttacttttttttaagcaccaaattttgttgttttttttttctcccctccccacagatcccatctcaaatcattctgttaaccaccattccaacaggtcgaggagagcttaaacaccttcttcctctgccttgtttctcttttattttttattttttcgcatcagtattaatgtttttgcatactttgcatctttattcaaaagtgtaaactttctttgtcaatctatggacatgcccatatatgaaggagatgggtgggtcaaaaagggatatcaaatgaagtgataggggtcacaatggggaaattgaagtggtgcataacattgccaaaatagtgtgccactagaaatggtgtaaaggctgtctttttttttttttttaaagaaaagttattaccatgtattttgtgaggcaggtttacaacactacaagtcttgagttaagaaggaaagaggaaaaaagaaaaaacaccaatacccagatttaaaaaaaaaaaaacgatcatagtcttaggagttcatttaaaccataggaacttttcacttatctcatgttagctgtaccagtcagtgattaagtagaactacaagttgtataggctttattgtttattgctggtttatgaccttaataaagtgtaattatgtattaccagcagggtgtttttaactgtgactattgtataaaaacaaatcttgatatccagaagcacatgaagtttgcaactttccaccctgcccatttttgtaaaactgcagtcatcttggaccttttaaaacacaaattttaaactcaaccaagctgtgataagtggaatggttactgtttatactgtggtatgtttttgattacagcagataatgctttcttttccagtcgtctttgagaataaaggaaaaaaaatcttcagatgcaatggttttgtgtagcatcttgtctatcatgttttgtaaatactggagaagctttgaccaatttgacttagagatggaatgtaactttgcttacaaaaattgctattaaactcctgcttaaggtgttctaattttctgtgagcacactaaaagcgaaaaataaatgtgaataaaa

SEQ ID NO: 315211 - DNA, 1942 bp, Homo sapiens
ttgggcgttggaccccgcatcttattagcaaccagggagatttctccattttcctcttgtctacagtgcggctacaaatctgggatttttttattacttctttttttttcgaactacacttgggctcctttttttgtgctcgacttttccaccgccctcgcccagcaacgagaccccgaaaaaaaaaaagaagcgcttttccttcaagaagtctttcaagctgagcggcttctccttcaagaagaacaagaaggaggctggagaaggcggtgaggctgaggcgcccgctgccgaaggcggcaaggacgaggccgccgggggcgcagctgcggccgccgccgaggcgggcgcggcctccggggagcaggcagcggcgccgggcgaggaggcggcagcgggcgaggagggggcggcgggtggcgacccgcaggaggccaagccccaggaggccgctgtcgcgccagagaagccgcccgccagcgacgagaccaaggccgccgaggagcccagcaaggtggaggagaaaaaggccgaggaggccggggccagcgccgccgcctgcgaggccccctccgccgccgggcccggcgcgcccccggagcaggaggcagcccccgcggaggagcccgcggccgccgcagcctcgtcagcctgcgcagccccctcacaggaggcccagcccgagtgcagtccagaagcccccccagcggaggcggcagagtaaaagagcaagcttttgtgagataatcgaagaacttttctcccccgtttgtttgttggagtggtgccaggtactggttttggagaacttgtctacaaccagggattgattttaaagatgtctttttttattttacttttttttaagcaccaaattttgttgttttttttttctcccctccccacagatcccatctcaaatcattctgttaaccaccattccaacaggtcgaggagagcttaaacaccttcttcctctgccttgtttctcttttattttttattttttcgcatcagtattaatgtttttgcatactttgcatctttattcaaaagtgtaaactttctttgtcaatctatggacatgcccatatatgaaggagatgggtgggtcaaaaagggatatcaaatgaagtgataggggtcacaatggggaaattgaagtggtgcataacattgccaaaatagtgtgccactagaaatggtgtaaaggctgtctttttttttttttttaaagaaaagttattaccatgtattttgtgaggcaggtttacaacactacaagtcttgagttaagaaggaaagaggaaaaaagaaaaaacaccaatacccagatttaaaaaaaaaaaaacgatcatagtcttaggagttcatttaaaccataggaacttttcacttatctcatgttagctgtaccagtcagtgattaagtagaactacaagttgtataggctttattgtttattgctggtttatgaccttaataaagtgtaattatgtattaccagcagggtgtttttaactgtgactattgtataaaaacaaatcttgatatccagaagcacatgaagtttgcaactttccaccctgcccatttttgtaaaactgcagtcatcttggaccttttaaaacacaaattttaaactcaaccaagctgtgataagtggaatggttactgtttatactgtggtatgtttttgattacagcagataatgctttcttttccagtcgtctttgagaataaaggaaaaaaaatcttcagatgcaatggttttgtgtagcatcttgtctatcatgttttgtaaatactggagaagctttgaccaatttgacttagagatggaatgtaactttgcttacaaaaattgctattaaactcctgcttaaggtgttctaattttctgtgagcacactaaaagcgaaaaataaatgtgaataaaa

SEQ ID NO: 315212 - DNA, 2861 bp, Homo sapiens
ttgggcgttggaccccgcatcttattagcaaccagggagatttctccattttcctcttgtctacagtgcggctacaaatctgggatttttttattacttctttttttttcgaactacacttgggctcctttttttgtgctcgacttttccaccctttttccctccctcctgtgctgctgctttttgatctcttcgactaaaatttttttatccggagtgtatttaatcggttctgttctgtcctctccaccacccccacccccctccctccggtgtgtgtgccgctgccgctgttgccgccgccgctgctgctgctgctcgccccgtcgttacaccaacccgaggctctttgtttcccctcttggatctgttgagtttctttgttgaagaagccagcatgggtgcccagttctccaagaccgcagcgaagggagaagccgccgcggagaggcctggggaggcggctgtggcctcgtcgccttccaaagcgaacggacaggagaatggccacgtgaaggtaaacggcgacgcttcgcccgcggccgccgagtcgggcgccaaggaggagctgcaggccaacggcagcgccccggccgccgacaaggaggagcccgcggccgccgggagcggggcggcgtcgccctccgcggccgagaaaggtgagccggccgccgccgctgcccccgaggccggggccagcccggtagagaaggaggcccccgcggaaggcgaggctgccgagcccggctcgcccacggccgcggagggagaggccgcgtcggccgcctcctcgacttcttcgcccaaggccgaggacggggccacgccctcgcccagcaacgagaccccgaaaaaaaaaaagaagcgcttttccttcaagaagtctttcaagctgagcggcttctccttcaagaagaacaagaaggaggctggagaaggcggtgaggctgaggcgcccgctgccgaaggcggcaaggacgaggccgccgggggcgcagctgcggccgccgccgaggcgggcgcggcctccggggagcaggcagcggcgccgggcgaggaggcggcagcgggcgaggagggggcggcgggtggcgacccgcaggaggccaagccccaggaggccgctgtcgcgccagagaagccgcccgccagcgacgagaccaaggccgccgaggagcccagcaaggtggaggagaaaaaggccgaggaggccggggccagcgccgccgcctgcgaggccccctccgccgccgggcccggcgcgcccccggagcaggaggcagcccccgcggaggagcccgcggccgccgcagcctcgtcagcctgcgcagccccctcacaggaggcccagcccgagtgcagtccagaagcccccccagcggaggcggcagagtaaaagagcaagcttttgtgagataatcgaagaacttttctcccccgtttgtttgttggagtggtgccaggtactggttttggagaacttgtctacaaccagggattgattttaaagatgtctttttttattttacttttttttaagcaccaaattttgttgttttttttttctcccctccccacagatcccatctcaaatcattctgttaaccaccattccaacaggtcgaggagagcttaaacaccttcttcctctgccttgtttctcttttattttttattttttcgcatcagtattaatgtttttgcatactttgcatctttattcaaaagtgtaaactttctttgtcaatctatggacatgcccatatatgaaggagatgggtgggtcaaaaagggatatcaaatgaagtgataggggtcacaatggggaaattgaagtggtgcataacattgccaaaatagtgtgccactagaaatggtgtaaaggctgtctttttttttttttttaaagaaaagttattaccatgtattttgtgaggcaggtttacaacactacaagtcttgagttaagaaggaaagaggaaaaaagaaaaaacaccaatacccagatttaaaaaaaaaaaaacgatcatagtcttaggagttcatttaaaccataggaacttttcacttatctcatgttagctgtaccagtcagtgattaagtagaactacaagttgtataggctttattgtttattgctggtttatgaccttaataaagtgtaattatgtattaccagcagggtgtttttaactgtgactattgtataaaaacaaatcttgatatccagaagcacatgaagtttgcaactttccaccctgcccatttttgtaaaactgcagtcatcttggaccttttaaaacacaaattttaaactcaaccaagctgtgataagtggaatggttactgtttatactgtggtatgtttttgattacagcagataatgctttcttttccagtcgtctttgagaataaaggaaaaaaaatcttcagatgcaatggttttgtgtagcatcttgtctatcatgttttgtaaatactggagaagctttgaccaatttgacttagagatggaatgtaactttgcttacaaaaattgctattaaacctaattttctgtgagcacactaaaagcgaaaaatacatgtgactaccatgtccacaaaaaccaccaacaacaacacccaacgcaccgcaacacaccgcaccccccacaccccaacaacacagacgcacgccaccaaaaccacccagggcggcagccccgcgccacacaccatcccacacccccccccacaccggaacccccccacaccccccaacacgcctacacacccacagcgcaaaccgccccccacccgcgcacacccccccgggggaccctcccgccacacccgcccccgccccccgcaaacaaga

SEQ ID NO: 315213 - DNA, 2266 bp, Homo sapiens
ttgggcgttggaccccgcatcttattagcaaccagggagatttctccattttcctcttgtctacagtgcggctacaaatctgggatttttttattacttctttttttttcgaactacacttgggctcctttttttgtgctcgacttttccaccctttttccctccctcctgtgctgctgctttttgatctcttcgactaaaatttttttatccggagtgtatttaatcggttctgttctgtcctctccaccacccccacccccctccctccggtgtgtgtgccgctgccgctgttgccgccgccgctgctgctgctgctcgccccgtcgttacaccaacccgaggctctttgtttcccctcttggatctgttgagtttctttgttgaagaagccagcatgggtgcccagttctccaagaccgcagcgaagggagaagccgccgcggagaggcctggggaggcggctgtggcctcgtcgccttccaaagcgaacggacaggagaatggccacgtgaaggtaaacggcgacgcttcgcccgcggccgccgagtcgggcgccaaggaggagctgcaggccaacggcagcgccccggccgccgacaaggaggagcccgcggccgccgggagcggggcggcgtcgccctccgcggccgagaaaggtgagccggccgccgccgctgcccccgaggccggggccagcccggtagagaaggaggcccccgcggaaggcgaggctgccgagcccggctcgcccacggccgcggagggagaggccgcgtcggccgcctcctcgacttcttcgcccaaggccgaggacggggccacgccctcgcccagcaacgagaccccgaaaaaaaaaaagaagcgcttttccttcaagaagtctttcaagctgagcggcttctccttcaagaagaacaagaaggaggctggagaaggcggtgaggctgaggcgcccgctgccgaaggcggcaaggacgaggccgccgggggcgcagctgcggccgccgccgaggcgggcgcggcctccggggagcaggcagcggcgccgggcgaggaggcggcagcgggcgaggagggggcggcgggtggcgacccgcaggaggccaagccccaggaggccgctgtcgcgccagagaagccgcccgccagcgacgagaccaaggccgccgaggagcccagcaaggtggaggagaaaaaggccgaggaggccggggccagcgccgccgcctgcgaggccccctccgccgccgggcccggcgcgcccccggagcaggaggcagcccccgcggaggagcccgcggccgccgcagcctcgtcagcctgcgcagccccctcacaggaggcccagcccgagtgcagtccagaagcccccccagcggaggcggcagagtaaaagagcaagcttttgtgagataatcgaagaacttttctcccccgtttgtttgttggagtggtgccaggtactggttttggagaacttgtctacaaccagggattgattttaaagatgtctttttttattttacttttttttaagcaccaaattttgttgttttttttttctcccctccccacagatcccatctcaaatcattctgttaaccaccattccaacaggtcgaggagagcttaaacaccttcttcctctgccttgtttctcttttattttttattttttcgcatcagtattaatgtttttgcatactttgcatctttattcaaaagtgtaaactttctttgtcaatctatggacatgcccatatatgaaggagatgggtgggtcaaaaagggatatcaaatgaagtgataggggtcacaatggggaaattgaagtggtgcataacattgccaaaatagtgtgccactagaaatggtgtaaaggctgtctttttttttttttttaaagaaaagttattaccatgtattttgtgaggcaggtttacaacactacaagtcttgagttaagaaggaaagaggaaaaaagaaaaaacaccaatacccagatttaaaaaaaataagatcctgaaggcatattccttttgggccgcttggcccattcgactttaaactcgagcaagtttttcatgcgggccgaatttgaggctaattggccaatttgccctataaggaggggttttacaattaaatggcccgtgttttaaaacgtcgggaacgggaaaacccttgggttacccaacttaatgccttttgagcaccccctttcccccactggggtaataacaggccctgccctggccctttc

SEQ ID NO: 315214 - DNA, 1582 bp, Homo sapiens
ttgggcgttggaccccgcatcttattagcaaccagggagatttctccattttcctcttgtctacagtgcggctacaaatctgggatttttttattacttctttttttttcgaactacacttgggctcctttttttgtgctcgacttttccaccctttttccctccctcctgtgctgctgctttttgatctcttcgactaaaatttttttatccggagtgtatttaatcggttctgttctgtcctctccaccacccccacccccctccctccggtgtgtgtgccgctgccgctgttgccgccccctcacaggaggcccagcccgagtgcagtccagaagcccccccagcggaggcggcagagtaaaagagcaagcttttgtgagataatcgaagaacttttctcccccgtttgtttgttggagtggtgccaggtactggttttggagaacttgtctacaaccagggattgattttaaagatgtctttttttattttacttttttttaagcaccaaattttgttgttttttttttctcccctccccacagatcccatctcaaatcattctgttaaccaccattccaacaggtcgaggagagcttaaacaccttcttcctctgccttgtttctcttttattttttattttttcgcatcagtattaatgtttttgcatactttgcatctttattcaaaagtgtaaactttctttgtcaatctatggacatgcccatatatgaaggagatgggtgggtcaaaaagggatatcaaatgaagtgataggggtcacaatggggaaattgaagtggtgcataacattgccaaaatagtgtgccactagaaatggtgtaaaggctgtctttttttttttttttaaagaaaagttattaccatgtattttgtgaggcaggtttacaacactacaagtcttgagttaagaaggaaagaggaaaaaagaaaaaacaccaatacccagatttaaaaaaaaaaaaacgatcatagtcttaggagttcatttaaaccataggaacttttcacttatctcatgttagctgtaccagtcagtgattaagtagaactacaagttgtataggctttattgtttattgctggtttatgaccttaataaagtgtaattatgtattaccagcagggtgtttttaactgtgactattgtataaaaacaaatcttgatatccagaagcacatgaagtttgcaactttccaccctgcccatttttgtaaaactgcagtcatcttggaccttttaaaacacaaattttaaactcaaccaagctgtgataagtggaatggttactgtttatactgtggtatgtttttgattacagcagataatgctttcttttccagtcgtctttgagaataaaggaaaaaaaatcttcagatgcaatggttttgtgtagcatcttgtctatcatgttttgtaaatactggagaagctttgaccaatttgacttagagatggaatgtaactttgcttacaaaaattgctattaaactcctgcttaaggtgttctaattttctgtgagcacactaaaagcgaaaaataaatgtgaataaaa

SEQ ID NO: 315215 - DNA, 729 bp, Homo sapiens
  misc_feature (708)..(708): n is a, c, g, or t
ctcggcctcccaaagtgctgggattacgggtgtgagccactgcgcccagctatccagtattttatttaaaagttgtcactagggtgttcactattgtgaatttataatcttaaaagttggggatgctaaaagtaccagactaaaatactacgaggttttctcatcttttaattccattttgttagaaaaaaataatcacaaccggggttcttttacctttccccagccatctagactgctttactgcaatgttgggaagattgcatacaataaaaactgtagctagttgattgggatttgggaaaattgaatcaagcatttgcattcatccagaatggtcttaaactgctgactgtggggtgcccacaggatgagcactggtggcatgggtgggaggaatttccttggatactgcaattgcatttgaaagatctattttccaaaacctgagcagagagaggctaggaggaatgcagacaggacattgaaaatgcgaattccctttactagtagaacatgaaatatctgataatggtttaaaaaaaataagtgctgggattacgggtgtgagccactgcgcccagctatccagtattttatttaaaagttgtcactagggtgttcactattgtgaatttataatcttaaaagttggggatgctaaaagtaccagactaaaatactacgaggttttctcatcttttaatnccattttgttagaaaaaaaaa

SEQ ID NO: 315216 - DNA, 630 bp, Homo sapiens
ctcggcctcccaaagtgctgggattacgggtgtgagccactgcgcccagctatccagtattttatttaaaagttgtcactagggtgttcactattgtgaatttataatcttaaaagttggggatgctaaaagtaccagactaaaatactacgaggttttctcatcttttaattccattttgttagaaaaaaataatcacaaccggggttcttttacctttccccagccatctagactgctttactgcaatgttgggaagattgcatacaataaaaactgtagctagttgattgggatttgggaaaattgaatcaagcatttgcattcatccagaatggtcttaaactgctgactgtggggtgcccacaggatgagcactggtggcatgggtgggaggaatttccttggatactgcaattgcatttgaaagatctattttccaaaacctgagcagagagaggctaggaggaatgcagacaggacattgaaaatgcgaattccctttactagtagaacatgaaatatctgataatggtttaaaaaaaataagtgctgggattacaggtgggagccacaacacccggccatgaattaactccgttaaaaaataaacgtatacattctgtgagc

SEQ ID NO: 315217 - DNA, 1179 bp, Homo sapiens
ggccggaagcaggcgccgcttcgaggcccgcggaaaacgcgcgccgagacccgctcctgcagtattagttcttgcagctggtggtggcggctgaggcggcatggatctcagcgagctggagagagacaatacaggccgctgtcgcctgagttcgcctgtgcccgcggtgtgccgcaaggagccttgcgtcctgggcgtcgatgaggcgggcaggggccccgtgctgggccccatggtctacgccatctgttattgtcccctgcctcgcctggcagatctggaggcgctgaaagtggcagactcaaagaccctattggagagcgagcgggaaaggctgtttgcgaaaatggaggacacggactttgtcggctgggcgctggatgtgctgtctccaaacctcatctctaccagcatgcttgggcgggtcaaatacaacctgaactccctgtcacatgatacagccactgggcttatacagtatgcattggaccagggcgtgaacgtcacccaggtattcgtggacaccgtagggatgccagagacataccaggcgcggctgcagcaaagttttcccgggattgaggtgacggtcaaggccaaagcagatgccctctacccggtggttagtgctgccagcatctgtgccaaggtggcccgggaccaggccgtgaagaaatggcagttcgtggagaaactgcaggacttggatactgattatggctcaggctaccccaatgatcccaagacaaaagcgtggttgaaggagcacgtggagcctgtgttcggcttcccccagtttgtccggttcagctggcgcacggcccagaccatcctggagaaagaggcggaagatgttatatgggaggactcagcatccgagaatcaggagggactcaggaagatcacatcctacttcctcaatgaagggtcccaagcccgtccccgttcttcccaccgatatttcctggaacgcggcctggagtcagcaaccagcctctagcagctgcctctacgcgctctacctgcttccccaacccagacattaaaattgtttaaggagaaccacacgtaggggatgtacttttgggacagaagcaaggtgggagtgtgctctgcagccgggtccagctacttccttttggaaccttaaatagaatgggtgttggttgattaatttta

SEQ ID NO: 315218 - DNA, 1548 bp, Homo sapiens
  misc_feature (1191)..(1192): n is a, c, g, or t
ggccggaagcaggcgccgcttcgaggcccgcggaaaacgcgcgccgagacccgctcctgcagtattagttcttgcagctggtggtggcggctgaggcggcatggatctcagcgagctggagagagacaatacaggccgctgtcgcctgagttcgcctgtgcccgcggtgtgccgcaaggagccttgcgtcctgggcgtcgatgaggcgggcaggggccccgtgctgggccccatggtctacgccatctgttattgtcccctgcctcgcctggcagatctggaggcgctgaaagtggcagactcaaagaccctattggagagcgagcgggaaaggctgtttgcgaaaatggaggacacggactttgtcggctgggcgctggatgtgctgtctccaaacctcatctctaccagcatgcttgggcgggtcaaatacaacctgaactccctgtcacatgatacagccactgggcttatacagtatgcattggaccagggcgtgaacgtcacccaggtattcgtggacaccgtagggatgccagagacataccaggcgcggctgcagcaaagttttcccgggattgaggtgacggtcaaggccaaagcagatgccctctacccggtggttagtgctgccagcatctgtgccaaggtggcccgggaccaggccgtgaagaaatggcagttcgtggagaaactgcaggacttggatactgattatggctcaggctaccccaatgatcccaagacaaaagcgtggttgaaggagcacgtggagcctgtgttcggcttcccccagtttgtccggttcagctggcgcacggcccagaccatcctggagaaagaggcggaagatgttatatgggaggactcagcatccgagaatcaggagggactcaggaagatcacatcctacttcctcaatgaagggtcccaagcccgtccccgttcttcccaccgatatttcctggaacgcggcctggagtcagcaaccagcctctagcagctgcctctacgcgctctacctgcttccccaacccagacattaaaattgtttaaggagaaccacacgtaggggatgtacttttgggacagaagcaaggtgggagtgtgctctgcagccgggtccagctacttccttttggaaccttaaatagaatgggtgttggttgattaattttaaaaaaaaaaaannaaaaaaaaaaaaaaaaaaaaaaaaaaaaagggggggggggttaaaaattccccgccgaggggggcgcccaagttataaggctggaacccaaggtttttgcgacaaggggggccctataagggaaaagggagattaaaaacgtagaggcacgggacggggtgttaaacaagttgttgtgatgtgggccaaactgggacagctgggagacctttggagaggcgaccctacctcgtggggggtgggcaatacggggccaccaaccaacaggagataaagcgctcagggaattataaactttagtgttagtggtacaacgggatatgctgcgtcgaagttggtacgggtgtttgaactta

SEQ ID NO: 315219 - DNA, 1300 bp, Homo sapiens
ggccggaagcaggcgccgcttcgaggcccgcggaaaacgcgcgccgagacccgctcctgcagtattagttcttgcagctggtggtggcggctgaggcggcatggatctcagcgagctggagagagacaatacaggccgctgtcgcctgagttcgcctgtgcccgcggtgtgccgcaaggagccttgcgtcctgggcgtcgatgaggcgggcaggggccccgtgctgggccccatggtctacgccatctgttattgtcccctgcctcgcctggcagatctggaggcgctgaaagtggcagactcaaagaccctattggagagcgagcgggaaaggctgtttgcgaaaatggaggacacggactttgtcggctgggcgctggatgtgctgtctccaaacctcatctctaccagcatgcttgggcgggtcaaatacaacctgaactccctgtcacatgatacagccactgggcttatacagtatgcattggaccagggcgtgaacgtcacccaggtattcgtggacaccgtagggatgccagagacataccaggcgcggctgcagcaaagttttcccgggattgaggtgacggtcaaggccaaagcagatgccctctacccggtggttagtgctgccagcatctgtgccaaggtggcccgggaccaggccgtgaagaaatggcagttcgtggagaaactgcaggacttggatactgattatggctcaggctaccccaatgatcccaagacaaaagcgtggttgaaggagcacgtggagcctgtgttcggcttcccccagtttgtccggttcagctggcgcacggcccagaccatcctggagaaagaggcggaagatgttatatggggggtgtcatggatgtcctgggggtgctatagggaaggaaggagggaggccagcgttcagccctgcctgagagggttgctccctgtgtaagtggtcactgtcatcacctctctcccacagggaggactcagcatccgagaatcaggagggactcaggaagatcacatcctacttcctcaatgaagggtcccaagcccgtccccgttcttcccaccgatatttcctggaacgcggcctggagtcagcaaccagcctctagcagctgcctctacgcgctctacctgcttccccaacccagacattaaaattgtttaaggagaaccacacgtaggggatgtacttttgggacagaagcaaggtgggagtgtgctctgcagccgggtccagctacttccttttggaaccttaaatagaatgggtgttggttgattaatttta

SEQ ID NO: 315220 - DNA, 1184 bp, Homo sapiens
ggccggaagcaggcgccgcttcgaggcccgcggaaaacgcgcgccgagacccgctcctgcagtattagttcttgcagctggtggtggcggctgaggcggcatggatctcagcgagctggagagagacaatacaggccgctgtcgcctgagttcgcctgtgcccgcggtgtgccgcaaggagccttgcgtcctgggcgtcgatgaggcgggcaggggccccgtgctgggccccatggtctacgccatctgttattgtcccctgcctcgcctggcagatctggaggcgctgaaagtggcagactcaaagaccctattggagagcgagcgggaaaggctgtttgcgaaaatggaggacacggactttgtcggctgggcgctggatgtgctgtctccaaacctcatctctaccagcatgcttgggcgggtcaaatacaacctgaactccctgtcacatgatacagccactgggcttatacagtatgcattggaccagggcgtgaacgtcacccaggtattcgtggacaccgtagggatgccagagacataccaggcgcggctgcagcaaagttttcccgggattgaggtgacggtcaaggccaaagcagatgccctctacccggtggttagtgctgccagcatctgtgccaaggtggcccgggaccaggccgtgaagaaatggcagttcgtggagaaactgcaggacttggatactgattatggctcaggctaccccaatgatcccaagacaaaagcgtggttgaaggagcacgtggagcctgtgttcggcttcccccagtttgtccggttcagctggcgcacggcccagaccatcctggagaaagaggcggaagatgttatatggggggtgtcatggatgtcctgggggtgctatagggaaggaaggagggaggccagcgttcagccctgcctgagagggttgctccctgtgtaagtggtcactgtcatcacctctctcccacagggaggactcagcatccgagaatcaggagggactcaggaagatcacatcctacttcctcaatgaagggtcccaagcccgtccccgttcttcccaccgatatttcctggaacgcggcctggagtcagcaaccagcctctagcagctgcctctacgcgctctacctgcttccccaacccagacattaaaattgtttaaggagaac

SEQ ID NO: 315221 - DNA, 1023 bp, Homo sapiens
ggtcagttgagagctctatggatcgtgacagagcttaccagatgcacagtatagggccggtgtactcctgctgttctcgcatgttgcgccggcgcgtgtgccgacatcgcgttgccctttcgccgtcctggtgcgtcgattgagtgcgggcatggggtccccgctgtctgggctcccattggtctatcgccagtactattattagtcctccatgcactcggccttggcgagagtctggatggctgctgaaatgtggcagactcaaagaccctattggagagcgagcgggaaaggctgtttgcgaaaatggaggacacggactttgtcggctgggcgctggatgtgctgtctccaaacctcatctctaccagcatgcttgggcgggtcaaatacaacctgaactccctgtcacatgatacagccactgggcttatacagtatgcattggaccagggcgtgaacgtcacccaggtattcgtggacaccgtagggatgccagagacataccaggcgcggctgcagcaaagttttcccgggattgaggtgacggtcaaggccaaagcagatgccctctacccggtggttagtgctgccagcatctgtgccaaggtggcccgggaccaggccgtgaagaaatggcagttcgtggagaaactgcaggacttggatactgattatggctcaggctaccccaatgatcccaagacaaaagcgtggttgaaggagcacgtggagcctgtgttcggcttcccccagtttgtccggttcagctggcgcacggcccagaccatcctggagaaagaggcggaagatgttatatgggaggactcagcatccgagaatcaggagggactcaggaagatcacatcctacttcctcaatgaagggtcccaagcccgtccccgttcttcccaccgatatttcctggaacgcggcctggagtcagcaaccagcctctagcagctgcctctacgcgctctacctgcttccccaacccagacattaaaattgtttaaggagaac

SEQ ID NO: 315222 - DNA, 1009 bp, Homo sapiens
ggccggaagcaggcgccgcttcgaggcccgcggaaaacgcgcgccgagacccgctcctgcagtattagttcttgcagctggtggtggcggctgaggcggcatggatctcagcgagctggagagagacaatacaggccgctgtcgcctgagttcgcctgtgcccgcggtgtgccgcaaggagccttgcgtcctgggcgtcgatgaggcgggcaggggccccgtgctgggccccatggtctacgccatctgttattgtcccctgcctcgcctggcagatctggaggcgctgaaagtggcagactcaaagaccctattggagagcgagcgggaaaggctgtttgcgaaaatggaggacacggactttgtcggctgggcgctggatgtgctgtctccaaacctcatctctaccagcatgcttgggcgggtcaaatacaacctgaactccctgtcacatgatacagccactgggcttatacagtatgcattggaccagggcgtgaacgtcacccaggtattcgtggacaccgtagggatgccagagacataccaggcgcggctgcagcaaagttttcccgggattgaggtgacggtcaaggccaaagcagatgccctctacccggtggttagtgctgccagcatctgtgccaagggcccagaccatcctggagaaagaggcggaagatgttatatgggaggactcagcatccgagaatcaggagggactcaggaagatcacatcctacttcctcaatgaagggtcccaagcccgtccccgttcttcccaccgatatttcctggaacgcggcctggagtcagcaaccagcctctagcagctgcctctacgcgctctacctgcttccccaacccagacattaaaattgtttaaggagaaccacacgtaggggatgtacttttgggacagaagcaaggtgggagtgtgctctgcagccgggtccagctacttccttttggaaccttaaatagaatgggtgttggttgattaatttta

SEQ ID NO: 315223 - DNA, 561 bp, Homo sapiens
ggccggaagcaggcgccgcttcgaggcccgcggaaaacgcgcgccgagacccgctcctgcagtattagttcttgcagctggtggtggcggctgaggcggcatggatctcagcgagctggagagagacaatacaggccgctgtcgcctgagttcgcctgtgcccgcggtgtgccgcaaggagccttgcgtcctgggcgtcgatgaggcgggcaggggccccgtgctgggccccatggtctacgccatctgttattgtcccctgcctcgcctggcagatctggaggcgctgaaagtggcagactcaaagaccctattggagagcgagcgggaaaggctgtttgcgaaaatggaggacacggactttgtcgcaaccagcctctagcagctgcctctacgcgctctacctgcttccccaacccagacattaaaattgtttaaggagaaccacacgtaggggatgtacttttgggacagaagcaaggtgggagtgtgctctgcagccgggtccagctacttccttttggaaccttaaatagaatgggtgttggttgattaatttta

SEQ ID NO: 315224 - DNA, 850 bp, Homo sapiens
  misc_feature (493)..(494): n is a, c, g, or t
ctgcaggacttggatactgattatggctcaggctacccggtggttagtgctgccagcatctgtgccagtggcccgggaccaggccgtgaagaaatggcagttcgtggagaaactgcaggacttggatactgattatggctcaggctaccccaatgatcccaagacaaaagcgtggttgaaggagcacgtggagcctgtgttcggcttcccccagtttgtccggttcagctggcgcacggcccagaccatcctggagaaagaggcggaagatgttatatgggaggactcagcatccgagaatcaggagggactcaggaagatcacatcctacttcctcaatgaagggtcccaagcccgtccccgttcttcccaccgatatttcctggaacgcggcctggagtcagcaaccagcctctagcagctgcctctacgcgctctacctgcttccccaacccagacattaaaattgtttaaggagaacaaaaaaaaaaannaaaaaaaaaaaaaaaaaaaaaaaaaaaaagggggggggggttaaaaattccccgccgaggggggcgcccaagttataaggctggaacccaaggtttttgcgacaaggggggccctataagggaaaagggagattaaaaacgtagaggcacgggacggggtgttaaacaagttgttgtgatgtgggccaaactgggacagctgggagacctttggagaggcgaccctacctcgtggggggtgggcaatacggggccaccaaccaacaggagataaagcgctcagggaattataaactttagtgttagtggtacaacgggatatgctgcgtcgaagttggtacgggtgtttgaactta

SEQ ID NO: 315225 - DNA, 1063 bp, Homo sapiens
ggccggaagcaggcgccgcttcgaggcccgcggaaaacgcgcgccgagacccgctcctgcagtattagttcttgcagctggtggtggcggctgaggcggcatggatctcagcgagctggagagagacaatacaggccgctgtcgcctgagttcgcctgtgcccgcggtgtgccgcaaggagccttgcgtcctgggcgtcgatgaggcgggcaggggccccgtgctgggccccatggtctacgccatctgttattgtcccctgcctcgcctggcagatctggaggcgctgaaagtggcagactcaaagaccctattggagagcgagcgggaaaggctgtttgcgaaaatggaggacacggactttgtcggctgggcgctggatgtgctgtctccaaacctcatctctaccagcatgcttgggcgggtcaaatacaacctgaactccctgtcacatgatacagccactgggcttatacagtatgcattggaccagggcgtgaacgtcacccaggtattcgtggacaccgtagggatgccagagacataccaggcgcggctgcagcaaagttttcccgggattgaggtgacggtcaaggccaaagcagatgccctctacccggtggttagtgctgccagcatctgtgccaaggtggcccgggaccaggccgtgaagaaatggcagttcgtggagaaactgcaggacttggatactgattatggctcaggctaccccaatgatcccaagacaaaagcgtggttgaaggagcacgtggagcctgtgttcggcttcccccagtttgtccggttcagctggcgcacggcccagaccatcctggagaaagaggcggaagatgttatatgggaggactcagcatccgagaatcaggagggactcaggaagatcacatcctacttcctcaatgaagggtcccaagcccgtccccgttcttcccaccgatatttcctggaacgcggcctggagtcagcaaccagcctctagcagctgcctctacgcgctctacctgcttccccaacccagacattaaaattgtttaaggagaac

SEQ ID NO: 315226 - DNA, 1132 bp, Homo sapiens
  misc_feature (1076)..(1076): n is a, c, g, or t
  misc_feature (1078)..(1078): n is a, c, g, or t
ggccggaagcaggcgccgcttcgaggcccgcggaaaacgcgcgccgagacccgctcctgcagtattagttcttgcagctggtggtggcggctgaggcggcatggatctcagcgagctggagagagacaatacaggccgctgtcgcctgagttcgcctgtgcccgcggtgtgccgcaaggagccttgcgtcctgggcgtcgatgaggcgggcaggggccccgtgctgggccccatggtctacgccatctgttattgtcccctgcctcgcctggcagatctggaggcgctgaaagtggcagactcaaagaccctattggagagcgagcgggaaaggctgtttgcgaaaatggaggacacggactttgtcggctgggcgctggatgtgctgtctccaaacctcatctctaccagcatgcttgggcgggtcaaatacaacctgaactccctgtcacatgatacagccactgggcttatacagtatgcattggaccagggcgtgaacgtcacccaggtattcgtggacaccgtagggatgccagagacataccaggcgcggctgcagcaaagttttcccgggattgaggtgacggtcaaggccaaagcagatgccctctacccggtggttagtgctgccagcatctgtgccaaggtggcccgggaccaggccgtgaagaaatggcagttcgtggagaaactgcaggacttggatactgattatggctcaggctaccccaatgatcccaagacaaaagcgtggttgaaggagcacgtggagcctgtgttcggcttcccccagtttgtccggttcagctggcgcacggcccagaccatcctggagaaagaggcggaagatgttatatgggaggactcagcatccgagaatcaggagggactcaggaagatcacatcctacttcctcaatgaagggtcccaagcccgtccccgttcttcccaccgatatttcctggaacgcggcctggagtcagcaaccagcctctagcagctgcctctacgcgctctacctgcttccccaacccagacattaaaattgtttaaggagaaccacaaaaaaaaananacaaacaaagagacacaacacacaaaacacacacaaaaaccaaacaaaaggggg

SEQ ID NO: 315227 - DNA, 1163 bp, Homo sapiens
ggccggaagcaggcgccgcttcgaggcccgcggaaaacgcgcgccgagacccgctcctgcagtattagttcttgcagctggtggtggcggctgaggcggcatggatctcagcgagctggagagagacaatacaggccgctgtcgcctgagttcgcctgtgcccgcggtgtgccgcaaggagccttgcgtcctgggcgtcgatgaggcgggcaggggccccgtgctgggccccatggtctacgccatctgttattgtcccctgcctcgcctggcagatctggaggcgctgaaagtggcagactcaaagaccctattggagagcgagcgggaaaggctgtttgcgaaaatggaggacacggactttgtcggctgggcgctggatgtgctgtctccaaacctcatctctaccagcatgcttgggcgggtcaaatacaacctgaactccctgtcacatgatacagccactgggcttatacagtatgcattggaccagggcgtgaacgtcacccaggtattcgtggacaccgtagggatgccagagacataccaggcgcggctgcagcaaagttttcccgggattgaggtgacggtcaaggccaaagcagatgccctctacccggtggttagtgctgccagcatctgtgccaaggtggcccgggaccaggccgtgaagaaatggcagttcgtggagaaactgcaggacttggatactgattatggctcaggctaccccaatgatcccaagacaaaagcgtggttgaaggagcacgtggagcctgtgttcggcttcccccagtttgtccggttcagctggcgcacggcccagaccatcctggagaaagaggcggaagatgttatatgggaggactcagcatccgagaatcaggagggactcaggaagatcacatcctacttcctcaatgaagggtcccaagcccgtccccgttcttcccaccgatatttcctggaacgcggcctggagtcagcaaccagcctctagcagctgcctctacgcgctctacctgcttccccaacccagacattaaaattgtttaaggagaaccacacgtaggggatgtacttttgggacagaagcaaggtgggagtgtgatccccacgtccggtctagtattattcatctagacttataatacatagttgtc

SEQ ID NO: 315228 - DNA, 998 bp, Homo sapiens
gcgggaaacgggagtcgggattgcactgcaccaagggaggggatgtggtcgtggtgatggcacctaaagaagcagtgatgatagaacagggatgaatggcaactttcacgggctcagtgattggaccccggctgccagaaaactgacaccccttctccccaggccccatggtctacgccatctgttattgtcccctgcctcgcctggcagatctggaggcgctgaaagtggcagactcaaagaccctattggagagcgagcgggaaaggctgtttgcgaaaatggaggacacggactttgtcggctgggcgctggatgtgctgtctccaaacctcatctctaccagcatgcttgggcgggtcaaatacaacctgaactccctgtcacatgatacagccactgggcttatacagtatgcattggaccagggcgtgaacgtcacccaggtattcgtggacaccgtagggatgccagagacataccaggcgcggctgcagcaaagttttcccgggattgaggtgacggtcaaggccaaagcagatgccctctacccggtggttagtgctgccagcatctgtgccaaggtggcccgggaccaggccgtgaagaaatggcagttcgtggagaaactgcaggacttggatactgattatggctcaggctaccccaatgatcccaagacaaaagcgtggttgaaggagcacgtggagcctgtgttcggcttcccccagtttgtccggttcagctggcgcacggcccagaccatcctggagaaagaggcggaagatgttatatgggaggactcagcatccgagaatcaggagggactcaggaagatcacatcctacttcctcaatgaagggtcccaagcccgtccccgttcttcccaccgatatttcctggaacgcggcctggagtcagcaaccagcctctagcagctgcctctacgcgctctacctgcttccccaacccagacattaaaattgtttaaggagaac

SEQ ID NO: 315229 - DNA, 761 bp, Homo sapiens
cagaccgtacttggagagcgaccggcaccgcagtcccgggaaaacttggcagccgccgcgcctcgtatgtctctagcatccctactggtctccacgtatacctggctgacgttcacgccctggtcaaatacaacctgaactccctgtcacatgatacagccactgggcttatacagtatgcattggaccagggcgtgaacgtcacccaggtattcgtggacaccgtagggatgccagagacataccaggcgcggctgcagcaaagttttcccgggattgaggtgacggtcaaggccaaagcagatgccctctacccggtggttagtgctgccagcatctgtgccaaggtggcccgggaccaggccgtgaagaaatggcagttcgtggagaaactgcaggacttggatactgattatggctcaggctaccccaatgatcccaagacaaaagcgtggttgaaggagcacgtggagcctgtgttcggcttcccccagtttgtccggttcagctggcgcacggcccagaccatcctggagaaagaggcggaagatgttatatgggaggactcagcatccgagaatcaggagggactcaggaagatcacatcctacttcctcaatgaagggtcccaagcccgtccccgttcttcccaccgatatttcctggaacgcggcctggagtcagcaaccagcctctagcagctgcctctacgcgctctacctgcttccccaacccagacattaaaattgtttaaggagaac

SEQ ID NO: 315230 - DNA, 962 bp, Homo sapiens
ggccggaagcaggcgccgcttcgaggcccgcggaaaacgcgcgccgagacccgctcctgcagtattagttcttgcagctggtggtggcggctgaggcggcatggatctcagcgagctggagagagacaatacaggccgctgtcgcctgagttcgcctgtgcccgcggtgtgccgcaaggagccttgcgtcctgggcgtcgatgaggcgggcaggggccccgtgctgggccccatggtctacgccatctgttattgtcccctgcctcgcctggcagatctggaggcgctgaaagtggcagactcaaagaccctattggagagcgagcgggaaaggctgtttgcgaaaatggaggacacggactttgtcggctgggcgctggatgtgctgtctccaaacctcatctctaccagcatgcttgggcgggtcaaatacaacctgaactccctgtcacatgatacagccactgggcttatacagtatgcattggaccagggcgtgaacgtcacccaggtgagttaactgtaagttgtccccatttggtcatctcaggataaaatggggacaaaacaggagttcgagactgcagtgagccatgatcatgccacagcactccatcctgggtgacaaaggaagccccccaactcaaaaatggaggcagggcgcagtggctcacgcctataatcgcagcactttgggaagccgcggcgggtagatcaccggaggtcaagagttcgagaccagcctgaccaacatggtgaaaccccgtctctactaaaaatacaaaaattagctggacgtggtggcaggcgcctgtaatcctagctactcaggaggctgagacaggagaatcgcttgaacccaggaggcagaagttgcagtgagccaagattgtgccattgcactccaacccgggcaacagagcaagaccctgtctcaaaaaaataaaaaataaaaaataaac

SEQ ID NO: 315231 - DNA, 741 bp, Homo sapiens
cggtaaccgcgtcgcagtcgccgaagatggcggggcgaagtctgtgtctcacgagaagcagcgttccagggactccgttcccgccacccgttcagcaaccctctacacctggacccgacctcctcgccttggaggaagaatataagcgtttaaatgcagaattgcaggcaaaaacagctgacgtggttcaacaagctaaggaaataataagagatcggcaagaagtacgatctaggcctgtttcaacacaaatgaaatcatgtgatgacgaagatgattacagtttaagaggtctgttaccatctgaagggatagttcatcttcattcagaaactaagccaaagaccaaaaacattgatcctgtaaacaaggttcaaaacaaattacactctgcaaataaaggaaggaaaacaaattcaagtgttaaattgaaatactctgatgtccaaactgccgacgatgttgccattccagaggatttctcagacttttcccttgcaaaaacaattagcaaaattgaagggcaactggaggaagaaggcttacctgaatatatagatgatattttttctggtgttagtaatgacattggaacagaagcacagatcagatttctaaaggccaaactccatgttatgcaggaggaattggataatgttgtatgtgaatgcaataaaaaggaggatgaaattcagaatttaaagtctcaagtaaaaaattttgaagaagattttatgagac

SEQ ID NO: 315232 - DNA, 842 bp, Homo sapiens
cggtaaccgcgtcgcagtcgccgaagatggcggggcgaagtctgtgtctcacggtcagttcaactccaggctcctggggagcgtctgggttccggcgactaggacgcctaacttcctttaacttcgggtctgaaagtctgtggctcttttacagagaagcagcgttccagggactccgttcccgccacccgttcagcaaccctctacacctggacccgacctcctcgccttggaggaagaatataagcgtttaaatgcagaattgcaggcaaaaacagctgacgtggttcaacaagctaaggaaataataagagatcggcaagaagtacgatctaggcctgtttcaacacaaatgaaatcatgtgatgacgaagatgattacagtttaagaggtctgttaccatctgaagggatagttcatcttcattcagaaactaagccaaagaccaaaaacattgatcctgtaaacaaggttcaaaacaaattacactctgcaaataaaggaaggaaaacaaattcaagtgttaaattgaaatactctgatgtccaaactgccgacgatgttgccattccagaggatttctcagacttttcccttgcaaaaacaattagcaaaattgaagggcaactggaggaagaaggcttacctgaatatatagatgatattttttctggtgttagtaatgacattggaacagaagcacagatcagatttctaaaggccaaactccatgttatgcaggaggaattggataatgttgtatgtgaatgcaataaaaaggaggatgaaattcagaatttaaagtctcaagtaaaaaattttgaagaagattttatgagac

SEQ ID NO: 315233 - DNA, 807 bp, Homo sapiens
ggccagggaagcgcgccgctgggggccgggaggagtccggcccggctggtggagagcaggaaaacgtgggggaggtgctggcgagagaaagagaacttgcgtgaggaggaggaggagaaaccaaatttaataatatttggcgtggaaatgggatttgggcgggggaggcatcttcaaagcaagtaaagagaaatcaacattatcccccttcccctgcacatgcatgtgaggattacttcctccctgagtaaatgaagagaactgaagcaggcgtttaaatgcagaattgcaggcaaaaacagctgacgtggttcaacaagctaaggaaataatatttttgccagtgtctgaaaagcaggaaaatacttgtacaaaaggaccccacgttatagtagaatgacagattcattacgttttctactcagagagccctgtaaaaagaatctccccctgcaaataaaaaacagaatagaaaactgggataagctaggaaaggggttggggaatggattcctacccctgcagaagcaaacaatataaggtttctcatatttaatttttatttactcactttctctttttaaaatttttaatgtttgtggttacatagtaagtgtttatggggtaaatgagatattttgatacaggcatgcattgtgtaataatcacatcatggaaaatggggtatccatcccctcaagtatttatcctttgtgttacaaaaaatccaattatactattttagttaatttaaaatgtacaattaaatgattttgactataataaacatgttgtgctgtcaaaaaa

SEQ ID NO: 315234 - DNA, 866 bp, Homo sapiens
ggccagggaagcgcgccgctgggggccgggaggagtccggcccggctggtggagagcaggaaaacgtgggggaggtgctggcgagagaaagagaacttgcgtgaggaggaggaggagaaaccaaatttaataatatttggcgtggaaatgggatttgggcgggggaggcatcttcaaagcaagtaaagagaaatcaacattatcccccttcccctgcacatgcatgtgaggattacttcctccctgagtaaatgaagagaactgaagcaggcgtttaaatgcagaattgcaggcaaaaacagctgacgtggttcaacaagctaaggaaataataagagatcggcaagaagtacgatctaggcctgtttcaacacaaatgaaatcatgtgatgacgaagatgattacagtttaagaggtctgttaccatctgaagggatagttcatcttcattcagaaactaagccaaagaccaaaaacattgatcctgtaaacaaggttcaaaacaaattacactctgcaaataaaggaaggaaaacaaattcaagtgttaaattgaaatactctgatgtccaaactgccgacgatgttgccattccagaggatttctcagacttttcccttgcaaaaacaattagcaaaattgaagggcaactggaggaagaaggcttacctgaatatatagatgatattttttctggtgttagtaatgacattggaacagaagcacagatcagatttctaaaggccaaactccatgttatgcaggaggaattggataatgttgtatgtgaatgcaataaaaaggaggatgaaattcagaatttaaagtctcaagtaaaaaattttgaagaagattttatgagac

SEQ ID NO: 315235 - DNA, 663 bp, Homo sapiens
cctccttatgctcaccccatccgtatgctcatccctcctatatgctcatccctccttacttgaatttcttggttttggtgttatctaggtcttttccagctatacagttgtgatattcttgaaaacacatttttggtaattccatgaaaatagcaaatagcagtttttctgtgtagcaaaattctatgtgttacagaattgctttctttggcaaatgattagactctaattagtcaatactttcaattcttttcatgtagccaaagaccaaaaacattgatcctgtaaacaaggttcaaaacaaattacactctgcaaataaaggaaggaaaacaaattcaagtgttaaattgaaatactctgatgtccaaactgccgacgatgttgccattccagaggatttctcagacttttcccttgcaaaaacaattagcaaaattgaagggcaactggaggaagaaggcttacctgaatatatagatgatattttttctggtgttagtaatgacattggaacagaagcacagatcagatttctaaaggccaaactccatgttatgcaggaggaattggataatgttgtatgtgaatgcaataaaaaggaggatgaaattcagaatttaaagtctcaagtaaaaaattttgaagaagattttatgagac

SEQ ID NO: 315236 - DNA, 557 bp, Homo sapiens
  misc_feature (10)..(10): n is a, c, g, or t
  misc_feature (96)..(96): n is a, c, g, or t
atgcgccacnatgcctggctaatttttgtatttttagtggaaacggggtttcgccgtgttgcccagactggtctcaaactcctgacctcaggtganccaccacctaggtctgttaccatctgaagggatagttcatcttcattcagaaactaagccaaagaccaaaaacattgatcctgtaaacaaggttcaaaacaaattacactctgcaaataaaggaaggaaaacaaattcaagtgttaaattgaaatactctgatgtccaaactgccgacgatgttgccattccagaggatttctcagacttttcccttgcaaaaacaattagcaaaattgaagggcaactggaggaagaaggcttacctgaatatatagatgatattttttctggtgttagtaatgacattggaacagaagcacagatcagatttctaaaggccaaactccatgttatgcaggaggaattggataatgttgtatgtgaatgcaataaaaaggaggatgaaattcagaatttaaagtctcaagtaaaaaattttgaagaagattttatgagac

SEQ ID NO: 315237 - DNA, 964 bp, Homo sapiens
cggtaaccgcgtcgcagtcgccgaagatggcggggcgaagtctgtgtctcacgagaagcagcgttccagggactccgttcccgccacccgttcagcaaccctctacacctggacccgacctcctcgccttggaggaagaatataagtaagaaattcggcggttgaacttttccttctttctttcatctgaatgaggctgcttacaagtacttttttctggagactggctggatcttcgggaccactcactctgcagcattcccttctcgtcatctcgttcacctgccgtttatcctttctttgtctttgatctgagtagttcgcctgcgtattagaagatatttgaagtgggcgaaaatttagcccaagcgtttaaatgcagaattgcaggcaaaaacagctgacgtggttcaacaagctaaggaaataataagagatcggcaagaagtacgatctaggcctgtttcaacacaaatgaaatcatgtgatgacgaagatgattacagtttaagaggtctgttaccatctgaagggatagttcatcttcattcagaaactaagccaaagaccaaaaacattgatcctgtaaacaaggttcaaaacaaattacactctgcaaataaaggaaggaaaacaaattcaagtgttaaattgaaatactctgatgtccaaactgccgacgatgttgccattccagaggatttctcagacttttcccttgcaaaaacaattagcaaaattgaagggcaactggaggaagaaggcttacctgaatatatagatgatattttttctggtgttagtaatgacattggaacagaagcacagatcagatttctaaaggccaaactccatgttatgcaggaggaattggataatgttgtatgtgaatgcaataaaaaggaggatgaaattcagaatttaaagtctcaagtaaaaaattttgaagaagattttatgagac

SEQ ID NO: 315238 - DNA, 853 bp, Homo sapiens
cggtaaccgcgtcgcagtcgccgaagatggcggggcgaagtctgtgtctcacggtcagttcaactccaggctcctggggagcgtctgggttccggcgactaggacgcctaacttcctttaacttcgggtctgaaagtctgtggctcttttacagagaagcagcgttccagggactccgttcccgccacccgttcagcaaccctctacacctggacccgacctcctcgccttggaggaagaatataagtaagaaattcggcggttgaacttttccttctttctttcatctgaatgaggctgcttacaagtacttttttctggagactggctggatcttcgggaccactcactctgcagcattcccttctcgtcatctcgttcacctgccgtttatcctttctttgtctttgatctgagtagttcgcctgcgtattagaagatatttgaagtgggcgaaaatttagcccaagcgtttaaatgcagaattgcaggcaaaaacagctgacgtggttcaacaagctaaggaaataatatgttaaattgaaatactctgatgtccaaactgccgacgatgttgccattccagaggatttctcagacttttcccttgcaaaaacaattagcaaaattgaagggcaactggaggaagaaggcttacctgaatatatagatgatattttttctggtgttagtaatgacattggaacagaagcacagatcagatttctaaaggccaaactccatgttatgcaggaggaattggataatgttgtatgtgaatgcaataaaaaggaggatgaaattcagaatttaaagtctcaagtaaaaaattttgaagaagattttatgagac

SEQ ID NO: 315239 - DNA, 342 bp, Homo sapiens
atcagcaatagaatccacattttctttctctcttcctcagtctaccttcctaaaatctagctaacctgtgtatcttgttctatctatcactaaatataggtatttactaaaaagttttaagggtataggggagtaatagggatatagctaaaaggagattggccctatgacttgacaatggttcaagctgagcaatgggcacacagaatttattatctcattctatttcagtatatatttgaaattttccataataaaagttttttaaattacttatctttaaaaggtccttatgtattttccatgaggcaaaatgaataatgtatgtaacaacttcagtat

SEQ ID NO: 315240 - DNA, 780 bp, Homo sapiens
ggcagcctcaaccgcctggcagcggcggtttcttctcttcgtgaaaatcgtgatctcatctctccgtccatgggcgaaaaaacagccatcaccaggccattcacgctttgtgcttttgttagcagagcccaggcagccctgcagcccacatctagggtacaaacggaacggcggcgttttccttgtatcatttagaggaaatttttgagctgaacagtattttttttctccctctctctctctctgaaatattgctgagatttaaaggaggacgaagacaacagattcatagctgggtcttgctgttttcctgacgctgaccacagcggatctaggtggctatttcgttggtgcacaggcgttcacagaggcagagaggggagaaagttgtcaaacagattcacagactgtcaaagtgcggcttaaaccgagttcctgggctccctcactggcttcgtccacttaaacttttaacgtacacatgtagagagctgaaactccaggggtaacatgggacaggtcctcttgatttaatgaaaacagaagatcaactggaccgggtagcaagaaataaggcttaagaagcactggtttctctgcagaagacagcaagatgccccagggaatgtttgtgaaaaaggatgactggatgggaagcaagctgaagaaaaagaaggaaagaaagagagaaatcagtaaatcaccacacaagaggtggagaagaggacttataaatattgtttctatgacatttgaaaataaatgttttactccatgcta

SEQ ID NO: 315241 - DNA, 345 bp, Homo sapiens
ggcagcctcaaccgcctggcagcggcggtttcttctcttcgtgaaaatcgtgatctcatctctccgtccatgggcgaaaaaacagccatcaccaggccattcacgctttgtgcttttgttagcagagcccaggcagccctgcagcccacatctaggtttctctgcagaagacagcaagatgccccagggaatgtttgtgaaaaaggatgactggatgggaagcaagctgaagaaaaagaaggaaagaaagagagaaatcagtaaatcaccacacaagaggtggagaagaggacttataaatattgtttctatgacatttgaaaataaatgttttactccatgcta

SEQ ID NO: 315242 - DNA, 1511 bp, Homo sapiens
  misc_feature (1123)..(1123): n is a, c, g, or t
  misc_feature (1149)..(1149): n is a, c, g, or t
  misc_feature (1195)..(1195): n is a, c, g, or t
  misc_feature (1219)..(1219): n is a, c, g, or t
caattatttcaaaatatttggaaagtttaggaaatagaaaaaaaggcaaaaatccctttattccccttctcttgttgatattttagtctatttccttttggtctttttttaatacagaagttgtgctattgttgtcattttctttggttgtaatcaaaagcatacagagttttgcatcctgctttgtttagataatgttataactatagtattttccaagtttttaaaataaaatcttcataatttttatcatagtgcaatacagttgacccttggacaacatggattggaaccgtgcaggtctactaactaatacacagattctcttccacctatgccacccttgagacagcaagaccaacccctcctcttcctcctccttttcagtccactcaatgtgaagacaaggaaaatgaagaactttatgatgatccatgctattagtctgttctcacaccgctaataaagacatacccgagactgggtaatttataaaagaaagaggtttaatggactcacagttctacatggctgcggaagccccacaatcatgatggaaagcaaaggaggagcaaagtcacgtctcacatggtagcaggcaagagagcatgtgtgggggaacttccctttataaaaccaacagatctcgtgagacctattcactatcacaagaacagcatgggaaaacccaccctcatgattcgattaccttccaccaattccctcccactatacgtggagattattacaattcaaggtgagatttgggtggggacacaaagccaaaccatgtcaatctatttccacttaatgaagagtaaatatatttctcttccttatgattttcttaataacattttcttctctctagcttactttattgtaaaagtatagtacatgatacatgtaacatacaaaatatatgtgaatcaactgttgatgttattggtaaggcttccagtcaacagcaggctattaatagttaagttttgggggagtcaaaaggtcaactgaatttcattgtatgattgtagcacattacatctatcatttttaactgtatatttttctttctaaataatttttaagctttttctttgagtattttttagtgagtcttcantagaatgtaggagtatcttcctattntctatattttactcctttaaatctgcttacttgttttaaatagtcncttgctataaatcttttaaattcntatgagattaaatatttccacttaagatgcaatggaacttactaaaaaagtgctaaaaagtaactatactgaggctgtgatcagtctctgagacccagttcctattgctaacagtactttggtttttggaggctgtcctcctacaactgagaaaagtaatctattaccaatatttaaagtattttccctattggtgctttgtttaaactttcttagagtttgtagtaacaaaagtgacatgttttaacaagtcaaacaacatagaaacacttaagaaaatctaataatctgc

SEQ ID NO: 315243 - DNA, 2957 bp, Homo sapiens
  misc_feature (2692)..(2692): n is a, c, g, or t
ttgttaccagtatgcatatattttatacataatatatctttaaacataaacctaatacatacatatatacatgtgtagctgcacttgtgcaactcaacagtttttagtgcaaacagaatcttagtaatggaggtaaataaagaatgaataagaggtaaaaatggatatagaagtaaaacacaagacatgggggtataaataaattaaaactaagttctgaaaagtgacttttagtaatagaaacctaaaaacatttcatagaaggcaagaacaaagtctgacaacagagtttagttttagtggacattgtggtagtaaatatgtaagttacttctctcttcagaatacaacagatctcactgggccttccagggtcattattcctagaaataatcccactaaatgcccatcttagcaacgcacatttccatgtgtgagttatttctctctcagccccatttaaaaatgtgaaatttggatttagaaggggacatgtatttaaggaagagaagtgccacacaaataatggagcaattttaccatgaaattaatgtcatgaaaatagatatttctataaatacctcttgtttttattattaagacaatgcagacataaaacacttcatactgtagtttctacattgcagccaaaccacttatcaatggccaataaattacttcactcctatgatagatacaaatgctcgattcaagttcaattaatagaatagtgtcaggatatcatgcagacagcttgcataaatactcgaggaataatagcataccttcagtagattctgtgatttttaagcatgaaaactttgtcttattccaaatttcaaaagatggaataaagaatgttttcatataaaatacatttggaacagttttccttcttaaaaaaaaaggcatctaacccacttgcaacatatactggcaattcatctttgtagttacaaaatcagatagatatatattctttttcatctcatgtgactgtatgtgaacatttcagtaattccaacaatatcaaacagctaaattcaaaatcatataatactttctaataagtgtatacgatatatatcttttgtagccaaaggcagaaagaccttcagttagttgatttcatgtttgggcactagtttatattttatcagataattaaaagtcattagttatttcacagtataaaatattgaatcaattaccaacaggcttttattttctgctcctaatttcgaaatgtatttggactcgaggtatgggaataatgtcactgcttatcaaacaattttctggaaatcttaatgcacaaaaatttccagatttatatattcaaaaataaattatatgttaaatgaaattaagaaaaaaaggcgaggggaaggagaaaatctagtttatattctgtgtgaatagctttcaatatcttccaggtgggggcaaccgtaagccacttttgagagaagggagaacaggctctttaagctccctgagtctagttacagaagacttcctggcagtaacaccgtgaataaaacaaccacaagcttccaggagatgagacttctaggctctgctccagacaacacccggccatgggcaacagggcccaccgccctgggcgcgccgcagcctcggccactccgagtcggctccgatcgcgcacgcgcgccgtgcacctgccccatcgcgcccagctgctgcctgagctccgggcacgcccgcgctgtgccggcggggagtgtccgtcactctcagcgctcaggatctctccctttccaggaccgctaggaagcaggaaatccttttcctctcacgtttacatcccattcattcttcctccgggcaattcaagtccattcacagccgccacagatgcacgtgtgcacgcgcgcagctgcacctttaaagaaactctcaagtcctggcggccagaaaaccagctttcaggcggggcggtggggctccccctccccttgcttcgtctctgcagatctttgtgctctagggagggatggccgcacattctgacgaggacgagggtggtgcataacgcggaggtcaattttgcacagtccaggcaaaagagaccccccccccccaccaacatcccttcctgttcagtttccctctctggcccagcgcgaagggcgaggggcgacagaagcccgagggacagaaaaccgaggctcctcagtggccgagttgggagagagtgtgagtccaggagagcccgggggcagcagggagagggtgcagaagctcgagcgcaccgagccagaggccccctcttctcccgccacgcggggctggaggtgcaggcgccggttccgcggcgtggcccggctatgtgtcgctcctccgcgcgccgcccgccgcagcccgtgccctcgggccgccgccgccgccgctgccccccgtcgagcccgcggccgcaccctcgggccgatacttgagccagcagatgacccaggtgacaacgaccgagaagagtgccaggatgctggccaccgacaggcagatgggccccacgggcgagggcgagggcgacccggtggccggtgcctcgccagggggcgccccgcctccgggggttcccccgccgccgtagtggttgacgaagatgaggccggtgaagagcagcaccaccatggagaggaaggagaagaccacgcacacgcagccngcgtttctctgcagaagacagcaagatgccccagggaatgtttgtgaaaaaggatgactggatgggaagcaagctgaagaaaaagaaggaaagaaagagagaaatcagtaaatcaccacacaagaggtggagaagaggacttataaatattgtttctatgacatttgaaaataaatgttttactccatgctaatagtgaatgtgatgtcttcagtttgaagggctttaagtgaagctcattaaaacccactattttccaaaaaaa

SEQ ID NO: 315244 - DNA, 3479 bp, Homo sapiens
  misc_feature (3091)..(3091): n is a, c, g, or t
  misc_feature (3117)..(3117): n is a, c, g, or t
  misc_feature (3163)..(3163): n is a, c, g, or t
  misc_feature (3187)..(3187): n is a, c, g, or t
ttgttaccagtatgcatatattttatacataatatatctttaaacataaacctaatacatacatatatacatgtgtagctgcacttgtgcaactcaacagtttttagtgcaaacagaatcttagtaatggaggtaaataaagaatgaataagaggtaaaaatggatatagaagtaaaacacaagacatgggggtataaataaattaaaactaagttctgaaaagtgacttttagtaatagaaacctaaaaacatttcatagaaggcaagaacaaagtctgacaacagagtttagttttagtggacattgtggtagtaaatatgtaagttacttctctcttcagaatacaacagatctcactgggccttccagggtcattattcctagaaataatcccactaaatgcccatcttagcaacgcacatttccatgtgtgagttatttctctctcagccccatttaaaaatgtgaaatttggatttagaaggggacatgtatttaaggaagagaagtgccacacaaataatggagcaattttaccatgaaattaatgtcatgaaaatagatatttctataaatacctcttgtttttattattaagacaatgcagacataaaacacttcatactgtagtttctacattgcagccaaaccacttatcaatggccaataaattacttcactcctatgatagatacaaatgctcgattcaagttcaattaatagaatagtgtcaggatatcatgcagacagcttgcataaatactcgaggaataatagcataccttcagtagattctgtgatttttaagcatgaaaactttgtcttattccaaatttcaaaagatggaataaagaatgttttcatataaaatacatttggaacagttttccttcttaaaaaaaaaggcatctaacccacttgcaacatatactggcaattcatctttgtagttacaaaatcagatagatatatattctttttcatctcatgtgactgtatgtgaacatttcagtaattccaacaatatcaaacagctaaattcaaaatcatataatactttctaataagtgtatacgatatatatcttttgtagccaaaggcagaaagaccttcagttagttgatttcatgtttgggcactagtttatattttatcagataattaaaagtcattagttatttcacagtataaaatattgaatcaattaccaacaggcttttattttctgctcctaatttcgaaatgtatttggactcgaggtatgggaataatgtcactgcttatcaaacaattttctggaaatcttaatgcacaaaaatttccagatttatatattcaaaaataaattatatgttaaatgaaattaagaaaaaaaggcgaggggaaggagaaaatctagtttatattctgtgtgaatagctttcaatatcttccaggtgggggcaaccgtaagccacttttgagagaagggagaacaggctctttaagctccctgagtctagttacagaagacttcctggcagtaacaccgtgaataaaacaaccacaagcttccaggagatgagacttctaggctctgctccagacaacacccggccatgggcaacagggcccaccgccctgggcgcgccgcagcctcggccactccgagtcggctccgatcgcgcacgcgcgccgtgcacctgccccatcgcgcccagctgctgcctgagctccgggcacgcccgcgctgtgccggcggggagtgtccgtcactctcagcgctcaggatctctccctttccaggaccgctaggaagcaggaaatccttttcctctcacgtttacatcccattcattcttcctccgggcaattcaagtccattcacagccgccacagatgcacgtgtgcacgcgcgcagctgcacctttaaagaaactctcaagtcctggcggccagaaaaccagctttcaggcggggcggtggggctccccctccccttgcttcgtctctgcagatctttgtgctctagggagggatggccgcacattctgacgaggacgagggtggtgcataacgcggaggtcaattttgcacagtccaggcaaaagagaccccccccccccaccaacatcccttcctgttcagtttccctctctggcccagcgcgaagggcgaggggcgacagaagcccgagggacagaaaaccgaggctcctcagtggccgagttgggagagagttgcaatacagttgacccttggacaacatggattggaaccgtgcaggtctactaactaatacacagattctcttccacctatgccacccttgagacagcaagaccaacccctcctcttcctcctccttttcagtccactcaatgtgaagacaaggaaaatgaagaactttatgatgatccatgctattagtctgttctcacaccgctaataaagacatacccgagactgggtaatttataaaagaaagaggtttaatggactcacagttctacatggctgcggaagccccacaatcatgatggaaagcaaaggaggagcaaagtcacgtctcacatggtagcaggcaagagagcatgtgtgggggaacttccctttataaaaccaacagatctcgtgagacctattcactatcacaagaacagcatgggaaaacccaccctcatgattcgattaccttccaccaattccctcccactatacgtggagattattacaattcaaggtgagatttgggtggggacacaaagccaaaccatgtcaatctatttccacttaatgaagagtaaatatatttctcttccttatgattttcttaataacattttcttctctctagcttactttattgtaaaagtatagtacatgatacatgtaacatacaaaatatatgtgaatcaactgttgatgttattggtaaggcttccagtcaacagcaggctattaatagttaagttttgggggagtcaaaaggtcaactgaatttcattgtatgattgtagcacattacatctatcatttttaactgtatatttttctttctaaataatttttaagctttttctttgagtattttttagtgagtcttcantagaatgtaggagtatcttcctattntctatattttactcctttaaatctgcttacttgttttaaatagtcncttgctataaatcttttaaattcntatgagattaaatatttccacttaagatgcaatggaacttactaaaaaagtgctaaaaagtaactatactgaggctgtgatcagtctctgagacccagttcctattgctaacagtactttggtttttggaggctgtcctcctacaactgagaaaagtaatctattaccaatatttaaagtattttccctattggtgctttgtttaaactttcttagagtttgtagtaacaaaagtgacatgttttaacaagtcaaacaacatagaaacacttaagaaaatctaataatctgc

SEQ ID NO: 315245 - DNA, 853 bp, Homo sapiens
ggcagcctcaaccgcctggcagcggcggtttcttctcttcgtgaaaatcgtgatctcatctctccgtccatgggcgaaaaaacagccatcaccaggccattcacgctttgtgcttttgttagcagagcccaggcagccctgcagcccacatctagggtacaaacggaacggcggcgttttccttgtatcatttagaggaaatttttgagctgaacagtattttttttctccctctctctctctctgaaatattgctgagatttaaaggaggacgaagacaacagattcatagctgggtcttgctgttttcctgacgctgaccacagcggatctaggtggctatttcgttggtgcacaggcgttcacagaggcagagaggggagaaagttgtcaaacagattcacagactgtcaaagtgcggcttaaaccgagttcctgggctccctcactggcttcgtccacttaaacttttaacgtacacatgtagagagctgaaactccaggggtaacatgggacaggtcctcttgatttaatgaaaacagaagatcaactggaccgggtagcaagaaataaggcttaagaagcactggtttctctgcagaagacagcaagatgccccagggaatgtttgtgaaaaaggatgactggatgggaagcaagctgaagaaaaagaaggaaagaaagagagaaatcagtaaatcaccacacaagaggtggagaagaggacttataaatattgtttctatgacatttgaaaataaatgttttactccatgctaatagtgaatgtgatgtcttcagtttgaagggctttaagtgaagctcattaaaacccactattttccaaaaaaa

SEQ ID NO: 315246 - DNA, 659 bp, Homo sapiens
ggcagcctcaaccgcctggcagcggcggtttcttctcttcgtgaaaatcgtgatctcatctctccgtccatgggcgaaaaaacagccatcaccaggccattcacgctttgtgcttttgttagcagagcccaggcagccctgcagcccacatctagggtacaaacggaacggcggcgttttccttgtatcatttagaggaaatttttgagctgaacagtattttttttctccctctctctctctctgaaatattgctgagatttaaaggaggacgaagacaacagattcatagctgggtcttgctgttttcctgacgctgaccacagcggatctaggtggctatttcgttggtgcacaggcgttcacagaggcagagaggggagaaagttgtcaaacagattcacagactgtcaaagtgcggcttaaaccgagttcctgggctccctcactggcttcgtccacttaaacttttaacgtacacatgtagagagctgaaactccaggggtaacatgggacaggtcctcttgatttaatgaaaacagaagatcaactggaccgggtagcaagaaatcagtaaatcaccacacaagaggtggagaagaggacttataaatattgtttctatgacatttgaaaataaatgttttactccatgcta

SEQ ID NO: 315247 - DNA, 427 bp, Homo sapiens
cttctccacaacatccctgctcagcaactactggtttgtgggcacacagaaggtgcccaagcccctgtgcgagaaaggtctggcagccaagtgctttgacatgccagtgtccctggatggagataccaacacatccacccaggaggtggtacaatacaactgggagactggggatgaccggttctccttccggagcttccggagtggcatgtggctatcctgtgaggaaactgtggaagaaccagcactgctccatccccagtcctggaaacaatttagatgccttcggtccagtggtacagcggcagcaaaaggggagaggtgccgaagtttcattgaacagtaaatcaccacacaagaggtggagaagaggacttataaatattgtttctatgacatttgaaaataaatgttttactccatgcta

SEQ ID NO: 315248 - DNA, 965 bp, Homo sapiens
ggcagcctcaaccgcctggcagcggcggtttcttctcttcgtgaaaatcgtgatctcatctctccgtccatgggcgaaaaaacagccatcaccaggccattcacgctttgtgcttttgttagcagagcccaggcagccctgcagcccacatctagggtacaaacggaacggcggcgttttccttgtatcatttagaggaaatttttgagctgaacagtattttttttctccctctctctctctctgaaatattgctgagatttaaaggaggacgaagacaacagattcatagctgggtcttgctgttttcctgacgctgaccacagcggatctaggtggctatttcgttggtgcacaggcgttcacagaggcagagaggggagaaagttgtcaaacagattcacagactgtcaaagtgcggcttaaaccgagttcctgggctccctcactggcttcgtccacttaaacttttaacgtacacatgtagagagctgaaactccaggggtaacatgggacaggtcctcttgatttaatgaaaacagaagatcaactggaccgggtagcaagaaataaggcttaagaagcactgggttgggcctcaccctatgagcagggaacccaccttccccctcaacaaaagaaaagatgactttggaatgttctggattcccacagctgggaatgttcctacttttttttcagtttctctgcagaagacagcaagatgccccagggaatgtttgtgaaaaaggatgactggatgggaagcaagctgaagaaaaagaaggaaagaaagagagaaatcagtaaatcaccacacaagaggtggagaagaggacttataaatattgtttctatgacatttgaaaataaatgttttactccatgctaatagtgaatgtgatgtcttcagtttgaagggctttaagtgaagctcattaaaacccactattttccaaaaaaa

SEQ ID NO: 315249 - DNA, 215 bp, Homo sapiens
tgggaaaaaggagtgggtggaagcatagagaaatcaggcctttagggatataccagcaactctgatcctgaagaggatgttggaagttcagggttataggaaatcctataattctagctataaaagatggccttttcattgatacatatctgctgaatcctcagcctagggcccagcctcatcataggtagtttcagggtttcccttctttctgt

SEQ ID NO: 315250 - DNA, 836 bp, Homo sapiens
  misc_feature (795)..(795): n is a, c, g, or t
  misc_feature (810)..(810): n is a, c, g, or t
tacccactgggaatatgattatgcttaatctatgctcagtcgaaaggggctggggctgctttctcccctcccttcttgactctctgttcacagaactcaggctgcctccagccagcctttgcccgctagactcactggccctgagcacttgaaggtgcagcaagtcactgagaatgagcactttcttctcggacacagcatggatctgcctggctgtccccacagtactatgtgggacagtattttgcaaatacaagaagagctcagggcagctgtggagctggatggtctgcctggcaggcctctgtgcagtctgcctgctcatcctgtcccctttttggggcttgatcctcttctcggtgtcatgcttcctcatgtatacttacttatctggccaagaattgttacctgtggatcagaaggcagtcctggtgacaggtggtgattgcgggcttggccatgctttgtgcaagtatctggatgagctgggcttcacggtatttgccggagttttgaatgaaaatggcccaggagctgaggaattgcgaagaacctgctctccgcgcctctcggtgctccaaatggacatcacgaagccagtgcagatgactgtgggctgtgatcaacaatgctggggtgcttggctttccaactgatggggagcttcttcttatgactgactacaaacaatgcatggccgtgaacttctttggaactgtggaggtcacaaagacgtttttgcctcttcttagaaaatccaaagggaggctggtgaatgtcagcagcatgggagangggccccatggaggnggcatcttatggcttcgcggctgtgc

SEQ ID NO: 315251 - DNA, 1672 bp, Homo sapiens
tacccactgggaatatgattatgcttaatctatgctcagtcgaaaggggctggggctgctttctcccctcccttcttgactctctgttcacagaactcaggctgcctccagccagcctttgcccgctagactcactggccctgagcacttgaaggtgcagcaagtcactgagaatgagcactttcttctcggacacagcatggatctgcctggctgtccccacagtactatgtgggacagtattttgcaaatacaagaagagctcagggcagctgtggagctggatggtctgcctggcaggcctctgtgcagtctgcctgctcatcctgtcccctttttggggcttgatcctcttctcggtgtcatgcttcctcatgtatacttacttatctggccaagaattgttacctgtggatcagaaggcagtcctggtgacaggtggtgattgcgggcttggccatgctttgtgcaagtatctggatgagctgggcttcacggtatttgccggagttttgaatgaaaatggcccaggagctgaggaattgcgaagaacctgctctccgcgcctctcggtgctccaaatggacatcacgaagccagtgcagataaaagatgcttacagcaaggttgcagcaatgctgcaggacagaggactgtgggctgtgatcaacaatgctggggtgcttggctttccaactgatggggagcttcttcttatgactgactacaaacaatgcatggccgtgaacttctttggaactgtggaggtcacaaagacgtttttgcctcttcttagaaaatccaaagggaggctggtgaatgtcagcagcatgggaggaggggccccaatggaaaggctggcatcttatggctcatcaaaggcggctgtgaccatgttctcatcagttatgagactggagctttccaagtggggaattaaagttgcttccatccaacctggaggcttcctaacaaatatcgcaggcaccagtgacaagtgggaaaagctggagaaggacattctggaccacctccccgctgaggtacaggaagactacggccaggactacatcttagcacagcggaatttcctcctattgatcaactcgttagccagcaaggacttctctccggtgctgcgggacatccagcatgctatcttggcgaagagcccttttgcctattacacgccagggaaaggcgcttacttgtggatctgccttgctcactatttgcctattggcatatatgattactttgctaaaagacattttggccaagacaagcccatgcccagagctctaagaatgcctaactacaagaaaaaggccacctaggcaatggaagccctcaaagaagtcggaatgtcatagtcttgaaatgaaagggaaactgggaaactgggtttctcattaaagttgtttcccactctgtaaaaaaaaaaaaaaaaaaaaaaaaaaaaaattttgggggggcttgggccctggaaaggtttgagaaaacacatctggtggggcacgcggggagccccaagagaggaaaaggaaacgcggtgcccacagcgggggtctcatagaggaacaccgaggccagagacaagaggcaggggaacctctacaccaattaaagaaagcccggggggaaccagaagggtttgagaacaacccaaagg

SEQ ID NO: 315252 - DNA, 1393 bp, Homo sapiens
tacccactgggaatatgattatgcttaatctatgctcagtcgaaaggggctggggctgctttctcccctcccttcttgactctctgttcacagaactcaggctgcctccagccagcctttgcccgctagactcactggccctgagcacttgaaggtgcagcaagtcactgagaatgagcactttcttctcggacacagcatggatctgcctggctgtccccacagtactatgtgggacagtattttgcaaatacaagaagagctcagggcagctgtggagctggatggtctgcctggcaggcctctgtgcagtctgcctgctcatcctgtcccctttttggggcttgatcctcttctcggtgtcatgcttcctcatgtatacttacttatctggccaagaattgttacctgtggatcagaaggcagtcctggtgacaggtggtgattgcgggcttggccatgctttgtgcaagtatctggatgagctgggcttcacggtatttgccggagttttgaatgaaaatggcccaggagctgaggaattgcgaagaacctgctctccgcgcctctcggtgctccaaatggacatcacgaagccagtgcagataaaagatgcttacagcaaggttgcagcaatgctgcaggacagaggactgtgggctgtgatcaacaatgctggggtgcttggctttccaactgatggggagcttcttcttatgactgactacaaacaatgcatggccgtgaacttctttggaactgtggaggtcacaaagacgtttttgcctcttcttagaggggccccaatggaaaggctggcatcttatggctcatcaaaggcggctgtgaccatgttctcatcagttatgagactggagctttccaagtggggaattaaagttgcttccatccaacctggaggcttcctaacaaatatcgcaggcaccagtgacaagtgggaaaagctggagaaggacattctggaccacctccccgctgaggtacaggaagactacggccaggactacatcttagcacagcggaatttcctcctattgatcaactcgttagccagcaaggacttctctccggtgctgcgggacatccagcatgctatcttggcgaagagcccttttgcctattacacgccagggaaaggcgcttacttgtggatctgccttgctcactatttgcctattggcatatatgattactttgctaaaagacattttggccaagacaagcccatgcccagagctctaagaatgcctaactacaagaaaaaggccacctaggcaatggaagccctcaaagaagtcggaatgtcatagtcttgaaatgaaagggaaactgggaaactgggtttctcattaaagttgtttcccactctgta

SEQ ID NO: 315253 - DNA, 1062 bp, Homo sapiens
gaacaaaagaagccagccacaaagaggaccgatacctatttccatctatttaaaacaaaaatcaggtggtgattgcgggcttggccatgctttgtgcaagtatctggatgagctgggcttcacggtatttgccggagttttgaatgaaaatggcccaggagctgaggaattgcgaagaacctgctctccgcgcctctcggtgctccaaatggacatcacgaagccagtgcagataaaagatgcttacagcaaggttgcagcaatgctgcaggacagaggactgtgggctgtgatcaacaatgctggggtgcttggctttccaactgatggggagcttcttcttatgactgactacaaacaatgcatggccgtgaacttctttggaactgtggaggtcacaaagacgtttttgcctcttcttagaaaatccaaagggaggctggtgaatgtcagcagcatgggaggaggggccccaatggaaaggctggcatcttatggctcatcaaaggcggctgtgaccatgttctcatcagttatgagactggagctttccaagtggggaattaaagttgcttccatccaacctggaggcttcctaacaaatatcgcaggcaccagtgacaagtgggaaaagctggagaaggacattctggaccacctccccgctgaggtacaggaagactacggccaggactacatcttagcacagcggaatttcctcctattgatcaactcgttagccagcaaggacttctctccggtgctgcgggacatccagcatgctatcttggcgaagagcccttttgcctattacacgccagggaaaggcgcttacttgtggatctgccttgctcactatttgcctattggcatatatgattactttgctaaaagacattttggccaagacaagcccatgcccagagctctaagaatgcctaactacaagaaaaaggccacctaggcaatggaagccctcaaagaagtcggaatgtcatagtcttgaaatgaaagggaaactgggaaactgggtttctcattaaagttgtttcccactctgta

SEQ ID NO: 315254 - DNA, 1391 bp, Homo sapiens
tacccactgggaatatgattatgcttaatctatgctcagtcgaaaggggctggggctgctttctcccctcccttcttgactctctgttcacagaactcaggctgcctccagccagcctttgcccgctagactcactggccctgagcacttgaaggtgcagcaagtcactgagaatgagcactttcttctcggacacagcatggatctgcctggctgtccccacagtactatgtgggacagtattttgcaaatacaagaagagctcagggcagctgtggagctggatggtctgcctggcaggcctctgtgcagtctgcctgctcatcctgtcccctttttggggcttgatcctcttctcggtgtcatgcttcctcatgtatacttacttatctggccaagaattgttacctgtggatcagaaggcagtcctggtgacaggtggtgattgcgggcttggccatgctttgtgcaagtatctggatgagctgggcttcacggtatttgccggagttttgaatgaaaatggcccaggagctgaggaattgcgaagaacctgctctccgcgcctctcggtgctccaaatggacatcacgaagccagtgcagatgactgtgggctgtgatcaacaatgctggggtgcttggctttccaactgatggggagcttcttcttatgactgactacaaacaatgcatggccgtgaacttctttggaactgtggaggtcacaaagacgtttttgcctcttcttagaaaatccaaagggaggctggtgaatgtcagcagcatgggaggaggggccccaatggaaaggctggcatcttatggctcatcaaaggcggctgtgaccatgttctcatcagttatgagactggagctttccaagtggggaattaaagttgcttccatccaacctggaggcttcctaacaaatatcgcaggcaccagtgacaagtgggaaaagctggagaaggacattctggaccacctccccgctgaggtacaggaagactacggccaggactacatcttagcacagcggaatttcctcctattgatcaactcgttagccagcaaggacttctctccggtgctgcgggacatccagcatgctatcttggcgaagagcccttttgcctattacacgccagggaaaggcgcttacttgtggatctgccttgctcactatttgcctattggcatatatgattactttgctaaaagacattttggccaagacaagcccatgcccagagctctaagaatgcctaactacaagaaaaaggccacctaggcaatggaagccctcaaagaagtcggaatgtcatagtcttgaaatgaaagggaaactgggaaactgggtttctcattaaagttgtttcccactctgta

SEQ ID NO: 315255 - DNA, 1383 bp, Homo sapiens
tacccactgggaatatgattatgcttaatctatgctcagtcgaaaggggctggggctgctttctcccctcccttcttgactctctgttcacagaactcaggctgcctccagccagcctttgcccgctagactcactggccctgagcacttgaaggtgcagcaagtcactgagaatgagcactttcttctcggacacagcatggatctgcctggctgtccccacagtactatgtgggacagtattttgcaaatacaagaagagctcagggcagctgtggagctggatggtctgcctggcaggcctctgtgcagtctgcctgctcatcctgtcccctttttggggcttgatcctcttctcggtgtcatgcttcctcatgtatacttacttatctggccaagaattgttacctgtggatcagaaggcagtcctggtgacaggtggtgattgcgggcttggccatgctttgtgcaagtatctggatgagctgggcttcacggtatttgccggagttttgaatcggtgctccaaatggacatcacgaagccagtgcagataaaagatgcttacagcaaggttgcagcaatgctgcaggacagaggactgtgggctgtgatcaacaatgctggggtgcttggctttccaactgatggggagcttcttcttatgactgactacaaacaatgcatggccgtgaacttctttggaactgtggaggtcacaaagacgtttttgcctcttcttagaaaatccaaagggaggctggtgaatgtcagcagcatgggaggaggggccccaatggaaaggctggcatcttatggctcatcaaaggcggctgtgaccatgttctcatcagttatgagactggagctttccaagtggggaattaaagttgcttccatccaacctggaggcttcctaacaaatatcgcaggcaccagtgacaagtgggaaaagctggagaaggacattctggaccacctccccgctgaggtacaggaagactacggccaggactacatcttagcacagcggaatttcctcctattgatcaactcgttagccagcaaggacttctctccggtgctgcgggacatccagcatgctatcttggcgaagagcccttttgcctattacacgccagggaaaggcgcttacttgtggatctgccttgctcactatttgcctattggcatatatgattactttgctaaaagacattttggccaagacaagcccatgcccagagctctaagaatgcctaactacaagaaaaaggccacctaggcaatggaagccctcaaagaagtcggaatgtcatagtcttgaaatgaaagggaaactgggaaactgggtttctcattaaagttgtttcccactctgta

SEQ ID NO: 315256 - DNA, 1018 bp, Homo sapiens
gaacaaaagaagccagccacaaagaggaccgatacctatttccatctatttaaaacaaaaatcaggtggtgattgcgggcttggccatgctttgtgcaagtatctggatgagctgggcttcacggtatttgccggagttttgaatgaaaatggcccaggagctgaggaattgcgaagaacctgctctccgcgcctctcggtgctccaaatggacatcacgaagccagtgcagatgactgtgggctgtgatcaacaatgctggggtgcttggctttccaactgatggggagcttcttcttatgactgactacaaacaatgcatggccgtgaacttctttggaactgtggaggtcacaaagacgtttttgcctcttcttagaaaatccaaagggaggctggtgaatgtcagcagcatgggaggaggggccccaatggaaaggctggcatcttatggctcatcaaaggcggctgtgaccatgttctcatcagttatgagactggagctttccaagtggggaattaaagttgcttccatccaacctggaggcttcctaacaaatatcgcaggcaccagtgacaagtgggaaaagctggagaaggacattctggaccacctccccgctgaggtacaggaagactacggccaggactacatcttagcacagcggaatttcctcctattgatcaactcgttagccagcaaggacttctctccggtgctgcgggacatccagcatgctatcttggcgaagagcccttttgcctattacacgccagggaaaggcgcttacttgtggatctgccttgctcactatttgcctattggcatatatgattactttgctaaaagacattttggccaagacaagcccatgcccagagctctaagaatgcctaactacaagaaaaaggccacctaggcaatggaagccctcaaagaagtcggaatgtcatagtcttgaaatgaaagggaaactgggaaactgggtttctcattaaagttgtttcccactctgta

SEQ ID NO: 315257 - DNA, 298 bp, Homo sapiens
caacagagacaagcgcctgctccctgacttccttggccttcccaggatctgactcttccctttcctttcaccccagatatcgcaggcaccagtgacaagtgggaaaagctggagaaggacattctggaccacctccccgctgaggtacaggaagactacggccaggactacatcttagcacagcggaatttcctcctattgatcaactcgttagccagcaaggacttctctccggtgctgcgggacatccagcatgctatcttggcgaagagcccttttgcctattacacgccaggga

SEQ ID NO: 315258 - DNA, 1435 bp, Homo sapiens
tacccactgggaatatgattatgcttaatctatgctcagtcgaaaggggctggggctgctttctcccctcccttcttgactctctgttcacagaactcaggctgcctccagccagcctttgcccgctagactcactggccctgagcacttgaaggtgcagcaagtcactgagaatgagcactttcttctcggacacagcatggatctgcctggctgtccccacagtactatgtgggacagtattttgcaaatacaagaagagctcagggcagctgtggagctggatggtctgcctggcaggcctctgtgcagtctgcctgctcatcctgtcccctttttggggcttgatcctcttctcggtgtcatgcttcctcatgtatacttacttatctggccaagaattgttacctgtggatcagaaggcagtcctggtgacaggtggtgattgcgggcttggccatgctttgtgcaagtatctggatgagctgggcttcacggtatttgccggagttttgaatgaaaatggcccaggagctgaggaattgcgaagaacctgctctccgcgcctctcggtgctccaaatggacatcacgaagccagtgcagataaaagatgcttacagcaaggttgcagcaatgctgcaggacagaggactgtgggctgtgatcaacaatgctggggtgcttggctttccaactgatggggagcttcttcttatgactgactacaaacaatgcatggccgtgaacttctttggaactgtggaggtcacaaagacgtttttgcctcttcttagaaaatccaaagggaggctggtgaatgtcagcagcatgggaggaggggccccaatggaaaggctggcatcttatggctcatcaaaggcggctgtgaccatgttctcatcagttatgagactggagctttccaagtggggaattaaagttgcttccatccaacctggaggcttcctaacaaatatcgcaggcaccagtgacaagtgggaaaagctggagaaggacattctggaccacctccccgctgaggtacaggaagactacggccaggactacatcttagcacagcggaatttcctcctattgatcaactcgttagccagcaaggacttctctccggtgctgcgggacatccagcatgctatcttggcgaagagcccttttgcctattacacgccagggaaaggcgcttacttgtggatctgccttgctcactatttgcctattggcatatatgattactttgctaaaagacattttggccaagacaagcccatgcccagagctctaagaatgcctaactacaagaaaaaggccacctaggcaatggaagccctcaaagaagtcggaatgtcatagtcttgaaatgaaagggaaactgggaaactgggtttctcattaaagttgtttcccactctgta

SEQ ID NO: 315259 - DNA, 1121 bp, Homo sapiens
cgcaatcaccacatgtcaccaggactgcctttgatcctcttctcggtgtcatgcttcctcatgtatacttacttatctggccaagaattgttacctgtggatcagaaggcagtcctggtgacaggtggtgattgcgggcttggccatgctttgtgcaagtatctggatgagctgggcttcacggtatttgccggagttttgaatgaaaatggcccaggagctgaggaattgcgaagaacctgctctccgcgcctctcggtgctccaaatggacatcacgaagccagtgcagataaaagatgcttacagcaaggttgcagcaatgctgcaggacagaggactgtgggctgtgatcaacaatgctggggtgcttggctttccaactgatggggagcttcttcttatgactgactacaaacaatgcatggccgtgaacttctttggaactgtggaggtcacaaagacgtttttgcctcttcttagaaaatccaaagggaggctggtgaatgtcagcagcatgggaggaggggccccaatggaaaggctggcatcttatggctcatcaaaggcggctgtgaccatgttctcatcagttatgagactggagctttccaagtggggaattaaagttgcttccatccaacctggaggcttcctaacaaatatcgcaggcaccagtgacaagtgggaaaagctggagaaggacattctggaccacctccccgctgaggtacaggaagactacggccaggactacatcttagcacagcggaatttcctcctattgatcaactcgttagccagcaaggacttctctccggtgctgcgggacatccagcatgctatcttggcgaagagcccttttgcctattacacgccagggaaaggcgcttacttgtggatctgccttgctcactatttgcctattggcatatatgattactttgctaaaagacattttggccaagacaagcccatgcccagagctctaagaatgcctaactacaagaaaaaggccacctaggcaatggaagccctcaaagaagtcggaatgtcatagtcttgaaatgaaagggaaactgggaaactgggtttctcattaaagttgtttcccactctgta

SEQ ID NO: 315260 - DNA, 1450 bp, Homo sapiens
tacccactgggaatatgattatgcttaatctatgctcagtcgaaaggggctggggctgctttctcccctcccttcttgactctctgttcacagaactcaggctgcctccagccagcctttgcccgctagactcactggccctgagcacttgaaggtgcagcaagtcactgagaatgagcactttcttctcggacacagcatggatctgcctggctgtccccacagtactatgtgggacagtattttgcaaatacaagaagagctcagggcagctgtggagctggatggtctgcctggcaggcctctgtgcagtctgcctgctcatcctgtcccctttttggggcttgatcctcttctcggtgtcatgcttcctcatgtatacttacttatctggccaagaattgttacctgtggatcagaaggcagtcctggtgacaggtggtgattgcgggcttggccatgctttgtgcaagtatctggatgagctgggcttcacggtatttgccggagttttgaatgaaaatggcccaggagctgaggaattgcgaagaacctgctctccgcgcctctcggtgctccaaatggacatcacgaagccagtgcagataaaagatgcttacagcaaggttgcagcaatgctgcaggacagaggactgtgggctgtgatcaacaatgctggggtgcttggctttccaactgatggggagcttcttcttatgactgactacaaacaatgcatggccgtgaacttctttggaactgtggaggtcacaaagacgtttttgcctcttcttagttgaatagtggaccttcctccccacaaaaagatatgtttaccaggaacctcagaaggaggggccccaatggaaaggctggcatcttatggctcatcaaaggcggctgtgaccatgttctcatcagttatgagactggagctttccaagtggggaattaaagttgcttccatccaacctggaggcttcctaacaaatatcgcaggcaccagtgacaagtgggaaaagctggagaaggacattctggaccacctccccgctgaggtacaggaagactacggccaggactacatcttagcacagcggaatttcctcctattgatcaactcgttagccagcaaggacttctctccggtgctgcgggacatccagcatgctatcttggcgaagagcccttttgcctattacacgccagggaaaggcgcttacttgtggatctgccttgctcactatttgcctattggcatatatgattactttgctaaaagacattttggccaagacaagcccatgcccagagctctaagaatgcctaactacaagaaaaaggccacctaggcaatggaagccctcaaagaagtcggaatgtcatagtcttgaaatgaaagggaaactgggaaactgggtttctcattaaagttgtttcccactctgta

SEQ ID NO: 315261 - DNA, 1068 bp, Homo sapiens
gtgtctatacccgatatgacacgcgtcgccagaatgttacctgtggatcagaaggcagtcctggtgacagtgtggtgattgcgggcttggccatgctttgtgcaagtatctggatgagctgggcttcacggtatttgccggagttttgaatgaaaatggcccaggagctgaggaattgcgaagaacctgctctccgcgcctctcggtgctccaaatggacatcacgaagccagtgcagataaaagatgcttacagcaaggttgcagcaatgctgcaggacagaggactgtgggctgtgatcaacaatgctggggtgcttggctttccaactgatggggagcttcttcttatgactgactacaaacaatgcatggccgtgaacttctttggaactgtggaggtcacaaagacgtttttgcctcttcttagaaaatccaaagggaggctggtgaatgtcagcagcatgggaggaggggccccaatggaaaggctggcatcttatggctcatcaaaggcggctgtgaccatgttctcatcagttatgagactggagctttccaagtggggaattaaagttgcttccatccaacctggaggcttcctaacaaatatcgcaggcaccagtgacaagtgggaaaagctggagaaggacattctggaccacctccccgctgaggtacaggaagactacggccaggactacatcttagcacagcggaatttcctcctattgatcaactcgttagccagcaaggacttctctccggtgctgcgggacatccagcatgctatcttggcgaagagcccttttgcctattacacgccagggaaaggcgcttacttgtggatctgccttgctcactatttgcctattggcatatatgattactttgctaaaagacattttggccaagacaagcccatgcccagagctctaagaatgcctaactacaagaaaaaggccacctaggcaatggaagccctcaaagaagtcggaatgtcatagtcttgaaatgaaagggaaactgggaaactgggtttctcattaaagttgtttcccactctgta

SEQ ID NO: 315262 - DNA, 1077 bp, Homo sapiens
gaacaaaagaagccagccacaaagaggaccgatacctatttccatctatttaaaacaaaaatcaggtggtgattgcgggcttggccatgctttgtgcaagtatctggatgagctgggcttcacggtatttgccggagttttgaatgaaaatggcccaggagctgaggaattgcgaagaacctgctctccgcgcctctcggtgctccaaatggacatcacgaagccagtgcagataaaagatgcttacagcaaggttgcagcaatgctgcaggacagaggactgtgggctgtgatcaacaatgctggggtgcttggctttccaactgatggggagcttcttcttatgactgactacaaacaatgcatggccgtgaacttctttggaactgtggaggtcacaaagacgtttttgcctcttcttagttgaatagtggaccttcctccccacaaaaagatatgtttaccaggaacctcagaaggaggggccccaatggaaaggctggcatcttatggctcatcaaaggcggctgtgaccatgttctcatcagttatgagactggagctttccaagtggggaattaaagttgcttccatccaacctggaggcttcctaacaaatatcgcaggcaccagtgacaagtgggaaaagctggagaaggacattctggaccacctccccgctgaggtacaggaagactacggccaggactacatcttagcacagcggaatttcctcctattgatcaactcgttagccagcaaggacttctctccggtgctgcgggacatccagcatgctatcttggcgaagagcccttttgcctattacacgccagggaaaggcgcttacttgtggatctgccttgctcactatttgcctattggcatatatgattactttgctaaaagacattttggccaagacaagcccatgcccagagctctaagaatgcctaactacaagaaaaaggccacctaggcaatggaagccctcaaagaagtcggaatgtcatagtcttgaaatgaaagggaaactgggaaactgggtttctcattaaagttgtttcccactctgta

SEQ ID NO: 315263 - DNA, 6392 bp, Homo sapiens
  misc_feature (538)..(538): n is a, c, g, or t
  misc_feature (545)..(546): n is a, c, g, or t
  misc_feature (742)..(742): n is a, c, g, or t
  misc_feature (1159)..(1159): n is a, c, g, or t
caggggcgcagctgctgggcgtgcatccgaaaggtgagagccagagagcgagcagagggggcgggcaggccacgaaaatgtcctcggccgtggggccccgcggtcctcgcccacccacggtgcctccccccatgcaagagctgcccgacctgagccacctgaccgaagaggagaggaacattatcatggcagtgatggaccggcagaaggaagaggaggaaaaagaagaagccatgctcaagtgtgttgtcagggacatggcgaagcctgctgcctgcaaaacaccaagaaatgctgaaaaccagccccaccaaccttcaccgagattgcatcaacagtttgaaagctataaggaacaagtgagaaaaataggggaagaagcgcggcgttaccagggcgagcacaaagacgatgctccgacttgtggaatctgtcataaaacaaagtttgctgatgggtgcggtcatctctgctcctattgtcgcactaagttctgtgcgcgctgcggaggccgcgtgtctctacggtcaaacaacgngacaaannggttatgtgggtatgcaatttatgtcgaaagcaacaagaaatcttaaccaaatctggggcatggttctttggaagtggccctcagcagacaagtcaggatggaaccctgagtgatacagctacaggtgctggctctgaggtaccaagagaaaagaaagcacgactccaagagcgatcgcggtctcagacacccctnagcacagcagctgcctcctcccaggatgctgctcctcccagcgcaccaccagacaggagcaaaggggctgagccctcgcagcaagccttggggcctgaacagaagcaggcttcatccaggtctagaagtgaacctcctagagagagaaagaagaccccagggctttccgagcagaatggcaaaggagccctgaagagcgagcggaaacgcgtgccaaagacctcagcgcagcccgtggagggggccgtcgaagaacgggagcgcaaagaaaggcgggaaagccgaaggcttgagaaagggcgatcacaggattacccagacacgccggaaaaacgggatgagggcaaagcggcggatgaggaaaagcaaagaaaagaggaggattatcagaccaggtaccgcagcgacccgaacctngctcggtacccggtgaaaccgccgcctgaggagcagcagatgcgcatgcacgcccgggtgtcccgcgccaggcacgagcggcgccacagcgacgtggcgctcccgcgcaccgaggcgggcgcggcgctgccggagggcaaggccggcaaacgcgcgccggcggcagccagggcctcgccgccggactcgccgcgggcttactcggctgagagaactgcggagaccagggcgccgggcgccaagcagctaacgaaccacagcccgccggcgcccagacatgggccggttcccgcagaagccccggagctcaaagcccaggagcccctcaggaagcagagccgcctggaccccagctcggcggtcctcatgctgcggaacgactctttgagctcagaccagtccgagtcggtgcggccgtccccgcccaagccgcaccggtccaagagaggcggcaagaagcggcagatgtcggtgagcagctctgaggaggagggcgtgtcgacgcccgagtacaccagctgcgaggacgtggagctggagagcgagagcgtcagcgagaaaggtgatttggattattactggttggatcctgccacgtggcacagccgggagacatcacctattagttcgcatcctgtaacgtggcaaccatctaaagagggggaccgattaattggacgtgttattcttaacaagagaacaaccatgcccaaagactcaggtgcattgctgggtctgaaagttgttggaggaaaaatgactgacttaggacgacttggtgctttcatcaccaaagtaaagaagggtagcctagcagatgtagttggacacctaagagcaggggatgaagttctagaatggaatggtaaacccctgccgggagctacaaatgaagaagtttacaacattattttagaatcaaaatcagaacctcaagttgaaattattgtttcaaggcctattggtgacattccccggattcctgagagctcccaccctccactggagtccagttcaagttcctttgaatctcagaagatggaaaggccttccatttctgttatttctccaacaagtcctggagctctaaaagatgccccacaagtcttaccagggcaactttctgtgaagttgtggtatgataaagtgggacaccagctgattgtaaatgttctgcaagcaacagatctacctgctagagtagatggacgtcctcgaaatccctatgtaaaaatgtattttcttccagatagaagtgataaaagtaaaaggaggaccaaaacagtaaagaaaatactagaaccaaaatggaatcaaacttttgtctattcacatgtacatcgtagagattttagagaacgaatgttagaaataactgtgtgggaccaaccaagagtgcaagaagaagaaagtgaatttcttggagagatcctcatagaattggagacagcgcttttagatgatgaaccgcattggtataaacttcagacacatgatgagtcttcactacctctgcctcagccatcacctttcatgccaaggcgacatattcatggagaaagctctagcaaaaagctacaaagatctcagcgaatcagtgatagtgacatctcagattatgaggttgatgatggtattggcgtagttcctccagtaggctataggtctagtgctagagaaagtaaatctacaacattaactgtgccagaacagcaaagaacaactcatcaccgctcacgttcagtatctcctcatcgcggcaatgatcagggaaagccgcgttcacgtttaccaaatgtgccattacagaggagtttagatgaaattcatccaacaagaaggtcacgttctccaaccagacaccatgatgcctcccgaagtccagttgatcatagaaccagagatgtggatagtcagtatttatcagaacaagacagtgagcttcttatgctgcccagagcaaaacgaggacgaagtgcagaatgcctacatactaccaggtaaatacagggatttggtaatggtgactgtgtgtgatgactctctttccattctattattcttccgtctctcccttagtggtattattacaagcaagtcaaataaatttcccaagtatttgaaatttgttttgttttatattgaggttatggaaaaggttccaaatatatttcagttccgattcaggctgactgctttgccatctgtagattcaaaaatccagagactagtgggcctctctgggactgtttgcgttcctaaaactgaggaaccagtttctgcaattaaaattctaaatgctcactgtgagtgcccccaactttcccacacatattcctgtctagtcacaagaggtctaatctgtgtatggcagtgtcattgtttcataattgtaagtttgctctgttttagccttttttaatttccttttagaatttattgttgtttatattctgtttgcttttgataaaatctttaacagttcacttttaatggctgagcttcagcttctttcttgatgaaaagtgaagatattcaacctgatcttaactatcctagcccaccagttgtcagaaatgctgcagtacaaactttcccacaaaggcatataacagtatgaatgcctctttagaagcgacaaaagatataatttttgcttctaaattggagcttagagcctgatgctttatgttaatctcattacatctttaatttcatatccaagtaaaacttcttacagattactcatggaacatattctataaatacttaatgtatatttgaaatgaatatagaagttaaggaagtagtaagtcagtgaaacaaactaacacaaaataatcgaactcaaatattttagccaataaaaagcaagaggaaagagaaagaaagaggtattaccgcagtacttgggatgcaaagacaaatgcatgatttattatgtctgtgtgtaatatgtagttctgcccaataatgcaaacaaaattgggctaataaaaattgtttgaactttttacagtctgaagttatactactcataactactgccatgtttgcttggagtgccacaggaaaaaatcgaggaaatattagttctgcttgctgagaaaaaaatgtaaaatcatgcatattgtaaaaacctactgaaggtcaaagcatgaactatccaggtttattattacttgttcttgacaaacagtttcttaaaataatggtttatttactaattctgaaagttttctcacactcctcttgatgtgactaaagcttcaaaagaaataaaaaacatgcacacaaaacaaacacaaaaaaaatccttatattttaagctacttagtgtgtgcctggcactcagtgtgtgaatatttctaggatactcacaccagtggtctaaatataataactaaaaatatttttctttcccttattttgtacttgtaaaatattatatacttatataatattatataatagttgcatcattttatataatcttatacttaagattggtgctttgctaataattctgagctccacaagtcctatttaatagtctctgtatgttgactttgcatttcctgatttaagcaaataatcatatttgtatgtatacaatttaaaaataaatgagtattcagcgaggcagataacatcctgtggacaggtactacgacaataagatagggagtggaaggaagctgagctagccaaatgtgtcagtgcgaaacatatgtcaccagtgtcttttctccttcctgtctttcattctctaatgtgtaatgctaaaagtatggagatagagacaacatgagttcaaaaatacgtgcatgtatgtatatataatctcttctgtgtttatattcatgtatttataaaaacattaatttatatctgtataaaaatgaatgtcaaaatgtgtacatataaataaccacaactttatatggatatatcaataatatagtttggtttcatataaactatggacacttattatttctataactatccatggctaaaatctaaagctttcaaaatacatcataccatgttcacttaggacttataaaaataaaatctgaggatttactagtctctagtaaacataaggaaaataacatttatttaataacaagcacagtgttaaatatttaatgtactttgtcaatttcctgacaataattatatgttatgaatattattatcctgattttagagatgaggaaaaaagctacgaaagtttattttacgactaatagagtaaggattcaaaatcagatctatttgatatcttctgtttaactagtttttccaaaaatatgaaaacttgtcctatgagatgtttcaccaataagagtttttgtgagtcaaatacattttggaaactttgcaactgaaagtgtctaccttgaaatttaatacacacagcatattaaagtcatgttctaaagaaatctgtatgtttagtttcttttctcccaaattgtttaatttcccaacctttttttagtaaaacgtgtctcgaggaagtggtagtatagagaaaatgctatagttgccttactgtatcctactgtgtcctaaatattgtgtacatgttaccacacacccctgttaagtggaagttatttcccacattttgtggatgtagaaacaggcttggagacttaatcgaattacccaggtcacagccaataagtggcaaagccaaggcaggaacttgaacattcagactataaattttgtgctattttctagctgtttcccattctatgttgatcccattcttgaaaaaaaaatcacttttgaagcaatgcttagaaaagttttatagcaacctattactaaagatatttgcctgaggttaggagttgaaaagaagagtcgactgtctagaaaggaggctaaatccttagtttcagtaaaatttgtcctcaacttgtacttaataaggaggaagctgaagcgggcagatcacttgaggtcaggagtttgagaccagtgtggccaacatggtgaaaccccgtctctactaaaacacacacacacacacacacacacacacacacacacaaattaggtgggcatggtggcaggtgcttgtaatcccagctacttgggaggctgagagaggagatttgcttgaacccaggaggcagaggttgcagtgagccaagatcacaccattgcactccagcctagataacaagagtgagactctgtctcaaaaaag

SEQ ID NO: 315264 - DNA, 6043 bp, Homo sapiens
  misc_feature (538)..(538): n is a, c, g, or t
  misc_feature (545)..(546): n is a, c, g, or t
  misc_feature (742)..(742): n is a, c, g, or t
  misc_feature (1159)..(1159): n is a, c, g, or t
caggggcgcagctgctgggcgtgcatccgaaaggtgagagccagagagcgagcagagggggcgggcaggccacgaaaatgtcctcggccgtggggccccgcggtcctcgcccacccacggtgcctccccccatgcaagagctgcccgacctgagccacctgaccgaagaggagaggaacattatcatggcagtgatggaccggcagaaggaagaggaggaaaaagaagaagccatgctcaagtgtgttgtcagggacatggcgaagcctgctgcctgcaaaacaccaagaaatgctgaaaaccagccccaccaaccttcaccgagattgcatcaacagtttgaaagctataaggaacaagtgagaaaaataggggaagaagcgcggcgttaccagggcgagcacaaagacgatgctccgacttgtggaatctgtcataaaacaaagtttgctgatgggtgcggtcatctctgctcctattgtcgcactaagttctgtgcgcgctgcggaggccgcgtgtctctacggtcaaacaacgngacaaannggttatgtgggtatgcaatttatgtcgaaagcaacaagaaatcttaaccaaatctggggcatggttctttggaagtggccctcagcagacaagtcaggatggaaccctgagtgatacagctacaggtgctggctctgaggtaccaagagaaaagaaagcacgactccaagagcgatcgcggtctcagacacccctnagcacagcagctgcctcctcccaggatgctgctcctcccagcgcaccaccagacaggagcaaaggggctgagccctcgcagcaagccttggggcctgaacagaagcaggcttcatccaggtctagaagtgaacctcctagagagagaaagaagaccccagggctttccgagcagaatggcaaaggagccctgaagagcgagcggaaacgcgtgccaaagacctcagcgcagcccgtggagggggccgtcgaagaacgggagcgcaaagaaaggcgggaaagccgaaggcttgagaaagggcgatcacaggattacccagacacgccggaaaaacgggatgagggcaaagcggcggatgaggaaaagcaaagaaaagaggaggattatcagaccaggtaccgcagcgacccgaacctngctcggtacccggtgaaaccgccgcctgaggagcagcagatgcgcatgcacgcccgggtgtcccgcgccaggcacgagcggcgccacagcgacgtggcgctcccgcgcaccgaggcgggcgcggcgctgccggagggcaaggccggcaaacgcgcgccggcggcagccagggcctcgccgccggactcgccgcgggcttactcggctgagagaactgcggagaccagggcgccgggcgccaagcagctaacgaaccacagcccgccggcgcccagacatgggccggttcccgcagaagccccggagctcaaagcccaggagcccctcaggaagcagagccgcctggaccccagctcggcggtcctcatgctgcggaacgactctttgagctcagaccagtccgagtcggtgcggccgtccccgcccaagccgcaccggtccaagagaggcggcaagaagcggcagatgtcggtgagcagctctgaggaggagggcgtgtcgacgcccgagtacaccagctgcgaggacgtggagctggagagcgagagcgtcagcgagaaaggtgatttggattattactggttggatcctgccacgtggcacagccgggagacatcacctattagttcgcatcctgtaacgtggcaaccatctaaagagggggaccgattaattggacgtgttattcttaacaagagaacaaccatgcccaaagactcaggtgcattgctgggtctgaaagttgttggaggaaaaatgactgacttaggacgacttggtgctttcatcaccaaagtaaagaagggtagcctagcagatgtagttggacacctaagagcaggggatgaagttctagaatggaatggtaaacccctgccgggagctacaaatgaagaagtttacaacattattttagaatcaaaatcagaacctcaagttgaaattattgtttcaaggcctattggtgacattccccggattcctgagagctcccaccctccactggagtccagttcaagttcctttgaatctcagaagatggaaaggccttccatttctgttatttctccaacaagtcctggagctctaaaagatgccccacaagtcttaccagggcaactttctgtgaagttgtggtatgataaagtgggacaccagctgattgtaaatgttctgcaagcaacagatctacctgctagagtagatggacgtcctcgaaatccctatgtaaaaatgtattttcttccagatagaagtgataaaagtaaaaggaggaccaaaacagtaaagaaaatactagaaccaaaatggaatcaaacttttgtctattcacatgtacatcgtagagattttagagaacgaatgttagaaataactgtgtgggaccaaccaagagtgcaagaagaagaaagtgaatttcttggagagatcctcatagaattggagacagcgcttttagatgatgaaccgcattggtataaacttcagacacatgatgagtcttcactacctctgcctcagccatcacctttcatgccaaggcgacatattcatggagaaagctctagcaaaaagctacaaagatctcagcgaatcagtgatagtgacatctcagattatgaggttgatgatggtattggcgtagttcctccagtaggctataggtctagtgctagagaaagtaaatctacaacattaactgtgccagaacagcaaagaacaactcatcaccgctcacgttcagtatctcctcatcgcggcaatgatcagggaaagccgcgttcacgtttaccaaatgtgccattacagaggagtttagatgaaattcatccaacaagaaggtcacgttctccaaccagacaccatgatgcctcccgaagtccagttgatcatagaaccagagatgtggatagtcagtatttatcagaacaagacagtgagcttcttatgctgcccagagcaaaacgaggacgaagtgcagaatgcctacatactaccagtgaactgcagccctttcttgacagggctaggagtgctagtaccaactgcttgagaccagatactagtttgcattcaccagaacgagaaagaatgcaccgacagagaagtccaacacaatctcctccagcagacacatcgttcagcagtcgcaggggaagacagctcccacaagtgccagtgagaagcggcagtatagaacaagcaagcttagtagtggaggagcgaacaagacagatgaaaatgaaagtgcatcgatttaagcagacaacagggtctggttctagtcaagaacttgatcgcgagcaatattccaagtataacatacataaagatcagtacagaagctgtgataacgtctctgccaaatcatcagatagtgatgtcagtgatgtttccgccatttcccgaaccagcagtgcctcacgcctcagcagcacaagctttatgtcagagcaatctgagcgccccaggggtagaatcagttcatttacccccaaaatgcaaggcagacggatggggacttcaggaagatccatcatgaagagcaccagtgtcagtggagagatgtacacactggagcataatgacggcagccagtcagacacagctgtgggtacagttggagcaggtggaaagaaacggagatccagccttagtgccaaagtggttgccatagtgtctcgaaggagtagaagcacatcccagcttagtcaaacagagtcgggccacaaaaagttaaaaagtaccatccagagaagcacagaaacaggcatggcagctgaaatgagaaagatggtaaggcagccgagccgagagtctactgatggcagcatcaacagttacagctctgagggcaatttaatatttcctggagtgcgactgggagctgacagtcaattcagtgattttcttgatggattgggaccagcccagcttgttggccgccaaacccttgccacccctgcaatgggtgatatacaaataggaatggaggacaaaaagggccaattagaagtggaagtcattagagcacgaagcctcacacaaaagcctggttccaaatctacacctgctccatatgtcaaagtatatcttttggaaaatggggcctgtatagccaagaagaagacaagaattgcacgaaaaacccttgatcctttgtatcagcagtctctggtttttgatgaaagtccacagggtaaagttcttcaggtgattgtctggggagactatggcagaatggaccacaaatgctttatgggtgtggctcagatcttgttggaagaactcgacctgtccagcatggtgatcggatggtacaaattgttcccaccgtcctcactggtggatcccacactcactcccctcacccggcgggcttcccagtcatctctggaaagttcaactgggcctccctgtattcgatcatagtgaactcataccagagtcattccaataaaactctacttttcaggataataatctgaaccagatatttcatgatcgaaagcattgttggagacagacaatcaacttgtgttttgcctgtagtagtttttcaataatatgtcccaattgttatttaaaacatggcttcatatgacagaacaaggcaatctatcaaatttacaggaagaatcaacatgctggtgagagtcactgatgcttctaacaaatagaaaaagaggaaactttaaatccacgcatacacgtacacacacacatgcacacacacacacaccaaattgaacaaactggaaactctcactctgtgaaaagttgtattctacacatttctgcacagaccacaagcagtgttatttccctgatgtttgagttgttttgttcttttgtgtgttttgtttatttgtgtgttgtttgttggttttcgtttcttgagtttttgttttgttttcaccacatctgttatttccactagtttttttttggctgtgtcatgacaggcctcatgatgctaacagagattcttcccttcttttttccaaaagcaccaaaaaaaagggctgaagtagtctctgtaggcatctccccaaagtgttaaacagctacataaggtgaagccaaggaagggtttcactagctttcattttataattatttaaagtcttatgtgtggatacccaagagacaaaaagttatcttccaaaataaataatcacagaagtacttttttaatgaagagcctatctgtttgcattctagaaaattaatttatggtttccattgttttgcatggaagacttttaaagaagtcaatctgcaactaatgctggggactaaaactaactgcataattgtactttgaaaacactccttgtaatgcctttttcttcctgatattaaaaaaatgctcatgtgtataaaccatactttgacttcccaaaaatggtgactaggaatggatttgagcctaagacactttgagctatgcccaggcttctcagccatacctcagtgtagacacatccatctgccctggaaagagcatggtatgagctgttcaatattccactggaaattccagttgaaatattctgcactaaactattgtttttattgaattttagtttacatttctttgagattgatgcaagcacaaagcttgattttttaatgcaaagtatcttactttttggggggaaaataaacaaaatgaactttcaatttgcattttcatttagtttctcttggccttgaatttcccttgtgacattctgtacatgtgctacaaactgcagtctctgcaggtgcattgatatgttctccctccttttatgagtcactccacttttgtgattacacaaatagagcagcatgacttggaactgttcagagctgcatgcacattttgtaaaaaaaaaa

SEQ ID NO: 315265 - DNA, 5926 bp, Homo sapiens
  misc_feature (538)..(538): n is a, c, g, or t
  misc_feature (545)..(546): n is a, c, g, or t
  misc_feature (742)..(742): n is a, c, g, or t
  misc_feature (1159)..(1159): n is a, c, g, or t
caggggcgcagctgctgggcgtgcatccgaaaggtgagagccagagagcgagcagagggggcgggcaggccacgaaaatgtcctcggccgtggggccccgcggtcctcgcccacccacggtgcctccccccatgcaagagctgcccgacctgagccacctgaccgaagaggagaggaacattatcatggcagtgatggaccggcagaaggaagaggaggaaaaagaagaagccatgctcaagtgtgttgtcagggacatggcgaagcctgctgcctgcaaaacaccaagaaatgctgaaaaccagccccaccaaccttcaccgagattgcatcaacagtttgaaagctataaggaacaagtgagaaaaataggggaagaagcgcggcgttaccagggcgagcacaaagacgatgctccgacttgtggaatctgtcataaaacaaagtttgctgatgggtgcggtcatctctgctcctattgtcgcactaagttctgtgcgcgctgcggaggccgcgtgtctctacggtcaaacaacgngacaaannggttatgtgggtatgcaatttatgtcgaaagcaacaagaaatcttaaccaaatctggggcatggttctttggaagtggccctcagcagacaagtcaggatggaaccctgagtgatacagctacaggtgctggctctgaggtaccaagagaaaagaaagcacgactccaagagcgatcgcggtctcagacacccctnagcacagcagctgcctcctcccaggatgctgctcctcccagcgcaccaccagacaggagcaaaggggctgagccctcgcagcaagccttggggcctgaacagaagcaggcttcatccaggtctagaagtgaacctcctagagagagaaagaagaccccagggctttccgagcagaatggcaaaggagccctgaagagcgagcggaaacgcgtgccaaagacctcagcgcagcccgtggagggggccgtcgaagaacgggagcgcaaagaaaggcgggaaagccgaaggcttgagaaagggcgatcacaggattacccagacacgccggaaaaacgggatgagggcaaagcggcggatgaggaaaagcaaagaaaagaggaggattatcagaccaggtaccgcagcgacccgaacctngctcggtacccggtgaaaccgccgcctgaggagcagcagatgcgcatgcacgcccgggtgtcccgcgccaggcacgagcggcgccacagcgacgtggcgctcccgcgcaccgaggcgggcgcggcgctgccggagggcaaggccggcaaacgcgcgccggcggcagccagggcctcgccgccggactcgccgcgggcttactcggctgagagaactgcggagaccagggcgccgggcgccaagcagctaacgaaccacagcccgccggcgcccagacatgggccggttcccgcagaagccccggagctcaaagcccaggagcccctcaggaagcagagccgcctggaccccagctcggcggtcctcatgctgcggaacgactctttgagctcagaccagtccgagtcggtgcggccgtccccgcccaagccgcaccggtccaagagaggcggcaagaagcggcagatgtcggtgagcagctctgaggaggagggcgtgtcgacgcccgagtacaccagctgcgaggacgtggagctggagagcgagagcgtcagcgagaaaggtgatttggattattactggttggatcctgccacgtggcacagccgggagacatcacctattagttcgcatcctgtaacgtggcaaccatctaaagagggggaccgattaattggacgtgttattcttaacaagagaacaaccatgcccaaagactcaggtgcattgctgggtctgaaagttgttggaggaaaaatgactgacttaggacgacttggtgctttcatcaccaaagtaaagaagggtagcctagcagatgtagttggacacctaagagcaggggatgaagttctagaatggaatggtaaacccctgccgggagctacaaatgaagaagtttacaacattattttagaatcaaaatcagaacctcaagttgaaattattgtttcaaggcctattggtgacattccccggattcctgagagctcccaccctccactggagtccagttcaagttcctttgaatctcagaagatggaaaggccttccatttctgttatttctccaacaagtcctggagctctaaaagatgccccacaagtcttaccagggcaactttctgtgaagttgtggtatgataaagtgggacaccagctgattgtaaatgttctgcaagcaacagatctacctgctagagtagatggacgtcctcgaaatccctatgtaaaaatgtattttcttccagatagaagtgataaaagtaaaaggaggaccaaaacagtaaagaaaatactagaaccaaaatggaatcaaacttttgtctattcacatgtacatcgtagagattttagagaacgaatgttagaaataactgtgtgggaccaaccaagagtgcaagaagaagaaagtgaatttcttggagagatcctcatagaattggagacagcgcttttagatgatgaaccgcattggtataaacttcagacacatgatgagtcttcactacctctgcctcagccatcacctttcatgccaaggcgacatattcatggagaaagctctagcaaaaagctacaaagatctcagcgaatcagtgatagtgacatctcagattatgaggttgatgatggtattggcgtagttcctccagtaggctataggtctagtgctagagaaagtaaatctacaacattaactgtgccagaacagcaaagaacaactcatcaccgctcacgttcagtatctcctcatcgcggcaatgatcagggaaagccgcgttcacgtttaccaaatgtgccattacagaggagtttagatgaaattcatccaacaagaaggtcacgttctccaaccagacaccatgatgcctcccgaagtccagttgatcatagaaccagagatgtggatagtcagtatttatcagaacaagacagtgagcttcttatgctgcccagagcaaaacgaggacgaagtgcagaatgcctacatactaccagaatgcaccgacagagaagtccaacacaatctcctccagcagacacatcgttcagcagtcgcaggggaagacagctcccacaagtgccagtgagaagcggcagtatagaacaagcaagcttagtagtggaggagcgaacaagacagatgaaaatgaaagtgcatcgatttaagcagacaacagggtctggttctagtcaagaacttgatcgcgagcaatattccaagtataacatacataaagatcagtacagaagctgtgataacgtctctgccaaatcatcagatagtgatgtcagtgatgtttccgccatttcccgaaccagcagtgcctcacgcctcagcagcacaagctttatgtcagagcaatctgagcgccccaggggtagaatcagacggatggggacttcaggaagatccatcatgaagagcaccagtgtcagtggagagatgtacacactggagcataatgacggcagccagtcagacacagctgtgggtacagttggagcaggtggaaagaaacggagatccagccttagtgccaaagtggttgccatagtgtctcgaaggagtagaagcacatcccagcttagtcaaacagagtcgggccacaaaaagttaaaaagtaccatccagagaagcacagaaacaggcatggcagctgaaatgagaaagatggtaaggcagccgagccgagagtctactgatggcagcatcaacagttacagctctgagggcaatttaatatttcctggagtgcgactgggagctgacagtcaattcagtgattttcttgatggattgggaccagcccagcttgttggccgccaaacccttgccacccctgcaatgggtgatatacaaataggaatggaggacaaaaagggccaattagaagtggaagtcattagagcacgaagcctcacacaaaagcctggttccaaatctacacctgctccatatgtcaaagtatatcttttggaaaatggggcctgtatagccaagaagaagacaagaattgcacgaaaaacccttgatcctttgtatcagcagtctctggtttttgatgaaagtccacagggtaaagttcttcaggtgattgtctggggagactatggcagaatggaccacaaatgctttatgggtgtggctcagatcttgttggaagaactcgacctgtccagcatggtgatcggatggtacaaattgttcccaccgtcctcactggtggatcccacactcactcccctcacccggcgggcttcccagtcatctctggaaagttcaactgggcctccctgtattcgatcatagtgaactcataccagagtcattccaataaaactctacttttcaggataataatctgaaccagatatttcatgatcgaaagcattgttggagacagacaatcaacttgtgttttgcctgtagtagtttttcaataatatgtcccaattgttatttaaaacatggcttcatatgacagaacaaggcaatctatcaaatttacaggaagaatcaacatgctggtgagagtcactgatgcttctaacaaatagaaaaagaggaaactttaaatccacgcatacacgtacacacacacatgcacacacacacacaccaaattgaacaaactggaaactctcactctgtgaaaagttgtattctacacatttctgcacagaccacaagcagtgttatttccctgatgtttgagttgttttgttcttttgtgtgttttgtttatttgtgtgttgtttgttggttttcgtttcttgagtttttgttttgttttcaccacatctgttatttccactagtttttttttggctgtgtcatgacaggcctcatgatgctaacagagattcttcccttcttttttccaaaagcaccaaaaaaaagggctgaagtagtctctgtaggcatctccccaaagtgttaaacagctacataaggtgaagccaaggaagggtttcactagctttcattttataattatttaaagtcttatgtgtggatacccaagagacaaaaagttatcttccaaaataaataatcacagaagtacttttttaatgaagagcctatctgtttgcattctagaaaattaatttatggtttccattgttttgcatggaagacttttaaagaagtcaatctgcaactaatgctggggactaaaactaactgcataattgtactttgaaaacactccttgtaatgcctttttcttcctgatattaaaaaaatgctcatgtgtataaaccatactttgacttcccaaaaatggtgactaggaatggatttgagcctaagacactttgagctatgcccaggcttctcagccatacctcagtgtagacacatccatctgccctggaaagagcatggtatgagctgttcaatattccactggaaattccagttgaaatattctgcactaaactattgtttttattgaattttagtttacatttctttgagattgatgcaagcacaaagcttgattttttaatgcaaagtatcttactttttggggggaaaataaacaaaatgaactttcaatttgcattttcatttagtttctcttggccttgaatttcccttgtgacattctgtacatgtgctacaaactgcagtctctgcaggtgcattgatatgttctccctccttttatgagtcactccacttttgtgattacacaaatagagcagcatgacttggaactgttcagagctgcatgcacattttgtaaaaaaaaaa

SEQ ID NO: 315266 - DNA, 5527 bp, Homo sapiens
  misc_feature (538)..(538): n is a, c, g, or t
  misc_feature (545)..(546): n is a, c, g, or t
  misc_feature (742)..(742): n is a, c, g, or t
  misc_feature (1159)..(1159): n is a, c, g, or t
caggggcgcagctgctgggcgtgcatccgaaaggtgagagccagagagcgagcagagggggcgggcaggccacgaaaatgtcctcggccgtggggccccgcggtcctcgcccacccacggtgcctccccccatgcaagagctgcccgacctgagccacctgaccgaagaggagaggaacattatcatggcagtgatggaccggcagaaggaagaggaggaaaaagaagaagccatgctcaagtgtgttgtcagggacatggcgaagcctgctgcctgcaaaacaccaagaaatgctgaaaaccagccccaccaaccttcaccgagattgcatcaacagtttgaaagctataaggaacaagtgagaaaaataggggaagaagcgcggcgttaccagggcgagcacaaagacgatgctccgacttgtggaatctgtcataaaacaaagtttgctgatgggtgcggtcatctctgctcctattgtcgcactaagttctgtgcgcgctgcggaggccgcgtgtctctacggtcaaacaacgngacaaannggttatgtgggtatgcaatttatgtcgaaagcaacaagaaatcttaaccaaatctggggcatggttctttggaagtggccctcagcagacaagtcaggatggaaccctgagtgatacagctacaggtgctggctctgaggtaccaagagaaaagaaagcacgactccaagagcgatcgcggtctcagacacccctnagcacagcagctgcctcctcccaggatgctgctcctcccagcgcaccaccagacaggagcaaaggggctgagccctcgcagcaagccttggggcctgaacagaagcaggcttcatccaggtctagaagtgaacctcctagagagagaaagaagaccccagggctttccgagcagaatggcaaaggagccctgaagagcgagcggaaacgcgtgccaaagacctcagcgcagcccgtggagggggccgtcgaagaacgggagcgcaaagaaaggcgggaaagccgaaggcttgagaaagggcgatcacaggattacccagacacgccggaaaaacgggatgagggcaaagcggcggatgaggaaaagcaaagaaaagaggaggattatcagaccaggtaccgcagcgacccgaacctngctcggtacccggtgaaaccgccgcctgaggagcagcagatgcgcatgcacgcccgggtgtcccgcgccaggcacgagcggcgccacagcgacgtggcgctcccgcgcaccgaggcgggcgcggcgctgccggagggcaaggccggcaaacgcgcgccggcggcagccagggcctcgccgccggactcgccgcgggcttactcggctgagagaactgcggagaccagggcgccgggcgccaagcagctaacgaaccacagcccgccggcgcccagacatgggccggttcccgcagaagccccggagctcaaagcccaggagcccctcaggaagcagagccgcctggaccccagctcggcggtcctcatgctgcggaacgactctttgagctcagaccagtccgagtcggtgcggccgtccccgcccaagccgcaccggtccaagagaggcggcaagaagcggcagatgtcggtgagcagctctgaggaggagggcgtgtcgacgcccgagtacaccagctgcgaggacgtggagctggagagcgagagcgtcagcgagaaaggtgatttggattattactggttggatcctgccacgtggcacagccgggagacatcacctattagttcgcatcctgtaacgtggcaaccatctaaagagggggaccgattaattggacgtgttattcttaacaagagaacaaccatgcccaaagactcaggtgcattgctgggtctgaaagttgttggaggaaaaatgactgacttaggacgacttggtgctttcatcaccaaagtaaagaagggtagcctagcagatgtagttggacacctaagagcaggggatgaagttctagaatggaatggtaaacccctgccgggagctacaaatgaagaagtttacaacattattttagaatcaaaatcagaacctcaagttgaaattattgtttcaaggcctattggtgacattccccggattcctgagagctcccaccctccactggagtccagttcaagttcctttgaatctcagaagatggaaaggccttccatttctgttatttctccaacaagtcctggagctctaaaagatgccccacaagtcttaccagggcaactttctgtgaagttgtggtatgataaagtgggacaccagctgattgtaaatgttctgcaagcaacagatctacctgctagagtagatggacgtcctcgaaatccctatgtaaaaatgtattttcttccagatagaagtgataaaagtaaaaggaggaccaaaacagtaaagaaaatactagaaccaaaatggaatcaaacttttgtctattcacatgtacatcgtagagattttagagaacgaatgttagaaataactgtgtgggaccaaccaagagtgcaagaagaagaaagtgaatttcttggagagatcctcatagaattggagacagcgcttttagatgatgaaccgcattggtataaacttcagacacatgatgagtcttcactacctctgcctcagccatcacctttcatgccaaggcgacatattcatggagaaagctctagcaaaaagctacaaagatctcagcgaatcagtgatagtgacatctcagattatgaggttgatgatggtattggcgtagttcctccagtaggctataggtctagtgctagagaaagtaaatctacaacattaactgtgccagaacagcaaagaacaactcatcaccgctcacgttcagtatctcctcatcgcggcaatgatcagggaaagccgcgttcacgtttaccaaatgtgccattacagaggagtttagatgaaattcatccaacaagaaggtcacgttctccaaccagacaccatgatgcctcccgaagtccagttgatcatagaaccagagatgtggatagtcagtatttatcagaacaagacagtgagcttcttatgctgcccagagcaaaacgaggacgaagtgcagaatgcctacatactaccagtgaactgcagccctttcttgacagggctaggagtgctagtaccaactgcttgagaccagatactagtttgcattcaccagaacgagaaagaatgcaccgacagagaagtccaacacaatctcctccagcagacacatcgttcagcagtcgcaggggaagacagctcccacaagtgccagtgagaagcggcagtatagaacaagagtcgggccacaaaaagttaaaaagtaccatccagagaagcacagaaacaggcatggcagctgaaatgagaaagatggtaaggcagccgagccgagagtctactgatggcagcatcaacagttacagctctgagggcaatttaatatttcctggagtgcgactgggagctgacagtcaattcagtgattttcttgatggattgggaccagcccagcttgttggccgccaaacccttgccacccctgcaatgggtgatatacaaataggaatggaggacaaaaagggccaattagaagtggaagtcattagagcacgaagcctcacacaaaagcctggttccaaatctacacctgctccatatgtcaaagtatatcttttggaaaatggggcctgtatagccaagaagaagacaagaattgcacgaaaaacccttgatcctttgtatcagcagtctctggtttttgatgaaagtccacagggtaaagttcttcaggtgattgtctggggagactatggcagaatggaccacaaatgctttatgggtgtggctcagatcttgttggaagaactcgacctgtccagcatggtgatcggatggtacaaattgttcccaccgtcctcactggtggatcccacactcactcccctcacccggcgggcttcccagtcatctctggaaagttcaactgggcctccctgtattcgatcatagtgaactcataccagagtcattccaataaaactctacttttcaggataataatctgaaccagatatttcatgatcgaaagcattgttggagacagacaatcaacttgtgttttgcctgtagtagtttttcaataatatgtcccaattgttatttaaaacatggcttcatatgacagaacaaggcaatctatcaaatttacaggaagaatcaacatgctggtgagagtcactgatgcttctaacaaatagaaaaagaggaaactttaaatccacgcatacacgtacacacacacatgcacacacacacacaccaaattgaacaaactggaaactctcactctgtgaaaagttgtattctacacatttctgcacagaccacaagcagtgttatttccctgatgtttgagttgttttgttcttttgtgtgttttgtttatttgtgtgttgtttgttggttttcgtttcttgagtttttgttttgttttcaccacatctgttatttccactagtttttttttggctgtgtcatgacaggcctcatgatgctaacagagattcttcccttcttttttccaaaagcaccaaaaaaaagggctgaagtagtctctgtaggcatctccccaaagtgttaaacagctacataaggtgaagccaaggaagggtttcactagctttcattttataattatttaaagtcttatgtgtggatacccaagagacaaaaagttatcttccaaaataaataatcacagaagtacttttttaatgaagagcctatctgtttgcattctagaaaattaatttatggtttccattgttttgcatggaagacttttaaagaagtcaatctgcaactaatgctggggactaaaactaactgcataattgtactttgaaaacactccttgtaatgcctttttcttcctgatattaaaaaaatgctcatgtgtataaaccatactttgacttcccaaaaatggtgactaggaatggatttgagcctaagacactttgagctatgcccaggcttctcagccatacctcagtgtagacacatccatctgccctggaaagagcatggtatgagctgttcaatattccactggaaattccagttgaaatattctgcactaaactattgtttttattgaattttagtttacatttctttgagattgatgcaagcacaaagcttgattttttaatgcaaagtatcttactttttggggggaaaataaacaaaatgaactttcaatttgcattttcatttagtttctcttggccttgaatttcccttgtgacattctgtacatgtgctacaaactgcagtctctgcaggtgcattgatatgttctccctccttttatgagtcactccacttttgtgattacacaaatagagcagcatgacttggaactgttcagagctgcatgcacattttgtaaaaaaaaaa

SEQ ID NO: 315267 - DNA, 2249 bp, Homo sapiens
aaaccaggtcaaagcttctttggcattcagttttccccagagaacaatttaatgctgatacttaattttttcaagatagacaagagtcgggccacaaaaagttaaaaagtaccatccagagaagcacagaaacaggcatggcagctgaaatgagaaagatggtaaggcagccgagccgagagtctactgatggcagcatcaacagttacagctctgagggcaatttaatatttcctggagtgcgactgggagctgacagtcaattcagtgattttcttgatggattgggaccagcccagcttgttggccgccaaacccttgccacccctgcaatgggtgatatacaaataggaatggaggacaaaaagggccaattagaagtggaagtcattagagcacgaagcctcacacaaaagcctggttccaaatctacacctgctccatatgtcaaagtatatcttttggaaaatggggcctgtatagccaagaagaagacaagaattgcacgaaaaacccttgatcctttgtatcagcagtctctggtttttgatgaaagtccacagggtaaagttcttcaggtgattgtctggggagactatggcagaatggaccacaaatgctttatgggtgtggctcagatcttgttggaagaactcgacctgtccagcatggtgatcggatggtacaaattgttcccaccgtcctcactggtggatcccacactcactcccctcacccggcgggcttcccagtcatctctggaaagttcaactgggcctccctgtattcgatcatagtgaactcataccagagtcattccaataaaactctacttttcaggataataatctgaaccagatatttcatgatcgaaagcattgttggagacagacaatcaacttgtgttttgcctgtagtagtttttcaataatatgtcccaattgttatttaaaacatggcttcatatgacagaacaaggcaatctatcaaatttacaggaagaatcaacatgctggtgagagtcactgatgcttctaacaaatagaaaaagaggaaactttaaatccacgcatacacgtacacacacacatgcacacacacacacaccaaattgaacaaactggaaactctcactctgtgaaaagttgtattctacacatttctgcacagaccacaagcagtgttatttccctgatgtttgagttgttttgttcttttgtgtgttttgtttatttgtgtgttgtttgttggttttcgtttcttgagtttttgttttgttttcaccacatctgttatttccactagtttttttttggctgtgtcatgacaggcctcatgatgctaacagagattcttcccttcttttttccaaaagcaccaaaaaaaagggctgaagtagtctctgtaggcatctccccaaagtgttaaacagctacataaggtgaagccaaggaagggtttcactagctttcattttataattatttaaagtcttatgtgtggatacccaagagacaaaaagttatcttccaaaataaataatcacagaagtacttttttaatgaagagcctatctgtttgcattctagaaaattaatttatggtttccattgttttgcatggaagacttttaaagaagtcaatctgcaactaatgctggggactaaaactaactgcataattgtactttgaaaacactccttgtaatgcctttttcttcctgatattaaaaaaatgctcatgtgtataaaccatactttgacttcccaaaaatggtgactaggaatggatttgagcctaagacactttgagctatgcccaggcttctcagccatacctcagtgtagacacatccatctgccctggaaagagcatggtatgagctgttcaatattccactggaaattccagttgaaatattctgcactaaactattgtttttattgaattttagtttacatttctttgagattgatgcaagcacaaagcttgattttttaatgcaaagtatcttactttttggggggaaaataaacaaaatgaactttcaatttgcattttcatttagtttctcttggccttgaatttcccttgtgacattctgtacatgtgctacaaactgcagtctctgcaggtgcattgatatgttctccctccttttatgagtcactccacttttgtgattacacaaatagagcagcatgacttggaactgttcagagctgcatgcacattttgtaaaaaaaaaa

SEQ ID NO: 315268 - DNA, 261 bp, Homo sapiens
gttgttggaggaaaaatgactgacttaggacgacttggtgctttcatcaccaaagtaaagaagggtagcctagcagatgtagttggacacctaagagcaggtaaagtttctttttttaatatttaaacagtgtgttctccatgcatgaacatgaattggtggttttcaatttggggttagttttatatatacatacatacatacatgtatgtatgtatatatcaattaagtcactaaattttaatgcacgaataaagactt

SEQ ID NO: 315269 - DNA, 6121 bp, Homo sapiens
  misc_feature (538)..(538): n is a, c, g, or t
  misc_feature (545)..(546): n is a, c, g, or t
  misc_feature (742)..(742): n is a, c, g, or t
  misc_feature (1159)..(1159): n is a, c, g, or t
caggggcgcagctgctgggcgtgcatccgaaaggtgagagccagagagcgagcagagggggcgggcaggccacgaaaatgtcctcggccgtggggccccgcggtcctcgcccacccacggtgcctccccccatgcaagagctgcccgacctgagccacctgaccgaagaggagaggaacattatcatggcagtgatggaccggcagaaggaagaggaggaaaaagaagaagccatgctcaagtgtgttgtcagggacatggcgaagcctgctgcctgcaaaacaccaagaaatgctgaaaaccagccccaccaaccttcaccgagattgcatcaacagtttgaaagctataaggaacaagtgagaaaaataggggaagaagcgcggcgttaccagggcgagcacaaagacgatgctccgacttgtggaatctgtcataaaacaaagtttgctgatgggtgcggtcatctctgctcctattgtcgcactaagttctgtgcgcgctgcggaggccgcgtgtctctacggtcaaacaacgngacaaannggttatgtgggtatgcaatttatgtcgaaagcaacaagaaatcttaaccaaatctggggcatggttctttggaagtggccctcagcagacaagtcaggatggaaccctgagtgatacagctacaggtgctggctctgaggtaccaagagaaaagaaagcacgactccaagagcgatcgcggtctcagacacccctnagcacagcagctgcctcctcccaggatgctgctcctcccagcgcaccaccagacaggagcaaaggggctgagccctcgcagcaagccttggggcctgaacagaagcaggcttcatccaggtctagaagtgaacctcctagagagagaaagaagaccccagggctttccgagcagaatggcaaaggagccctgaagagcgagcggaaacgcgtgccaaagacctcagcgcagcccgtggagggggccgtcgaagaacgggagcgcaaagaaaggcgggaaagccgaaggcttgagaaagggcgatcacaggattacccagacacgccggaaaaacgggatgagggcaaagcggcggatgaggaaaagcaaagaaaagaggaggattatcagaccaggtaccgcagcgacccgaacctngctcggtacccggtgaaaccgccgcctgaggagcagcagatgcgcatgcacgcccgggtgtcccgcgccaggcacgagcggcgccacagcgacgtggcgctcccgcgcaccgaggcgggcgcggcgctgccggagggcaaggccggcaaacgcgcgccggcggcagccagggcctcgccgccggactcgccgcgggcttactcggctgagagaactgcggagaccagggcgccgggcgccaagcagctaacgaaccacagcccgccggcgcccagacatgggccggttcccgcagaagccccggagctcaaagcccaggagcccctcaggaagcagagccgcctggaccccagctcggcggtcctcatgctgcggaacgactctttgagctcagaccagtccgagtcggtgcggccgtccccgcccaagccgcaccggtccaagagaggcggcaagaagcggcagatgtcggtgagcagctctgaggaggagggcgtgtcgacgcccgagtacaccagctgcgaggacgtggagctggagagcgagagcgtcagcgagaaaggtgatttggattattactggttggatcctgccacgtggcacagccgggagacatcacctattagttcgcatcctgtaacgtggcaaccatctaaagagggggaccgattaattggacgtgttattcttaacaagagaacaaccatgcccaaagactcaggtgcattgctgggtctgaaagttgttggaggaaaaatgactgacttaggacgacttggtgctttcatcaccaaagtaaagaagggtagcctagcagatgtagttggacacctaagagcaggggatgaagttctagaatggaatggtaaacccctgccgggagctacaaatgaagaagtttacaacattattttagaatcaaaatcagaacctcaagttgaaattattgtttcaaggcctattggtgacattccccggattcctgagagctcccaccctccactggagtccagttcaagttcctttgaatctcagaagatggaaaggccttccatttctgttatttctccaacaagtcctggagctctaaaagatgccccacaagtcttaccagggcaactttctgtgaagttgtggtatgataaagtgggacaccagctgattgtaaatgttctgcaagcaacagatctacctgctagagtagatggacgtcctcgaaatccctatgtaaaaatgtattttcttccagatagaagtgataaaagtaaaaggaggaccaaaacagtaaagaaaatactagaaccaaaatggaatcaaacttttgtctattcacatgtacatcgtagagattttagagaacgaatgttagaaataactgtgtgggaccaaccaagagtgcaagaagaagaaagtgaatttcttggagagatcctcatagaattggagacagcgcttttagatgatgaaccgcattggtataaacttcagacacatgatgagtcttcactacctctgcctcagccatcacctttcatgccaaggcgacatattcatggagaaagctctagcaaaaagctacaaagatctcagcgaatcagtgatagtgacatctcagattatgaggttgatgatggtattggcgtagttcctccagtaggctataggtctagtgctagagaaagtaaatctacaacattaactgtgccagaacagcaaagaacaactcatcaccgctcacgttcagtatctcctcatcgcggcaatgatcagggaaagccgcgttcacgtttaccaaatgtgccattacagaggagtttagatgaaattcatccaacaagaaggtcacgttctccaaccagacaccatgatgcctcccgaagtccagttgatcatagaaccagagatgtggatagtcagtatttatcagaacaagacagtgagcttcttatgctgcccagagcaaaacgaggacgaagtgcagaatgcctacatactaccagacatcttgttaggcactataaaacattacctcccaagatgcctttattacagagcagttctcactggaatatttacagtgaactgcagccctttcttgacagggctaggagtgctagtaccaactgcttgagaccagatactagtttgcattcaccagaacgagaaagaatgcaccgacagagaagtccaacacaatctcctccagcagacacatcgttcagcagtcgcaggggaagacagctcccacaagtgccagtgagaagcggcagtatagaacaagcaagcttagtagtggaggagcgaacaagacagatgaaaatgaaagtgcatcgatttaagcagacaacagggtctggttctagtcaagaacttgatcgcgagcaatattccaagtataacatacataaagatcagtacagaagctgtgataacgtctctgccaaatcatcagatagtgatgtcagtgatgtttccgccatttcccgaaccagcagtgcctcacgcctcagcagcacaagctttatgtcagagcaatctgagcgccccaggggtagaatcagttcatttacccccaaaatgcaaggcagacggatggggacttcaggaagatccatcatgaagagcaccagtgtcagtggagagatgtacacactggagcataatgacggcagccagtcagacacagctgtgggtacagttggagcaggtggaaagaaacggagatccagccttagtgccaaagtggttgccatagtgtctcgaaggagtagaagcacatcccagcttagtcaaacagagtcgggccacaaaaagttaaaaagtaccatccagagaagcacagaaacaggcatggcagctgaaatgagaaagatggtaaggcagccgagccgagagtctactgatggcagcatcaacagttacagctctgagggcaatttaatatttcctggagtgcgactgggagctgacagtcaattcagtgattttcttgatggattgggaccagcccagcttgttggccgccaaacccttgccacccctgcaatgggtgatatacaaataggaatggaggacaaaaagggccaattagaagtggaagtcattagagcacgaagcctcacacaaaagcctggttccaaatctacacctgctccatatgtcaaagtatatcttttggaaaatggggcctgtatagccaagaagaagacaagaattgcacgaaaaacccttgatcctttgtatcagcagtctctggtttttgatgaaagtccacagggtaaagttcttcaggtgattgtctggggagactatggcagaatggaccacaaatgctttatgggtgtggctcagatcttgttggaagaactcgacctgtccagcatggtgatcggatggtacaaattgttcccaccgtcctcactggtggatcccacactcactcccctcacccggcgggcttcccagtcatctctggaaagttcaactgggcctccctgtattcgatcatagtgaactcataccagagtcattccaataaaactctacttttcaggataataatctgaaccagatatttcatgatcgaaagcattgttggagacagacaatcaacttgtgttttgcctgtagtagtttttcaataatatgtcccaattgttatttaaaacatggcttcatatgacagaacaaggcaatctatcaaatttacaggaagaatcaacatgctggtgagagtcactgatgcttctaacaaatagaaaaagaggaaactttaaatccacgcatacacgtacacacacacatgcacacacacacacaccaaattgaacaaactggaaactctcactctgtgaaaagttgtattctacacatttctgcacagaccacaagcagtgttatttccctgatgtttgagttgttttgttcttttgtgtgttttgtttatttgtgtgttgtttgttggttttcgtttcttgagtttttgttttgttttcaccacatctgttatttccactagtttttttttggctgtgtcatgacaggcctcatgatgctaacagagattcttcccttcttttttccaaaagcaccaaaaaaaagggctgaagtagtctctgtaggcatctccccaaagtgttaaacagctacataaggtgaagccaaggaagggtttcactagctttcattttataattatttaaagtcttatgtgtggatacccaagagacaaaaagttatcttccaaaataaataatcacagaagtacttttttaatgaagagcctatctgtttgcattctagaaaattaatttatggtttccattgttttgcatggaagacttttaaagaagtcaatctgcaactaatgctggggactaaaactaactgcataattgtactttgaaaacactccttgtaatgcctttttcttcctgatattaaaaaaatgctcatgtgtataaaccatactttgacttcccaaaaatggtgactaggaatggatttgagcctaagacactttgagctatgcccaggcttctcagccatacctcagtgtagacacatccatctgccctggaaagagcatggtatgagctgttcaatattccactggaaattccagttgaaatattctgcactaaactattgtttttattgaattttagtttacatttctttgagattgatgcaagcacaaagcttgattttttaatgcaaagtatcttactttttggggggaaaataaacaaaatgaactttcaatttgcattttcatttagtttctcttggccttgaatttcccttgtgacattctgtacatgtgctacaaactgcagtctctgcaggtgcattgatatgttctccctccttttatgagtcactccacttttgtgattacacaaatagagcagcatgacttggaactgttcagagctgcatgcacattttgtaaaaaaaaaa

SEQ ID NO: 315270 - DNA, 5611 bp, Homo sapiens
  misc_feature (538)..(538): n is a, c, g, or t
  misc_feature (545)..(546): n is a, c, g, or t
  misc_feature (742)..(742): n is a, c, g, or t
  misc_feature (1159)..(1159): n is a, c, g, or t
caggggcgcagctgctgggcgtgcatccgaaaggtgagagccagagagcgagcagagggggcgggcaggccacgaaaatgtcctcggccgtggggccccgcggtcctcgcccacccacggtgcctccccccatgcaagagctgcccgacctgagccacctgaccgaagaggagaggaacattatcatggcagtgatggaccggcagaaggaagaggaggaaaaagaagaagccatgctcaagtgtgttgtcagggacatggcgaagcctgctgcctgcaaaacaccaagaaatgctgaaaaccagccccaccaaccttcaccgagattgcatcaacagtttgaaagctataaggaacaagtgagaaaaataggggaagaagcgcggcgttaccagggcgagcacaaagacgatgctccgacttgtggaatctgtcataaaacaaagtttgctgatgggtgcggtcatctctgctcctattgtcgcactaagttctgtgcgcgctgcggaggccgcgtgtctctacggtcaaacaacgngacaaannggttatgtgggtatgcaatttatgtcgaaagcaacaagaaatcttaaccaaatctggggcatggttctttggaagtggccctcagcagacaagtcaggatggaaccctgagtgatacagctacaggtgctggctctgaggtaccaagagaaaagaaagcacgactccaagagcgatcgcggtctcagacacccctnagcacagcagctgcctcctcccaggatgctgctcctcccagcgcaccaccagacaggagcaaaggggctgagccctcgcagcaagccttggggcctgaacagaagcaggcttcatccaggtctagaagtgaacctcctagagagagaaagaagaccccagggctttccgagcagaatggcaaaggagccctgaagagcgagcggaaacgcgtgccaaagacctcagcgcagcccgtggagggggccgtcgaagaacgggagcgcaaagaaaggcgggaaagccgaaggcttgagaaagggcgatcacaggattacccagacacgccggaaaaacgggatgagggcaaagcggcggatgaggaaaagcaaagaaaagaggaggattatcagaccaggtaccgcagcgacccgaacctngctcggtacccggtgaaaccgccgcctgaggagcagcagatgcgcatgcacgcccgggtgtcccgcgccaggcacgagcggcgccacagcgacgtggcgctcccgcgcaccgaggcgggcgcggcgctgccggagggcaaggccggcaaacgcgcgccggcggcagccagggcctcgccgccggactcgccgcgggcttactcggctgagagaactgcggagaccagggcgccgggcgccaagcagctaacgaaccacagcccgccggcgcccagacatgggccggttcccgcagaagccccggagctcaaagcccaggagcccctcaggaagcagagccgcctggaccccagctcggcggtcctcatgctgcggaacgactctttgagctcagaccagtccgagtcggtgcggccgtccccgcccaagccgcaccggtccaagagaggcggcaagaagcggcagatgtcggtgagcagctctgaggaggagggcgtgtcgacgcccgagtacaccagctgcgaggacgtggagctggagagcgagagcgtcagcgagaaaggtgatttggattattactggttggatcctgccacgtggcacagccgggagacatcacctattagttcgcatcctgtaacgtggcaaccatctaaagagggggaccgattaattggacgtgttattcttaacaagagaacaaccatgcccaaagactcaggtgcattgctgggtctgaaagttgttggaggaaaaatgactgacttaggacgacttggtgctttcatcaccaaagtaaagaagggtagcctagcagatgtagttggacacctaagagcaggggatgaagttctagaatggaatggtaaacccctgccgggagctacaaatgaagaagtttacaacattattttagaatcaaaatcagaacctcaagttgaaattattgtttcaaggcctattggtgacattccccggattcctgagagctcccaccctccactggagtccagttcaagttcctttgaatctcagaagatggaaaggccttccatttctgttatttctccaacaagtcctggagctctaaaagatgccccacaagtcttaccagggcaactttctgtgaagttgtggtatgataaagtgggacaccagctgattgtaaatgttctgcaagcaacagatctacctgctagagtagatggacgtcctcgaaatccctatgtaaaaatgtattttcttccagatagaagtgataaaagtaaaaggaggaccaaaacagtaaagaaaatactagaaccaaaatggaatcaaacttttgtctattcacatgtacatcgtagagattttagagaacgaatgttagaaataactgtgtgggaccaaccaagagtgcaagaagaagaaagtgaatttcttggagagatcctcatagaattggagacagcgcttttagatgatgaaccgcattggtataaacttcagacacatgatgagtcttcactacctctgcctcagccatcacctttcatgccaaggcgacatattcatggagaaagctctagcaaaaagctacaaagatctcagcgaatcagtgatagtgacatctcagattatgaggttgatgatggtattggcgtagttcctccagtaggctataggtctagtgctagagaaagtaaatctacaacattaactgtgccagaacagcaaagaacaactcatcaccgctcacgttcagtatctcctcatcgcggcaatgatcagggaaagccgcgttcacgtttaccaaatgtgccattacagaggagtttagatgaaattcatccaacaagaaggtcacgttctccaaccagacaccatgatgcctcccgaagtccagttgatcatagaaccagagatgtggatagtcagtatttatcagaacaagacagtgagcttcttatgctgcccagagcaaaacgaggacgaagtgcagaatgcctacatactaccagtgaactgcagccctttcttgacagggctaggagtgctagtaccaactgcttgagaccagatactagtttgcattcaccagaacgagaaaggggtagatggtccccctccctagataggagacgacctcctagtcccaggattcaaatccagcatgcgtctccggagaatgacagaatgcaccgacagagaagtccaacacaatctcctccagcagacacatcgttcagcagtcgcaggggaagacagctcccacaagtgccagtgagaagcggcagtatagaacaagagtcgggccacaaaaagttaaaaagtaccatccagagaagcacagaaacaggcatggcagctgaaatgagaaagatggtaaggcagccgagccgagagtctactgatggcagcatcaacagttacagctctgagggcaatttaatatttcctggagtgcgactgggagctgacagtcaattcagtgattttcttgatggattgggaccagcccagcttgttggccgccaaacccttgccacccctgcaatgggtgatatacaaataggaatggaggacaaaaagggccaattagaagtggaagtcattagagcacgaagcctcacacaaaagcctggttccaaatctacacctgctccatatgtcaaagtatatcttttggaaaatggggcctgtatagccaagaagaagacaagaattgcacgaaaaacccttgatcctttgtatcagcagtctctggtttttgatgaaagtccacagggtaaagttcttcaggtgattgtctggggagactatggcagaatggaccacaaatgctttatgggtgtggctcagatcttgttggaagaactcgacctgtccagcatggtgatcggatggtacaaattgttcccaccgtcctcactggtggatcccacactcactcccctcacccggcgggcttcccagtcatctctggaaagttcaactgggcctccctgtattcgatcatagtgaactcataccagagtcattccaataaaactctacttttcaggataataatctgaaccagatatttcatgatcgaaagcattgttggagacagacaatcaacttgtgttttgcctgtagtagtttttcaataatatgtcccaattgttatttaaaacatggcttcatatgacagaacaaggcaatctatcaaatttacaggaagaatcaacatgctggtgagagtcactgatgcttctaacaaatagaaaaagaggaaactttaaatccacgcatacacgtacacacacacatgcacacacacacacaccaaattgaacaaactggaaactctcactctgtgaaaagttgtattctacacatttctgcacagaccacaagcagtgttatttccctgatgtttgagttgttttgttcttttgtgtgttttgtttatttgtgtgttgtttgttggttttcgtttcttgagtttttgttttgttttcaccacatctgttatttccactagtttttttttggctgtgtcatgacaggcctcatgatgctaacagagattcttcccttcttttttccaaaagcaccaaaaaaaagggctgaagtagtctctgtaggcatctccccaaagtgttaaacagctacataaggtgaagccaaggaagggtttcactagctttcattttataattatttaaagtcttatgtgtggatacccaagagacaaaaagttatcttccaaaataaataatcacagaagtacttttttaatgaagagcctatctgtttgcattctagaaaattaatttatggtttccattgttttgcatggaagacttttaaagaagtcaatctgcaactaatgctggggactaaaactaactgcataattgtactttgaaaacactccttgtaatgcctttttcttcctgatattaaaaaaatgctcatgtgtataaaccatactttgacttcccaaaaatggtgactaggaatggatttgagcctaagacactttgagctatgcccaggcttctcagccatacctcagtgtagacacatccatctgccctggaaagagcatggtatgagctgttcaatattccactggaaattccagttgaaatattctgcactaaactattgtttttattgaattttagtttacatttctttgagattgatgcaagcacaaagcttgattttttaatgcaaagtatcttactttttggggggaaaataaacaaaatgaactttcaatttgcattttcatttagtttctcttggccttgaatttcccttgtgacattctgtacatgtgctacaaactgcagtctctgcaggtgcattgatatgttctccctccttttatgagtcactccacttttgtgattacacaaatagagcagcatgacttggaactgttcagagctgcatgcacattttgtaaaaaaaaaa

SEQ ID NO: 315271 - DNA, 5374 bp, Homo sapiens
  misc_feature (538)..(538): n is a, c, g, or t
  misc_feature (545)..(546): n is a, c, g, or t
  misc_feature (742)..(742): n is a, c, g, or t
  misc_feature (1159)..(1159): n is a, c, g, or t
caggggcgcagctgctgggcgtgcatccgaaaggtgagagccagagagcgagcagagggggcgggcaggccacgaaaatgtcctcggccgtggggccccgcggtcctcgcccacccacggtgcctccccccatgcaagagctgcccgacctgagccacctgaccgaagaggagaggaacattatcatggcagtgatggaccggcagaaggaagaggaggaaaaagaagaagccatgctcaagtgtgttgtcagggacatggcgaagcctgctgcctgcaaaacaccaagaaatgctgaaaaccagccccaccaaccttcaccgagattgcatcaacagtttgaaagctataaggaacaagtgagaaaaataggggaagaagcgcggcgttaccagggcgagcacaaagacgatgctccgacttgtggaatctgtcataaaacaaagtttgctgatgggtgcggtcatctctgctcctattgtcgcactaagttctgtgcgcgctgcggaggccgcgtgtctctacggtcaaacaacgngacaaannggttatgtgggtatgcaatttatgtcgaaagcaacaagaaatcttaaccaaatctggggcatggttctttggaagtggccctcagcagacaagtcaggatggaaccctgagtgatacagctacaggtgctggctctgaggtaccaagagaaaagaaagcacgactccaagagcgatcgcggtctcagacacccctnagcacagcagctgcctcctcccaggatgctgctcctcccagcgcaccaccagacaggagcaaaggggctgagccctcgcagcaagccttggggcctgaacagaagcaggcttcatccaggtctagaagtgaacctcctagagagagaaagaagaccccagggctttccgagcagaatggcaaaggagccctgaagagcgagcggaaacgcgtgccaaagacctcagcgcagcccgtggagggggccgtcgaagaacgggagcgcaaagaaaggcgggaaagccgaaggcttgagaaagggcgatcacaggattacccagacacgccggaaaaacgggatgagggcaaagcggcggatgaggaaaagcaaagaaaagaggaggattatcagaccaggtaccgcagcgacccgaacctngctcggtacccggtgaaaccgccgcctgaggagcagcagatgcgcatgcacgcccgggtgtcccgcgccaggcacgagcggcgccacagcgacgtggcgctcccgcgcaccgaggcgggcgcggcgctgccggagggcaaggccggcaaacgcgcgccggcggcagccagggcctcgccgccggactcgccgcgggcttactcggctgagagaactgcggagaccagggcgccgggcgccaagcagctaacgaaccacagcccgccggcgcccagacatgggccggttcccgcagaagccccggagctcaaagcccaggagcccctcaggaagcagagccgcctggaccccagctcggcggtcctcatgctgcggaacgactctttgagctcagaccagtccgagtcggtgcggccgtccccgcccaagccgcaccggtccaagagaggcggcaagaagcggcagatgtcggtgagcagctctgaggaggagggcgtgtcgacgcccgagtacaccagctgcgaggacgtggagctggagagcgagagcgtcagcgagaaaggtgatttggattattactggttggatcctgccacgtggcacagccgggagacatcacctattagttcgcatcctgtaacgtggcaaccatctaaagagggggaccgattaattggacgtgttattcttaacaagagaacaaccatgcccaaagactcaggtgcattgctgggtctgaaagttgttggaggaaaaatgactgacttaggacgacttggtgctttcatcaccaaagtaaagaagggtagcctagcagatgtagttggacacctaagagcaggggatgaagttctagaatggaatggtaaacccctgccgggagctacaaatgaagaagtttacaacattattttagaatcaaaatcagaacctcaagttgaaattattgtttcaaggcctattggtgacattccccggattcctgagagctcccaccctccactggagtccagttcaagttcctttgaatctcagaagatggaaaggccttccatttctgttatttctccaacaagtcctggagctctaaaagatgccccacaagtcttaccagggcaactttctgtgaagttgtggtatgataaagtgggacaccagctgattgtaaatgttctgcaagcaacagatctacctgctagagtagatggacgtcctcgaaatccctatgtaaaaatgtattttcttccagatagaagtgataaaagtaaaaggaggaccaaaacagtaaagaaaatactagaaccaaaatggaatcaaacttttgtctattcacatgtacatcgtagagattttagagaacgaatgttagaaataactgtgtgggaccaaccaagagtgcaagaagaagaaagtgaatttcttggagagatcctcatagaattggagacagcgcttttagatgatgaaccgcattggtataaacttcagacacatgatgagtcttcactacctctgcctcagccatcacctttcatgccaaggcgacatattcatggagaaagctctagcaaaaagctacaaagatctcagcgaatcagtgatagtgacatctcagattatgaggttgatgatggtattggcgtagttcctccagtaggctataggtctagtgctagagaaagtaaatctacaacattaactgtgccagaacagcaaagaacaactcatcaccgctcacgttcagtatctcctcatcgcggcaatgatcagggaaagccgcgttcacgtttaccaaatgtgccattacagaggagtttagatgaaattcatccaacaagaaggtcacgttctccaaccagacaccatgatgcctcccgaagtccagttgatcatagaaccagagatgtggatagtcagtatttatcagaacaagacagaatgcaccgacagagaagtccaacacaatctcctccagcagacacatcgttcagcagtcgcaggggaagacagctcccacaagtgccagtgagaagcggcagtatagaacaagagtcgggccacaaaaagttaaaaagtaccatccagagaagcacagaaacaggcatggcagctgaaatgagaaagatggtaaggcagccgagccgagagtctactgatggcagcatcaacagttacagctctgagggcaatttaatatttcctggagtgcgactgggagctgacagtcaattcagtgattttcttgatggattgggaccagcccagcttgttggccgccaaacccttgccacccctgcaatgggtgatatacaaataggaatggaggacaaaaagggccaattagaagtggaagtcattagagcacgaagcctcacacaaaagcctggttccaaatctacacctgctccatatgtcaaagtatatcttttggaaaatggggcctgtatagccaagaagaagacaagaattgcacgaaaaacccttgatcctttgtatcagcagtctctggtttttgatgaaagtccacagggtaaagttcttcaggtgattgtctggggagactatggcagaatggaccacaaatgctttatgggtgtggctcagatcttgttggaagaactcgacctgtccagcatggtgatcggatggtacaaattgttcccaccgtcctcactggtggatcccacactcactcccctcacccggcgggcttcccagtcatctctggaaagttcaactgggcctccctgtattcgatcatagtgaactcataccagagtcattccaataaaactctacttttcaggataataatctgaaccagatatttcatgatcgaaagcattgttggagacagacaatcaacttgtgttttgcctgtagtagtttttcaataatatgtcccaattgttatttaaaacatggcttcatatgacagaacaaggcaatctatcaaatttacaggaagaatcaacatgctggtgagagtcactgatgcttctaacaaatagaaaaagaggaaactttaaatccacgcatacacgtacacacacacatgcacacacacacacaccaaattgaacaaactggaaactctcactctgtgaaaagttgtattctacacatttctgcacagaccacaagcagtgttatttccctgatgtttgagttgttttgttcttttgtgtgttttgtttatttgtgtgttgtttgttggttttcgtttcttgagtttttgttttgttttcaccacatctgttatttccactagtttttttttggctgtgtcatgacaggcctcatgatgctaacagagattcttcccttcttttttccaaaagcaccaaaaaaaagggctgaagtagtctctgtaggcatctccccaaagtgttaaacagctacataaggtgaagccaaggaagggtttcactagctttcattttataattatttaaagtcttatgtgtggatacccaagagacaaaaagttatcttccaaaataaataatcacagaagtacttttttaatgaagagcctatctgtttgcattctagaaaattaatttatggtttccattgttttgcatggaagacttttaaagaagtcaatctgcaactaatgctggggactaaaactaactgcataattgtactttgaaaacactccttgtaatgcctttttcttcctgatattaaaaaaatgctcatgtgtataaaccatactttgacttcccaaaaatggtgactaggaatggatttgagcctaagacactttgagctatgcccaggcttctcagccatacctcagtgtagacacatccatctgccctggaaagagcatggtatgagctgttcaatattccactggaaattccagttgaaatattctgcactaaactattgtttttattgaattttagtttacatttctttgagattgatgcaagcacaaagcttgattttttaatgcaaagtatcttactttttggggggaaaataaacaaaatgaactttcaatttgcattttcatttagtttctcttggccttgaatttcccttgtgacattctgtacatgtgctacaaactgcagtctctgcaggtgcattgatatgttctccctccttttatgagtcactccacttttgtgattacacaaatagagcagcatgacttggaactgttcagagctgcatgcacattttgtaaaaaaaaaa

SEQ ID NO: 315272 - DNA, 4097 bp, Homo sapiens
  misc_feature (538)..(538): n is a, c, g, or t
  misc_feature (545)..(546): n is a, c, g, or t
  misc_feature (742)..(742): n is a, c, g, or t
  misc_feature (1159)..(1159): n is a, c, g, or t
caggggcgcagctgctgggcgtgcatccgaaaggtgagagccagagagcgagcagagggggcgggcaggccacgaaaatgtcctcggccgtggggccccgcggtcctcgcccacccacggtgcctccccccatgcaagagctgcccgacctgagccacctgaccgaagaggagaggaacattatcatggcagtgatggaccggcagaaggaagaggaggaaaaagaagaagccatgctcaagtgtgttgtcagggacatggcgaagcctgctgcctgcaaaacaccaagaaatgctgaaaaccagccccaccaaccttcaccgagattgcatcaacagtttgaaagctataaggaacaagtgagaaaaataggggaagaagcgcggcgttaccagggcgagcacaaagacgatgctccgacttgtggaatctgtcataaaacaaagtttgctgatgggtgcggtcatctctgctcctattgtcgcactaagttctgtgcgcgctgcggaggccgcgtgtctctacggtcaaacaacgngacaaannggttatgtgggtatgcaatttatgtcgaaagcaacaagaaatcttaaccaaatctggggcatggttctttggaagtggccctcagcagacaagtcaggatggaaccctgagtgatacagctacaggtgctggctctgaggtaccaagagaaaagaaagcacgactccaagagcgatcgcggtctcagacacccctnagcacagcagctgcctcctcccaggatgctgctcctcccagcgcaccaccagacaggagcaaaggggctgagccctcgcagcaagccttggggcctgaacagaagcaggcttcatccaggtctagaagtgaacctcctagagagagaaagaagaccccagggctttccgagcagaatggcaaaggagccctgaagagcgagcggaaacgcgtgccaaagacctcagcgcagcccgtggagggggccgtcgaagaacgggagcgcaaagaaaggcgggaaagccgaaggcttgagaaagggcgatcacaggattacccagacacgccggaaaaacgggatgagggcaaagcggcggatgaggaaaagcaaagaaaagaggaggattatcagaccaggtaccgcagcgacccgaacctngctcggtacccggtgaaaccgccgcctgaggagcagcagatgcgcatgcacgcccgggtgtcccgcgccaggcacgagcggcgccacagcgacgtggcgctcccgcgcaccgaggcgggcgcggcgctgccggagggcaaggccggcaaacgcgcgccggcggcagccagggcctcgccgccggactcgccgcgggcttactcggctgagagaactgcggagaccagggcgccgggcgccaagcagctaacgaaccacagcccgccggcgcccagacatgggccggttcccgcagaagccccggagctcaaagcccaggagcccctcaggaagcagagccgcctggaccccagctcggcggtcctcatgctgcggaacgactctttgagctcagaccagtccgagtcggtgcggccgtccccgcccaagccgcaccggtccaagagaggcggcaagaagcggcagatgtcggtgagcagctctgaggaggagggcgtgtcgacgcccgagtacaccagctgcgaggacgtggagctggagagcgagagcgtcagcgagaaaggtgatttggattattactggttggatcctgccacgtggcacagccgggagacatcacctattagttcgcatcctgtaacgtggcaaccatctaaagagggggaccgattaattggacgtgttattcttaacaagagaacaaccatgcccaaagactcaggtgcattgctgggtctgaaagttgttggaggaaaaatgactgacttaggacgacttggtgctttcatcaccaaagtaaagaagggtagcctagcagatgtagttggacacctaagagcaggggatgaagttctagaatggaatggtaaacccctgccgggagctacaaatgaagaagtttacaacattattttagaatcaaaatcagaacctcaagttgaaattattgtttcaaggcctattggtgacattccccggattcctgagagctcccaccctccactggagtccagttcaagttcctttgaatctcagaagatggaaaggccttccatttctgttatttctccaacaagtcctggagctctaaaagatgccccacaagtcttaccagggcaactttctgtgaagttgtggtatgataaagtgggacaccagctgattgtaaatgttctgcaagcaacagatctacctgctagagtagatggacgtcctcgaaatccctatgtaaaaatgtattttcttccagatagaagtgataaaagtaaaaggaggaccaaaacagtaaagaaaatactagaaccaaaatggaatcaaacttttgtctattcacatgtacatcgtagagattttagagaacgaatgttagaaataactgtgtgggaccaaccaagagtgcaagaagaagaaagtgaatttcttggagagatcctcatagaattggagacagcgcttttagatgatgaaccgcattggtataaacttcagacacatgatgagtcttcactacctctgcctcagccatcacctttcatgccaaggcgacatattcatggagaaagctctagcaaaaagctacaaagatctcagcgaatcagtgatagtgacatctcagattatgaggttgatgatggtattggcgtagttcctccagtaggctataggtctagtgctagagaaagtaaatctacaacattaactgtgccagaacagcaaagaacaactcatcaccgctcacgttcagtatctcctcatcgcggcaatgatcagggaaagccgcgttcacgtttaccaaatgtgccattacagaggagtttagatgaaattcatccaacaagaaggtcacgttctccaaccagacaccatgatgcctcccgaagtccagttgatcatagaaccagagatgtggatagtcagtatttatcagaacaagacagtgagcttcttatgctgcccagagcaaaacgaggacgaagtgcagaatgcctacatactaccagacatcttgttaggcactataaaacattacctcccaagatgcctttattacagagcagttctcactggaatatttacagtgaactgcagccctttcttgacagggctaggagtgctagtaccaactgcttgagaccagatactagtttgcattcaccagaacgagaaagaatgcaccgacagagaagtccaacacaatctcctccagcagacacatcgttcagcagtcgcaggggaagacagctcccacaagtgccagtgagaagcggcagtatagaacaagcaagcttagtagtggaggagcgaacaagacagatgaaaatgaaagtgcatcgatttaagcagacaacagggtctggttctagtcaagaacttgatcgcgagcaatattccaagtataacatacataaagatcagtacagaagctgtgataacgtctctgccaaatcatcagatagtgatgtcagtgatgtttccgccatttcccgaaccagcagtgcctcacgcctcagcagcacaagctttatgtcagagcaatctgagcgccccaggggtagaatcagttcatttacccccaaaatgcaaggcagacggatggggacttcaggaagatccatcatgaagagcaccagtgtcagtggagagatgtacacactggagcataatgacggcagccagtcagacacagctgtgggtacagttggagcaggtggaaagaaacggagatccagccttagtgccaaagtggttgccatagtgtctcgaaggagtagaagcacatcccagcttagtcaaacagaacaagaaaaatataactcttccacaaaagcaagcttagtagtggaggagcgaacaagacagatgaaaatgaaagtgcatcgatttaagcagaccacagggtctggttctagtcaagaactgatcgcgagcaatattccaa

SEQ ID NO: 315273 - DNA, 898 bp, Homo sapiens
agctggacggccccgggaggccgcagaccgccgggctccccgaggacacctcgcaccggaggaggagaggaggcagcgcccggccaggctgggagcacctacggccgcgcgggggcgggagccaggtggcctcggcgcgcccgcctcgcccgggcaccgagcaggaagtggctgcggcgcggcctcctcgcggtgcaacagggcggggaggcggccgcagcccgagccggagcccgagcgccgggagcgagacctcatggcagcggtggcgcccgcgggccccggggactccgcctcggccgccctggacgagctgtcactgaatttcacgtacggggcaccaggcgccggcaacggctccctctcgggcgactggtaccgcaggaaccagattcacctttttggagttttgctggctattttaggaaacttggtgatcagtatttctctaaatattcagaaatattctcaccttcagctggcacaacaagagcacccaaggccatacttcaagagtgtgctgtggtggggtggtgtcctgctgatggccgtgggagagacggggaactttgcagcctatggatttgctcccattactctgatcgctccgttaggctgtgtgtctgttacaggtaagccattctgtattttgacaaatagaaacttaaagagcagaataatcggagaaaaacacacaactgaaacaacaaatgcaccaaagaagaaagtctattgcctggtttcttatcacgttaacatggaacaattattctgctaatttcagcgatccattgtcatgctgtcacattaaccatgaagaaacttgcattttgtgactctaacacctatgtgtgaaagcctgatgcctgagtcttaataaattaacggtgacagaaga

SEQ ID NO: 315274 - DNA, 662 bp, Homo sapiens
agctggacggccccgggaggccgcagaccgccgggctccccgaggacacctcgcaccggaggaggagaggaggcagcgcccggccaggctgggagcacctacggccgcgcgggggcgggagccaggtggcctcggcgcgcccgcctcgcccgggcaccgagcaggaagtggctgcggcgcggcctcctcgcggtgcaacagggcggggaggcggccgcagcccgagccggagcccgagcgccgggagcgagacctcatggcagcggtggcgcccgcgggccccggggactccgcctcggccgccctggacgagctgtcactgaatttcacgtacggggcaccaggcgccggcaacggctccctctcgggcgactggtaccgcaggaaccagattcacctttttggagttttgctggctattttaggaaacttggtgatcagtatttctctaaatattcagaaatattctcaccttcagctggcacaacaagagcacccaaggccatacttcaagagtgtgctgtggtggggtggtgtcctgcaaatgccagtgtcgtaccgagtaagtctgaggctctcaaattgtctttcagaaatgtaacagaaataatggcactacctgtaacagacacacagcctaacggagcgatcagagtaatggg

SEQ ID NO: 315275 - DNA, 399 bp, Homo sapiens
  misc_feature (5)..(5): n is a, c, g, or t
  misc_feature (13)..(13): n is a, c, g, or t
aaaanggcccccncccccctccccggttcataaaaaaaaaaaaaacttggggaggggaacaccggggggtttaattgcttcaaaatattttggctaaaaaaaattttaaaagaaaagtaaaaggtccatcctaagggccaagttaaaaagcaagtgtttttttgtgaaccccccccccccaaacacatgggaagcctctccaattccacattccaagtctataacagctttggaaatgagtaacaatgacctctcatgtagtagattaaagcagaggcctttgccatatgattgttttttggcttaaatgtttgcttgccctgtaactgtaatactttggttaccagaatcacttgaaaacaaatacaataaaaaaatttctcaagcagaaaaaaaaat

SEQ ID NO: 315276 - DNA, 4595 bp, Homo sapiens
agctggacggccccgggaggccgcagaccgccgggctccccgaggacacctcgcaccggaggaggagaggaggcagcgcccggccaggctgggagcacctacggccgcgcgggggcgggagccaggtggcctcggcgcgcccgcctcgcccgggcaccgagcaggaagtggctgcggcgcggcctcctcgcggtgcaacagggcggggaggcggccgcagcccgagccggagcccgagcgccgggagcgagacctcatggcagcggtggcgcccgcgggccccggggactccgcctcggccgccctggacgagctgtcactgaatttcacgtacggggcaccaggcgccggcaacggctccctctcgggcgactggtaccgcaggaaccagattcacctttttggagttttgctggctattttaggaaacttggtgatcagtatttctctaaatattcagaaatattctcaccttcagctggcacaacaagagcacccaaggccatacttcaagagtgtgctgtggtggggtggtgtcctgctgatggccgtgggagagacggggaactttgcagcctatggatttgctcccattactctgatcgctccgttaggctgtgtgtctgttacaggtagtgccattatttctgttacatttctgaaagacaatttgagagcctcagacttactcggtacgacactggcatttgcaggaacatatttactggtgaactttgctccaaatataactcaggcaatctcagcaagaacagtacagtattaccttgtcggatggcagttcctgatctatgtgattttagaaatattaattttctgcattctcctgtatttctataaaagaaaaggaatgaagcatatggtgattctgctaaccctggtggcaattctagcctcattgactgttatttcagtaaaggccgtctcaggcatgatcactttttctgtgatggataaaatgcaactaacttaccccattttctatatcatgtttatcatcatgatagcatcttgtgttttccaagtcaagttcctgaatcaagccacgaaactctacaatacgacaacagtggtgccagttaatcatattttctttacaatcagtgccatcattgcaggtatcatattttatcaggaattccttggtgctccttttctcactgtatttatatatctttttgggtgttttctgtcattccttggtgtatttttggtcacaagaaatcgagaaaaggaacatctgcaacagtcttatattgattttggaaatattcctgacacaaccccagagagaaaggcttggagggaaacaaatgttggacaaaatacaaccagattcacatagcttatcctatggaactttgcctgatggaagtgactcaacaaagagccaaagtggagagaagaaagaggtctaaatgctgagaaggatggctgttggcctgttattcgataccacctttttaaaaaattgcacatgttcaatttgtgtcagcagctcttttataagctaacatgtgctagcattcatttcagtcctttcccccacctcagcgtctatggacaatcggggacttcctaagctctgacagtctaatatttccatggaatgtgatttggagtgttccccacaccctggacctctccctagtgattatctagccagctacaccttactcagagcccggctgctctagcaggaatgttgcacagaaacatacatttgcggtttggccacaggtcgcataggtggcttctcccacgggtagtgtcagttgcttcactttaaaaagtcacttcagccccacaacctcactcccaaaagaaaggtttgagagcgctcattttttttctaagacaccttttataagcctccctataaaaatctcacctttcaagtactaagttagaattgcaagtcatcttttctgaaaactaatgctatcaaagtcctcctttgaaaattaagggtctctttaaaattagaatttataaatggcattcagtgatagtgtacaccaaaattaaaagaccttgactggtgggctttttacgtgtaaggaagaggaagtttaagaagtaggactctgcttgtttcagtagcccatgtactaaaataggaacaatgcagagattagcacagcccctgcacaaggctgacacataaattcatgaagcgttagagacaaaaagtaggactaatgtttgtttattttttaataaaaatctagaatggtgatgttttcttcagctgtatgattctatcatacttgaaactgaagaaaaatttaatatcctatgtcttttttatagatcttataatttatcaagtggatttatatgtcttattctccatataagtctaaaaaatcacatttaaattcttagtgatagtttcactacacatcatttcttcccaaagtcattacctcaagctttgtaaattcttctagataaaaggagagttgtgattagagaactgaatttcagccatttaaacctgtagacatagaaaacaacccagtggtcaaacctgagcttcaagaggaagcccaagtcctcctgtttcctgaatggcttttccactccaattcatcacatatctgctaagacacatttgcaggtagaatccataataatatctgttatttatgatctacctaatatttaaaggagaagaaaagaagtagccttcgttgcagccaacatccaacaataagtcccacccttaatgacatttcaaagccttcagatcacttctgacatgtctgtccaatatcattccaatcaatagtcttgcatttaaataggttgtttaactcggtggtattgagactgtaaccttaatggctcaggtcttttagctttgttctttgtcataatctgcactcctggccagactgaccaaacctggctgcaaaggaaagagatttgaattgatcaccaatgtatgaaaaatacagaacccatgtctggctcctaaactcctggtaataattcccgccatcgtagcaagtgtcccatgcattcagataaagcagtcataatttatggtgtattttaccgaattggtccagcatattggtcctacaaggctcagccaagaaatgtatctggtgccttaaactacagatttctggtgactcttaaaactggtttacaaagattgagaaaacaattagattgaagagttttgcttcaagtagacctgcattcatagctagagtgcatgagattttcagcactgtagaatttcacacaggcacaagcataacaccagtactttagcagccgccaacagttgcatctattaaacgttttgagaaatgacattgacttatgcacatttaagcaatcaacaatgttttagaagtccaggtaacatataaaatatattcagacctagttttactttccatattgttgctccaaagtaaggtaaataggagttttagttgtactggcctgtaagattttttaaattacacagtgcatgacaacaactaaagccaactcagtccttctcttggcattgtgagttgaggacctttagccaactgttagctcatctgactatctgtctagaccaagggtcggcaaagttttcagtaaagacccacagagtacatattttggagtttgtgttgtctgtaccaacagacagacatggtgtctgtcccaactacccaactctgccattgtagcactaaagcagccatagacaagatgtaaacagaagagcatggctgtgttccagtaaaactttatttacaggccaggcatggtggctcatgcctgtaatcccagcactctgggaggctgaggctgacagatcatctgaggttaggagtttgggaccagcctggtcaacatagtgaaaccccatctctactaaaagtacaaaaattagccaggcatgacggtgggtgcctggagtcccagctacctgggaggctgaggcaggagaatcacttgaacccgggaggtggaggttgcagtgagccgagatcatgccattgcactccagcctgggcgatagagtaagactgtctcaaaaacaaacaaacaaacaaacaaacaaaaacaagtggccagtctgtgagctatagttcccaacacctggtctagactcttctgcccttgctctgcagcttctttcctgttgattgggcattcagggaaggagtttaaaaagtgacactcatggctcatgacaaatgagatactttgggagtgtggaaacatggcttgatatttgccttcagatatttttgcttatataagttctaaatggaagtgataagttcattcttagggtccaagttgaaaggcagtggttcttttgtgaacaccactaactacattcgaaaagcctctccaattccacattccaagtctataacagctttggaaatgagtaacaatgacctctcatgtagtagattaaagcagaggcctttgccatatgattgttttttggcttaaatgtttgcttgccctgtaactgtaatactttggttaccagaatcacttgaaaacaaatacaataaaaaaatttctcaagcagaaaaaaaaat

SEQ ID NO: 315277 - DNA, 684 bp, Homo sapiens
tcgtgggggagaagaggctgggtctagcatgggctaggagggcctcatcagtggtgctctctaccttcctactccttacccacctctttgtatttttatttattcagccctcccaccacaggactttggagattgctggtgccacaaggcttggtcagaaaaagcaaattaggcaaacaaacaaacaaaaacaagtggccagtctgtgagctatagttcccaacacctggtctagactcttctgcccttgctctgcagcttctttcctgttgattgggcattcagggaaggagtttaaaaagtgacactcatggctcatgacaaatgagatactttgggagtgtggaaacatggcttgatatttgccttcagatatttttgcttatataagttctaaatggaagtgataagttcattcttagggtccaagttgaaaggcagtggttcttttgtgaacaccactaactacattcgaaaagcctctccaattccacattccaagtctataacagctttggaaatgagtaacaatgacctctcatgtagtagattaaagcagaggcctttgccatatgattgttttttggcttaaatgtttgcttgccctgtaactgtaatactttggttaccagaatcacttgaaaacaaatacaataaaaaaatttctcaagcagaaaaaaaaat

SEQ ID NO: 315278 - DNA, 1454 bp, Homo sapiens
agctggacggccccgggaggccgcagaccgccgggctccccgaggacacctcgcaccggaggaggagaggaggcagcgcccggccaggctgggagcacctacggccgcgcgggggcgggagccaggtggcctcggcgcgcccgcctcgcccgggcaccgagcaggaagtggctgcggcgcggcctcctcgcggtgcaacagggcggggaggcggccgcagcccgagccggagcccgagcgccgggagcgagacctcatggcagcggtggcgcccgcgggccccggggactccgcctcggccgccctggacgagctgtcactgaatttcacgtacggggcaccaggcgccggcaacggctccctctcgggcgactggtaccgcaggaaccagattcacctttttggagttttgctggctattttaggaaacttggtgatcagtatttctctaaatattcagaaatattctcaccttcagctggcacaacaagagcacccaaggccatacttcaagagtgtgctgtggtggggtggtgtcctgctgatggccgtgggagagacggggaactttgcagcctatggatttgctcccattactctgatcgctccgttaggctgtgtgtctgttacaggtagtgccattatttctgttacatttctgaaagacaatttgagagcctcagacttactcggtacgacactggcatttgcaggaacatatttactggtgaactttgctccaaatataactcaggcaatctcagcaagaacagtacagtattaccttgtcggatggcagttcctgatctatgtgattttagaaatattaattttctgcattctcctgtatttctataaaagaaaaggaatgaagcatatggtgattctgctaaccctggtggcaattctagcctcattgactgttatttcagtaaaggccgtctcaggcatgatcactttttctgtgatggataaaatgcaactaacttaccccattttctatatcatgtttatcatcatgatagcatcttgtgttttccaagtcaagttcctgaatcaagccacgaaactctacaatacgacaacagtggtgccagttaatcatattttctttacaatcagtgccatcattgcaggtatcatattttatcaggaattccttggtgctccttttctcactgtatttatatatctttttgggtgagtaaatgtctcagaggtaaagcatgtgaaattctattacttttacgtaggattttcggcattgtaccggaggtatagaaaattggaaaataatataagaaacatcagtttcctgagctcctaaaagaaacatattttttaacttaaggccctaaacagggctcagcgtctttggctttgtgacttaggtatatctctgctgttctgaaacattggggatttccaattccaggccaaagacaagatacatc

SEQ ID NO: 315279 - DNA, 377 bp, Homo sapiens
ttatttttaactctattttttatttcacaaagctcagtgcataggctccgtagtagctttagaagtcactatcaaaggctatttttctatgttgttatatgcattcgacgtggaaaagaagacacaaccccagagagaaaggcttggaggtgagtgaatgcttcatgtgaatctccagactaaccccacctgatttccatggccagcatgtagatcctgtggggtggggatagtggctctgacacagacaattcgctatcacatagctacagacatggcgtttcaagggccttttcttccttgatattcatctcttctctttagagagtgcccacatagaataaaagagaggtaataaaatgtggcctagattgagg

SEQ ID NO: 315280 - DNA, 935 bp, Homo sapiens
agctggacggccccgggaggccgcagaccgccgggctccccgaggacacctcgcaccggaggaggagaggaggcagcgcccggccaggctgggagcacctacggccgcgcgggggcgggagccaggtggcctcggcgcgcccgcctcgcccgggcaccgagcaggaagtggctgcggcgcggcctcctcgcggtgcaacagggcggggaggcggccgcagcccgagccggagcccgagcgccgggagcgagacctcatggcagcggtggcgcccgcgggccccggggactccgcctcggccgccctggacgagctgtcactgaatttcacgtacggggcaccaggcgccggcaacggctccctctcgggcgactggtaccgcaggaaccagattcacctttttggagttttgctggctattttaggaaacttggtgatcagtatttctctaaatattcagaaatattctcaccttcagctggcacaacaagagcacccaaggccatacttcaagagtgtgctgtggtggggtggtgtcctgctgatggccgtgggagagacggggaactttgcagcctatggatttgctcccattactctgatcgctccgttaggctgtgtgtctgttacaggtagtgccattatttctgttacatttctgaaagacaatttgagagcctcagacttactcggtacgacactggcatttgcaggaacatatttactggtgaactttgctccaaatataactcaggcaatctcagcaagaacagtacagtattaccttgtcggatggcagttcctgatctatgtgatttacattaaatggaagcctcacagagacaaggctcaggagcttttcctctgatctggtacagaaaagaaaggaaggaagatttgagaagcccagtgtataccagccagagaagaataaa

SEQ ID NO: 315281 - DNA, 700 bp, Homo sapiens
agctggacggccccgggaggccgcagaccgccgggctccccgaggacacctcgcaccggaggaggagaggaggcagcgcccggccaggctgggagcacctacggccgcgcgggggcgggagccaggtggcctcggcgcgcccgcctcgcccgggcaccgagcaggaagtggctgcggcgcggcctcctcgcggtgcaacagggcggggaggcggccgcagcccgagccggagcccgagcgccgggagcgagacctcatggcagcggtggcgcccgcgggccccggggactccgcctcggccgccctggacgagctgtcactgaatttcacgtacggggcaccaggcgccggcaacggctccctctcgggcgactggtaccgcaggaaccaggtaagggccgccccgcagccaccgcagcccggtggggacgcggccagggcggctggctccgggcgcctctgcgcctcggccgctttcctgccagctctcaggaagacacccggcctctccgagtgggaagaggtgacatgcaatgtttcccgcattgacctaagtccgcctcatccggaagcgcgggggtccgcccagtcttcctctcccgggcacccggcactgggagtgggcgcccaggtcttcggccttgacctcagccacccgttcctgggacctccgggtcccgatcccgcctccccagcctgc

SEQ ID NO: 315282 - DNA, 4567 bp, Homo sapiens
agctggacggccccgggaggccgcagaccgccgggctccccgaggacacctcgcaccggaggaggagaggaggcagcgcccggccaggctgggagcacctacggccgcgcgggggcgggagccaggtggcctcggcgcgcccgcctcgcccgggcaccgagcaggaagtggctgcggcgcggcctcctcgcggtgcaacagggcggggaggcggccgcagcccgagccggagcccgagcgccgggagcgagacctcatggcagcggtggcgcccgcgggccccggggactccgcctcggccgccctggacgagctgtcactgaatttcacgtacggggcaccaggcgccggcaacggctccctctcgggcgactggtaccgcaggaaccagattcacctttttggagttttgctggctattttaggaaacttggtgatcagtatttctctaaatattcagaaatattctcaccttcagctggcacaacaagagcacccaaggccatacttcaagagtgtgctgtggtggggtggtgtcctgctgatggccgtgggagagacggggaactttgcagcctatggatttgctcccattactctgatcgctccgttaggctgtgtgtctgttacaggtagtgccattatttctgttacatttctgaaagacaatttgagagcctcagacttactcggtacgacactggcatttgcaggaacatatttactggtgaactttgctccaaatataactcaggcaatctcagcaagaacagtacagtattaccttgtcggatggcagttcctgatctatgtgattttagaaatattaattttctgcattctcctgtatttctataaaagaaaaggaatgaagcatatggtgattctgctaaccctggtggcaattctagcctcattgactgttatttcagtaaaggccgtctcaggcatgatcactttttctgtgatggataaaatgcaactaacttaccccattttctatatcatgtttatcatcatgatagcatcttgtgttttccaagtcaagttcctgaatcaagccacgaaactctacaatacgacaacagtggtgccagttaatcatattttctttacaatcagtgccatcattgcaggtatcatattttatcaggaattccttggtgctccttttctcactgtatttatatatctttttgggtgttttctgtcattccttggtgtatttttggtcacaagaaatcgagaaaaggaacatctgcaacagtcttatattgattttggaaatattcctgggaaacaaatgttggacaaaatacaaccagattcacatagcttatcctatggaactttgcctgatggaagtgactcaacaaagagccaaagtggagagaagaaagaggtctaaatgctgagaaggatggctgttggcctgttattcgataccacctttttaaaaaattgcacatgttcaatttgtgtcagcagctcttttataagctaacatgtgctagcattcatttcagtcctttcccccacctcagcgtctatggacaatcggggacttcctaagctctgacagtctaatatttccatggaatgtgatttggagtgttccccacaccctggacctctccctagtgattatctagccagctacaccttactcagagcccggctgctctagcaggaatgttgcacagaaacatacatttgcggtttggccacaggtcgcataggtggcttctcccacgggtagtgtcagttgcttcactttaaaaagtcacttcagccccacaacctcactcccaaaagaaaggtttgagagcgctcattttttttctaagacaccttttataagcctccctataaaaatctcacctttcaagtactaagttagaattgcaagtcatcttttctgaaaactaatgctatcaaagtcctcctttgaaaattaagggtctctttaaaattagaatttataaatggcattcagtgatagtgtacaccaaaattaaaagaccttgactggtgggctttttacgtgtaaggaagaggaagtttaagaagtaggactctgcttgtttcagtagcccatgtactaaaataggaacaatgcagagattagcacagcccctgcacaaggctgacacataaattcatgaagcgttagagacaaaaagtaggactaatgtttgtttattttttaataaaaatctagaatggtgatgttttcttcagctgtatgattctatcatacttgaaactgaagaaaaatttaatatcctatgtcttttttatagatcttataatttatcaagtggatttatatgtcttattctccatataagtctaaaaaatcacatttaaattcttagtgatagtttcactacacatcatttcttcccaaagtcattacctcaagctttgtaaattcttctagataaaaggagagttgtgattagagaactgaatttcagccatttaaacctgtagacatagaaaacaacccagtggtcaaacctgagcttcaagaggaagcccaagtcctcctgtttcctgaatggcttttccactccaattcatcacatatctgctaagacacatttgcaggtagaatccataataatatctgttatttatgatctacctaatatttaaaggagaagaaaagaagtagccttcgttgcagccaacatccaacaataagtcccacccttaatgacatttcaaagccttcagatcacttctgacatgtctgtccaatatcattccaatcaatagtcttgcatttaaataggttgtttaactcggtggtattgagactgtaaccttaatggctcaggtcttttagctttgttctttgtcataatctgcactcctggccagactgaccaaacctggctgcaaaggaaagagatttgaattgatcaccaatgtatgaaaaatacagaacccatgtctggctcctaaactcctggtaataattcccgccatcgtagcaagtgtcccatgcattcagataaagcagtcataatttatggtgtattttaccgaattggtccagcatattggtcctacaaggctcagccaagaaatgtatctggtgccttaaactacagatttctggtgactcttaaaactggtttacaaagattgagaaaacaattagattgaagagttttgcttcaagtagacctgcattcatagctagagtgcatgagattttcagcactgtagaatttcacacaggcacaagcataacaccagtactttagcagccgccaacagttgcatctattaaacgttttgagaaatgacattgacttatgcacatttaagcaatcaacaatgttttagaagtccaggtaacatataaaatatattcagacctagttttactttccatattgttgctccaaagtaaggtaaataggagttttagttgtactggcctgtaagattttttaaattacacagtgcatgacaacaactaaagccaactcagtccttctcttggcattgtgagttgaggacctttagccaactgttagctcatctgactatctgtctagaccaagggtcggcaaagttttcagtaaagacccacagagtacatattttggagtttgtgttgtctgtaccaacagacagacatggtgtctgtcccaactacccaactctgccattgtagcactaaagcagccatagacaagatgtaaacagaagagcatggctgtgttccagtaaaactttatttacaggccaggcatggtggctcatgcctgtaatcccagcactctgggaggctgaggctgacagatcatctgaggttaggagtttgggaccagcctggtcaacatagtgaaaccccatctctactaaaagtacaaaaattagccaggcatgacggtgggtgcctggagtcccagctacctgggaggctgaggcaggagaatcacttgaacccgggaggtggaggttgcagtgagccgagatcatgccattgcactccagcctgggcgatagagtaagactgtctcaaaaacaaacaaacaaacaaacaaacaaaaacaagtggccagtctgtgagctatagttcccaacacctggtctagactcttctgcccttgctctgcagcttctttcctgttgattgggcattcagggaaggagtttaaaaagtgacactcatggctcatgacaaatgagatactttgggagtgtggaaacatggcttgatatttgccttcagatatttttgcttatataagttctaaatggaagtgataagttcattcttagggtccaagttgaaaggcagtggttcttttgtgaacaccactaactacattcgaaaagcctctccaattccacattccaagtctataacagctttggaaatgagtaacaatgacctctcatgtagtagattaaagcagaggcctttgccatatgattgttttttggcttaaatgtttgcttgccctgtaactgtaatactttggttaccagaatcacttgaaaacaaatacaataaaaaaatttctcaagcagaaaaaaaaat

SEQ ID NO: 315283 - DNA, 176 bp, Homo sapiens
gaattgcaccactgcactccagcctggacaacagagcaaggttgtctcaaaaaaaagaaaagaaaagaaaaaatacccgaagctagcctgtgcctcccttcccctggaagaaggaacacaggaatctttgcttggcttcagagcttgaagaggaggcctttttggtgggaatggag

SEQ ID NO: 315284 - DNA, 539 bp, Homo sapiens
ctgtctcccgccacccacaccagctgtcccactcaccatggagaagatcctgatcctcctgcttgtcgccctctctgtggcctatgcagctcctggcccccgggggatcattatcaacctggagaacggtgagctctgcatgaatagtgcccagtgtaagagcaattgctgccagcattcaagtgcgctgggcctggcccgctgcacatccatggccagcgagaacagcgagtgctctgtcaagacgctctatgggatttactacaagtgtccctgtgagcgtggcctgacctgtgagggagacaagaccatcgtgggctccatcaccaacaccaactttggcatctgccatgacgctggacgctccaagcagtgagactgcccacccactcccacacctagcccagaatgctgtaggccactaggcgcaggggcatctctcccctgctccagcgcatctcccgggctggccacctccttgaccagcatatctgttttctgattgcgctcttcacaattaaaggcctcctgcaaacctt

SEQ ID NO: 315285 - DNA, 570 bp, Homo sapiens
ctgtctcccgccacccacaccagctgtcccactcaccatggagaagatcctgatcctcctgcttgtcgccctctctgtggcctatgcagctcctggcccccgggggatcattatcaacctggagaacggtgagctctgcatgaatagtgcccagtgtaagagcaattgctgccagcattcaagtgcgctgggcctggcccgctgcacatccatggccagcgagaacagcgagtgctctgtcaagacgctctatgggatttactacaagtgtccctgtgagcgtggcctgacctgtgagggagacaagaccatcgtgggctccatcaccaacaccaactttggcatctgccatgacgctggacgctccaagcagtgagactgcccacccactcccacacctagcccagaatgctgtaggccactaggcgcaggggcatctctcccctgctccagcgcatctcccgggctggccacctccttgaccagcatatctgttttctgattgcgctcttcacaattaaaggcctcctgcaaaccttaaaaaaaaaaaaaaaaaaaacaaaaaaaaaa

SEQ ID NO: 315286 - DNA, 712 bp, Homo sapiens
ctgtctcccgccacccacaccagctgtcccactcaccatggagaagatcctgatcctcctgcttgtcgccctctctgtggcctatgcagctcctggcccccgggggatcattatcaacctggagaacggtgagctctgcatgaatagtgcccagtgtaagagcaattgctgccagcattcaagtgcgctgggcctggcccgctgcacatccatggccagcgagaacagcgagtgctctgtcaagacgctctatgggatttactacaagtgtccctgtgagcgtggcctgacctgtgagggagacaagaccatcgtgggctccatcaccaacaccaactttggcatctgccatgacgctggacgctccaagcagtgagactgcccacccactcccacacctagcccagaatgctgtaggccactaggcgcaggggcatctctcccctgctccagcgcatctcccgggctggccacctccttgaccagcatatctgttttctgattgcgctcttcacaattaaaggcctcctgcaaaccttaaaagcgaaaaaaaaggaaaagcccacaggccccccaaccaaaaaagctattttttgagttgcccctgtttgaatggaataaggattgaagggatatgagggggttttttttgggggggggctcggtccccaaaatccccattttggaggtcttattcccccctttattgggg

SEQ ID NO: 315287 - DNA, 447 bp, Homo sapiens
ctgtctcccgccacccacaccagctgtcccactcaccatggagaagatcctgatcctcctgcttgtcgccctctctgtggcctatgcagctcctggcccccgggggatcattatcaacctgacgctctatgggatttactacaagtgtccctgtgagcgtggcctgacctgtgagggagacaagaccatcgtgggctccatcaccaacaccaactttggcatctgccatgacgctggacgctccaagcagtgagactgcccacccactcccacacctagcccagaatgctgtaggccactaggcgcaggggcatctctcccctgctccagcgcatctcccgggctggccacctccttgaccagcatatctgttttctgattgcgctcttcacaattaaaggcctcctgcaaaccttaaaaaaaaaaaaaaaaaaaacaaaaaaaaaa

SEQ ID NO: 315288 - DNA, 637 bp, Homo sapiens
ctgtctcccgccacccacaccagctgtcccactcaccatggagaagatcctgatcctcctgcttgtcgccctctctgtggcctatgcagctcctggcccccgggggatcattatcaacctggctggagtgtagtggcacaatctcggctcactgcaatctctgcttcccgggttcaaatgattctcctgcctcagcctcccaagaagctgggattacaggagaacggtgagctctgcatgaatagtgcccagtgtaagagcaattgctgccagcattcaagtgcgctgggcctggcccgctgcacatccatggccagcgagaacagcgagtgctctgtcaagacgctctatgggatttactacaagtgtccctgtgagcgtggcctgacctgtgagggagacaagaccatcgtgggctccatcaccaacaccaactttggcatctgccatgacgctggacgctccaagcagtgagactgcccacccactcccacacctagcccagaatgctgtaggccactaggcgcaggggcatctctcccctgctccagcgcatctcccgggctggccacctccttgaccagcatatctgttttctgattgcgctcttcacaattaaaggcctcctgcaaacctt

SEQ ID NO: 315289 - DNA, 690 bp, Homo sapiens
ctgtctcccgccacccacaccagctgtcccactcaccatggagaagatcctgatcctcctgcttgtcgccctctctgtggcctatgcagctcctggcccccgggggatcattatcaacctggagaacggtgagctctgcatgaatagtgcccagtgtaagagcaattgctgccagcattcaagtgcgctgggcctggcccgctgcacatccatggccagcgagaacagcgagtgctctgtcaagacgctctatgggatttactacaagtgtccctgtgagcgtggcctgacctgtgagggagacaagaccatcgtgggctccatcaccaacaccaactttggcatctgccatgacgctggacgctccaagcagtgagactgcccacccactcccacacctagcccagaatgctgtaggccactaggcgcaggggcatctctcccctgctccagcgcatctcccgggctggccacctccttgaccagcatatctgttttctgattgcgctcttcacaattaaaggcctcctgcaaaccttaaaaaaaaaaaaatttagaaataatgtaatgatatgcagaataggtgaggtatttgtgtttgttgatctttttgttatataatttgtggaatttcaataaaaaaaaaatttagggggggggcccatagaccaaatgcccccttttggtggg

SEQ ID NO: 315290 - DNA, 416 bp, Homo sapiens
ctgtctcccgccacccacaccagctgtcccactcaccatggagaagatcctgatcctcctgcttgtcgccctctctgtggcctatgcagctcctggcccccgggggatcattatcaacctgacgctctatgggatttactacaagtgtccctgtgagcgtggcctgacctgtgagggagacaagaccatcgtgggctccatcaccaacaccaactttggcatctgccatgacgctggacgctccaagcagtgagactgcccacccactcccacacctagcccagaatgctgtaggccactaggcgcaggggcatctctcccctgctccagcgcatctcccgggctggccacctccttgaccagcatatctgttttctgattgcgctcttcacaattaaaggcctcctgcaaacctt

SEQ ID NO: 315291 - DNA, 678 bp, Homo sapiens
cagctgtcccactcaccatggagaagatcctgatcctcctgcttgtcgccctctctgtggcctatgcagctcctggcccccgggggatcattatcaacctggtaagagggtcttcaggggaggcgcctcctgagtccccagatgaagacttcctaagcttggaccttgacctctgatgtctccacctggactggcaggggctgggaggagtggcatcttgcatccctctgtttacttccatgtcctgtcctatgcctcttcccagaggccacaggaaaggctgatcagcccctctccagctccaactggagcatgctcagagcagcagctcaacctggctatgagggaccttttttttcttttttttctttttgaaacggagtcttgctctgtcaccaggctggagtgtagtggcacaatctcggctcactgcaatctctgcttcccgggttcaaatgattctcctgcctcagcctcccaagaagctgggattacaggtgcctgccataacgctcagctattttttgtatttttagtagaaatagggtttcaccatgttgcccaggctagtctcaaactcctgacctcgtgatccgcccacctcggcctcccaaagtgctgggattacaggcatgagccacctcacctggccctacgagggagctttgtaaaaatcca

SEQ ID NO: 315292 - DNA, 331 bp, Homo sapiens
ggaacttctgagagcagctctcgctagccgcattctttcaccctccttagtcccccagttctagctgcgcacggatgccaggaggctcttgagggagtgggtgtcacacaggcagaaaggagggaaccagggagatgggaccatgacggacggctttttactgctttcttccagatgattcaactttccccagctcaggccctcaaccagtctatggccagttcatgacaagaagtaaaaactcacaaactgcccactcaagcccaaaccaattttgaacaagttcccaaaaggttttgcagggagatgaactagcctggaacccactaag

SEQ ID NO: 315293 - DNA, 893 bp, Homo sapiens
tggaagcccaaggtgggtggatcgcttgagcccaggagttcaagaccagcctgggcaacatgatgctgaagaataccagcctcctatatggaaatcatacttatatcagttacagcaagaggcacctcgtcccaagagaatcatttgtcctcgggaggtggaaaacagaccaaaatattatggaagagagtttcatgggatcatctctcgggagcaggcggatgagcttcttggaggcgtggagggtgcctacatccttagagaaagccagcggcaaccaggatgctacacgctggctctcaggtttggaaaccagaccttaaactacaggctcttccacgacgggaaacactttgtgggtgagaagaggtttgagtcgattcatgatctggtgacagatggcttgataacactgtacatagaaacaaaagctgccgagtacatttcaaaaatgacaactaaccccatctatgaacacattggatatgccaccctactcagagaaaaagtatccagaaggctgagcaggtctaaaaatgaaccaagaaaaacaaacgtcacacatgaagaacacacagcggtggaaaagtgtctggcttaaaagaagacagctggcttctcacatctgctcctgtattcaacctgggatatattgttttatttgaagtataggaagaagtctggcctcacacagatgtgtagttggaaaaaagaggagtgttcttatagccttttcaggcaggaagtagagcctgggctgctgaaggcttcccgccacccgatagagcctgagaatggagcctggagaaagtagagcctggagatggggagagagaagctgagtcctgaggcctgatctgagcttctcgcggagctgcccttcagcccgcccc

SEQ ID NO: 315294 - DNA, 3422 bp, Homo sapiens
agaggcgggagcccaggagagggtgcgggagctggcggggcggctcggagctgccaggacgccctggtcccagccgcgcacaggggagcgtggacggcagaggggctcggcgggagccgagatccgcccgtcccggctgcccctcggcctccctctgctcccacctaccccctgacacccatagaaaagcgtgcaaaggcgcggagcgggacggaaaccacaaataaatagcggcggcggcagcgcgtcatctggtggagcaggaagtgcaggcagagtccggaggctggtgctttctgcgcgtccccaggactttgccatgggctgggggccgcggaggctgcgagcggccgggcgagggcagcggcggcggcgtccgcaccggggctgagcgagcagcgacgcgaggggcgcgcggagatggcagcgtccagcaactccagcctgtccggctcgtcggtgtcctccgatgctgaagaataccagcctcctatatggaaatcatacttatatcagttacagcaagaggcacctcgtcccaagagaatcatttgtcctcgggaggtggaaaacagaccaaaatattatggaagagagtttcatgggatcatctctcgggagcaggcggatgagcttcttggaggcgtggagggtgcctacatccttagagaaagccagcggcaaccaggatgctacacgctggctctcaggtttggaaaccagaccttaaactacaggctcttccacgacgggaaacactttgtgggtgagaagaggtttgagtcgattcatgatctggtgacagatggcttgataacactgtacatagaaacaaaagctgccgagtacatttcaaaaatgacaactaaccccatctatgaacacattggatatgccaccctactcagagaaaaagtatccagaaggctgagcaggtctaaaaatgaaccaagaaaaacaaacgtcacacatgaagaacacacagcggtggaaaagatctcctccctggttcgaagggctgccctcacacacaacgacaaccacttcaattatgagaagacacacaactttaaggtccacacgttccgaggcccacactggtgtgaatattgtgccaatttcatgtgggggctcatcgcccaaggggtccggtgctcagactgtggattgaacgtacacaaacagtgttccaagcacgttcccaatgactgccaacctgatctcaagaggatcaagaaagtgtactgttgtgacctcacaacacttgtgaaggctcacaacactcagagacccatggtggtagacatatgcattcgggaaattgaagcaagaggattaaaatcggaaggcctttacagagtctctgggttcactgaacacattgaagatgtcaaaatggcatttgacagagatggtgaaaaggccgatatatctgccaatgtctatccagacataaacatcatcactggagcccttaaactgtatttcagagacttacccatccctgtcatcacatatgatacctattccaaatttatagatgcagcaaaaatctccaatgcagatgagaggctggaagccgtccatgaagtgctgatgctgctgcctcctgcccactatgaaaccctccggtacctaatgatccacctcaaaaaggttactatgaatgaaaaagacaatttcatgaatgcagaaaatctggggatcgtgtttgggcccactctgatgaggccccctgaggacagcaccctgaccaccctgcatgatatgcggtaccaaaagctgattgtgcagattttaatagaaaacgaagacgttttattctaatccatcagggaaatgagctgaatggccccagcaccatccaagttgacacagctaaaggaataaaaacatttcttaccacttgatttgttttccaagcaagtgctagaatttgctggactgcagaggatcgctgagtggggtactgtgtctcatagacatgcgccacctccacgtgagaacaagggtgaaggtgagggaagcccctcaccttgggtcttttgctgtgcctcctatgtatgtctggtttgctggaagagtgattaatacatctttaatttattaaaaaacaatgtagacctttaaacttcagtcttattggtaataaaagggaacttaattcatacaggtacttgatacagttatacattttccacttacaaaaagaagacaattctgttaaatgaaacctgtatcgtaaaatgtatttttattttacccacgagaatgttgttatttttagcaaatagaactcaatgcagtgcattggttattaccctgtgtaccttgtccctcattttgctgtgacaccctgaaaaagctgaccacaaatgcagtattatcttgacatacctctgtcctcctcagtgctttttaatgaaatttcacctgccccttgtgttcctgctttggatagtttttgctcttaagcattggcattcttctattgtatggtatgtatttatagcaattgtaggatggtctgaaatgtccacacactttctatgcatacaaattttgtgaattcccaaagtatgctttggaattggtcatagtcttttcgtatcatgagtgtgtatcccagaagatacagaatgcggtcattttacctgaaattatttgagaacactggatgtatctggtctgtgtaaaaagttagcacttttaccctcttttcttcctggccaagccctctgaattcatctgttaatatcaaattgtatttttgccacatttctgtattggtgaaaagcgaatctgcagaataactgccaacgtttttcattcttgttttacaaacctattttttaaagtgagaataaggttggtttttaccaaatatttgttcctccttgacaaaagtagctctgtgtggataatatgattttattactacagttccagtcacttggttatatttatcttagcatgagcctttcacaccaagatttctatattttgtaacataggtgaaatatttaaaacatcaaaaactgtaaatctagatttttaaaaaatccaactgcaatgtcttttcctttgattgagatgatttgtgtaaactcaccagtcttgctttggagtgagcagaagagaatgactattttacgtggagcatcattgtgtgactgttgacctggacagtcccaagggctatgcagatggactccattggcacagggaggtttgacctcttccctgctattatccctcctcccaactgtacagatttgtttgttgtagtttatgtacttcttgatactgtcaaaaaattatctggaaatggttttattttgtgaagtgaacaatactttgtaatttatgatagtgtaaatggaaggcaaagcatcacatgtattaaattcttctgtctatta

SEQ ID NO: 315295 - DNA, 1680 bp, Homo sapiens
gttctctagagtcctgctgtgatcttgggtgcctggagctggtcgtcgtattcaactgatcaatagacgggacgttttattctaatccatcagggaaatgagctgaatggccccagcaccatccaagttgacacagctaaaggaataaaaacatttcttaccacttgatttgttttccaagcaagtgctagaatttgctggactgcagaggatcgctgagtggggtactgtgtctcatagacatgcgccacctccacgtgagaacaagggtgaaggtgagggaagcccctcaccttgggtcttttgctgtgcctcctatgtatgtctggtttgctggaagagtgattaatacatctttaatttattaaaaaacaatgtagacctttaaacttcagtcttattggtaataaaagggaacttaattcatacaggtacttgatacagttatacattttccacttacaaaaagaagacaattctgttaaatgaaacctgtatcgtaaaatgtatttttattttacccacgagaatgttgttatttttagcaaatagaactcaatgcagtgcattggttattaccctgtgtaccttgtccctcattttgctgtgacaccctgaaaaagctgaccacaaatgcagtattatcttgacatacctctgtcctcctcagtgctttttaatgaaatttcacctgccccttgtgttcctgctttggatagtttttgctcttaagcattggcattcttctattgtatggtatgtatttatagcaattgtaggatggtctgaaatgtccacacactttctatgcatacaaattttgtgaattcccaaagtatgctttggaattggtcatagtcttttcgtatcatgagtgtgtatcccagaagatacagaatgcggtcattttacctgaaattatttgagaacactggatgtatctggtctgtgtaaaaagttagcacttttaccctcttttcttcctggccaagccctctgaattcatctgttaatatcaaattgtatttttgccacatttctgtattggtgaaaagcgaatctgcagaataactgccaacgtttttcattcttgttttacaaacctattttttaaagtgagaataaggttggtttttaccaaatatttgttcctccttgacaaaagtagctctgtgtggataatatgattttattactacagttccagtcacttggttatatttatcttagcatgagcctttcacaccaagatttctatattttgtaacataggtgaaatatttaaaacatcaaaaactgtaaatctagatttttaaaaaatccaactgcaatgtcttttcctttgattgagatgatttgtgtaaactcaccagtcttgctttggagtgagcagaagagaatgactattttacgtggagcatcattgtgtgactgttgacctggacagtcccaagggctatgcagatggactccattggcacagggaggtttgacctcttccctgctattatccctcctcccaactgtacagatttgtttgttgtagtttatgtacttcttgatactgtcaaaaaattatctggaaatggttttattttgtgaagtgaacaatactttgtaatttatgatagtgtaaatggaaggcaaagcatcacatgtattaaattcttctgtctatta

SEQ ID NO: 315296 - DNA, 1930 bp, Homo sapiens
agaggcgggagcccaggagagggtgcgggagctggcggggcggctcggagctgccaggacgccctggtcccagccgcgcacaggggagcgtggacggcagaggggctcggcgggagccgagatccgcccgtcccggctgcccctcggcctccctctgctcccacctaccccctgacacccatagaaaagcgtgcaaaggcgcggagcgggacggaaaccacaaataaatagcggcggcggcagcgcgtcatctggtggagcaggaagtgcaggcagagtccggaggctggtgctttctgcgcgtccccaggactttgccatgggctgggggccgcggaggctgcgagcggccgggcgagggcagcggcggcggcgtccgcaccggggctgagcgagcagcgacgcgaggggcgcgcggagatggcagcgtccagcaactccagcctgtccggctcgtcggtgtcctccgatgctgaagaataccagcctcctatatggaaatcatacttatatcagttacagcaagaggcacctcgtcccaagagaatcatttgtcctcgggaggtggaaaacagaccaaaatattatggaagagagtttcatgggatcatctctcgggagcaggcggatgagcttcttggaggcgtggagggtgcctacatccttagagaaagccagcggcaaccaggatgctacacgctggctctcaggtttggaaaccagaccttaaactacaggctcttccacgacgggaaacactttgtgggtgagaagaggtttgagtcgattcatgatctggtgacagatggcttgataacactgtacatagaaacaaaagctgccgagtacatttcaaaaatgacaactaaccccatctatgaacacattggatatgccaccctactcagagaaaaagtatccagaaggctgagcaggtctaaaaatgaaccaagaaaaacaaacgtcacacatgaagaacacacagcggtggaaaagatctcctccctggttcgaagggctgccctcacacacaacgacaaccacttcaattatgagaagacacacaactttaaggtccacacgttccgaggcccacactggtgtgaatattgtgccaatttcatgtgggggctcatcgcccaaggggtccggtgctcagactgtggattgaacgtacacaaacagtgttccaagcacgttcccaatgactgccaacctgatctcaagaggatcaagaaagtgtactgttgtgacctcacaacacttgtgaaggctcacaacactcagagacccatggtggtagacatatgcattcgggaaattgaagcaagaggattaaaatcggaaggcctttacagagtctctgggttcactgaacacattgaagatgtcaaaatggcatttgacagagatggtgaaaaggccgatatatctgccaatgtctatccagacataaacatcatcactggagcccttaaactgtatttcagagacttacccatccctgtcatcacatatgatacctattccaaatttatagatgcagcaaaaatctccaatgcagatgagaggctggaagccgtccatgaagtgctgatgctgctgcctcctgcccactatgaaaccctccggtacctaatgatccacctcaaaaagtaagctcatgtctcgtgcacaaagcctgctctgctcctagagcggttaatgcatgaggaaaagtggacggcattcctccccagccataactgctggagtttcactgtgccaggaaccactccaggcactttcagtgtatcatccctatgaaaggggcgccactgtgatggctcacgcctgtaatcccagcactttgggaggccgaggtgggcggatcatgaggtcaggagattgagaccatcctggctaacacggtgaaaccctgtctctacta

SEQ ID NO: 315297 - DNA, 2993 bp, Homo sapiens
gtgtgtttgagtgtgaaatgtgctaataaggaggagagacctctcctttgcaatgtgctgcggcaggagaaagcaggctgccggcccctgcctccctgaatcctcagtggctgactggataccgcttctgggggttgctgtgcacatgaatgtttgctattgttccaggcgcacgtcggccttaagaaatagcacaaaacaggcccatccttattcagaagccgggccccctccatcactcaaactgggcctttcaggtcacatgccggaggctgctgcagacaggacccagctgcctcaaatctgccgcctaacataagctgcggttcgaaaatcctgacagcacagggcttcctgggctctgcagagcaaactggaaagagctgggatccaggcactatgttctctgaagaactgtggctggaaaatgagaaaaagtgtgctgtggttcggaagtctaagcagggcaggaaacgccaagaactgctggccgtagccttcggggtgaaggtgggtgtcaaaggcggctttctttggccccctctcaaactctttgcctgttcacagatctcctccctggttcgaagggctgccctcacacacaacgacaaccacttcaattatgagaagacacacaactttaaggtccacacgttccgaggcccacactggtgtgaatattgtgccaatttcatgtgggggctcatcgcccaaggggtccggtgctcagactgtggattgaacgtacacaaacagtgttccaagcacgttcccaatgactgccaacctgatctcaagaggatcaagaaagtgtactgttgtgacctcacaacacttgtgaaggctcacaacactcagagacccatggtggtagacatatgcattcgggaaattgaagcaagaggattaaaatcggaaggcctttacagagtctctgggttcactgaacacattgaagatgtcaaaatggcatttgacagagatggtgaaaaggccgatatatctgccaatgtctatccagacataaacatcatcactggagcccttaaactgtatttcagagacttacccatccctgtcatcacatatgatacctattccaaatttatagatgcagcaaaaatctccaatgcagatgagaggctggaagccgtccatgaagtgctgatgctgctgcctcctgcccactatgaaaccctccggtacctaatgatccacctcaaaaaggttactatgaatgaaaaagacaatttcatgaatgcagaaaatctggggatcgtgtttgggcccactctgatgaggccccctgaggacagcaccctgaccaccctgcatgatatgcggtaccaaaagctgattgtgcagattttaatagaaaacgaagacgttttattctaatccatcagggaaatgagctgaatggccccagcaccatccaagttgacacagctaaaggaataaaaacatttcttaccacttgatttgttttccaagcaagtgctagaatttgctggactgcagaggatcgctgagtggggtactgtgtctcatagacatgcgccacctccacgtgagaacaagggtgaaggtgagggaagcccctcaccttgggtcttttgctgtgcctcctatgtatgtctggtttgctggaagagtgattaatacatctttaatttattaaaaaacaatgtagacctttaaacttcagtcttattggtaataaaagggaacttaattcatacaggtacttgatacagttatacattttccacttacaaaaagaagacaattctgttaaatgaaacctgtatcgtaaaatgtatttttattttacccacgagaatgttgttatttttagcaaatagaactcaatgcagtgcattggttattaccctgtgtaccttgtccctcattttgctgtgacaccctgaaaaagctgaccacaaatgcagtattatcttgacatacctctgtcctcctcagtgctttttaatgaaatttcacctgccccttgtgttcctgctttggatagtttttgctcttaagcattggcattcttctattgtatggtatgtatttatagcaattgtaggatggtctgaaatgtccacacactttctatgcatacaaattttgtgaattcccaaagtatgctttggaattggtcatagtcttttcgtatcatgagtgtgtatcccagaagatacagaatgcggtcattttacctgaaattatttgagaacactggatgtatctggtctgtgtaaaaagttagcacttttaccctcttttcttcctggccaagccctctgaattcatctgttaatatcaaattgtatttttgccacatttctgtattggtgaaaagcgaatctgcagaataactgccaacgtttttcattcttgttttacaaacctattttttaaagtgagaataaggttggtttttaccaaatatttgttcctccttgacaaaagtagctctgtgtggataatatgattttattactacagttccagtcacttggttatatttatcttagcatgagcctttcacaccaagatttctatattttgtaacataggtgaaatatttaaaacatcaaaaactgtaaatctagatttttaaaaaatccaactgcaatgtcttttcctttgattgagatgatttgtgtaaactcaccagtcttgctttggagtgagcagaagagaatgactattttacgtggagcatcattgtgtgactgttgacctggacagtcccaagggctatgcagatggactccattggcacagggaggtttgacctcttccctgctattatccctcctcccaactgtacagatttgtttgttgtagtttatgtacttcttgatactgtcaaaaaattatctggaaatggttttattttgtgaagtgaacaatactttgtaatttatgatagtgtaaatggaaggcaaagcatcacatgtattaaattcttctgtctatta

SEQ ID NO: 315298 - DNA, 3440 bp, Homo sapiens
gaattccgcctcacagtggccaggtcctgtgccagattgtccctctcaacctccagccgggcgctgttggcgtgagttgatcgagccgcagccgcagctctcgcagctcagcctggtagacgtctgccagcttggtgggctccttggcccgcagctggttcagcctcagcagccagcgccttgttttgctgttccaggaagcgaaccttctcgatgtagctggcaaagcggtattgagctccatcatctctgcccgctcactggcccgggtctccttgaagccagcattgagtgccccagccagggagaaatccacccgggtcggagtggagggggcattcgagccagggagaggcgggtgcaggacccagacggcggccaggagccaggccccccaccatcatctcccctgaggagacgtaggagcggcgagcagcggaggtgatgcgtctcctctccagcctgtccggctcgtcggtgtcctccgatgctgaagaataccagcctcctatatggaaatcatacttatatcagttacagcaagaggcacctcgtcccaagagaatcatttgtcctcgggaggtggaaaacagaccaaaatattatggaagagagtttcatgggatcatctctcgggagcaggcggatgagcttcttggaggcgtggagggtgcctacatccttagagaaagccagcggcaaccaggatgctacacgctggctctcaggtttggaaaccagaccttaaactacaggctcttccacgacgggaaacactttgtgggtgagaagaggtttgagtcgattcatgatctggtgacagatggcttgataacactgtacatagaaacaaaagctgccgagtacatttcaaaaatgacaactaaccccatctatgaacacattggatatgccaccctactcagagaaaaagtatccagaaggctgagcaggtctaaaaatgaaccaagaaaaacaaacgtcacacatgaagaacacacagcggtggaaaagatctcctccctggttcgaagggctgccctcacacacaacgacaaccacttcaattatgagaagacacacaactttaaggtccacacgttccgaggcccacactggtgtgaatattgtgccaatttcatgtgggggctcatcgcccaaggggtccggtgctcagactgtggattgaacgtacacaaacagtgttccaagcacgttcccaatgactgccaacctgatctcaagaggatcaagaaagtgtactgttgtgacctcacaacacttgtgaaggctcacaacactcagagacccatggtggtagacatatgcattcgggaaattgaagcaagaggattaaaatcggaaggcctttacagagtctctgggttcactgaacacattgaagatgtcaaaatggcatttgacagagatggtgaaaaggccgatatatctgccaatgtctatccagacataaacatcatcactggagcccttaaactgtatttcagagacttacccatccctgtcatcacatatgatacctattccaaatttatagatgcagcaaaaatctccaatgcagatgagaggctggaagccgtccatgaagtgctgatgctgctgcctcctgcccactatgaaaccctccggtacctaatgatccacctcaaaaaggttactatgaatgaaaaagacaatttcatgaatgcagaaaatctggggatcgtgtttgggcccactctgatgaggccccctgaggacagcaccctgaccaccctgcatgatatgcggtaccaaaagctgattgtgcagattttaatagaaaacgaagacgttttattctaatccatcagggaaatgagctgaatggccccagcaccatccaagttgacacagctaaaggaataaaaacatttcttaccacttgatttgttttccaagcaagtgctagaatttgctggactgcagaggatcgctgagtggggtactgtgtctcatagacatgcgccacctccacgtgagaacaagggtgaaggtgagggaagcccctcaccttgggtcttttgctgtgcctcctatgtatgtctggtttgctggaagagtgattaatacatctttaatttattaaaaaacaatgtagacctttaaacttcagtcttattggtaataaaagggaacttaattcatacaggtacttgatacagttatacattttccacttacaaaaagaagacaattctgttaaatgaaacctgtatcgtaaaatgtatttttattttacccacgagaatgttgttatttttagcaaatagaactcaatgcagtgcattggttattaccctgtgtaccttgtccctcattttgctgtgacaccctgaaaaagctgaccacaaatgcagtattatcttgacatacctctgtcctcctcagtgctttttaatgaaatttcacctgccccttgtgttcctgctttggatagtttttgctcttaagcattggcattcttctattgtatggtatgtatttatagcaattgtaggatggtctgaaatgtccacacactttctatgcatacaaattttgtgaattcccaaagtatgctttggaattggtcatagtcttttcgtatcatgagtgtgtatcccagaagatacagaatgcggtcattttacctgaaattatttgagaacactggatgtatctggtctgtgtaaaaagttagcacttttaccctcttttcttcctggccaagccctctgaattcatctgttaatatcaaattgtatttttgccacatttctgtattggtgaaaagcgaatctgcagaataactgccaacgtttttcattcttgttttacaaacctattttttaaagtgagaataaggttggtttttaccaaatatttgttcctccttgacaaaagtagctctgtgtggataatatgattttattactacagttccagtcacttggttatatttatcttagcatgagcctttcacaccaagatttctatattttgtaacataggtgaaatatttaaaacatcaaaaactgtaaatctagatttttaaaaaatccaactgcaatgtcttttcctttgattgagatgatttgtgtaaactcaccagtcttgctttggagtgagcagaagagaatgactattttacgtggagcatcattgtgtgactgttgacctggacagtcccaagggctatgcagatggactccattggcacagggaggtttgacctcttccctgctattatccctcctcccaactgtacagatttgtttgttgtagtttatgtacttcttgatactgtcaaaaaattatctggaaatggttttattttgtgaagtgaacaatactttgtaatttatgatagtgtaaatggaaggcaaagcatcacatgtattaaattcttctgtctatta

SEQ ID NO: 315299 - DNA, 3220 bp, Homo sapiens
agcgggtatagatgagattgagcatttggctgtgtgtggacacgcttcatcgtgccaactcaactagccctgggatgccggaggaagaaaatcacaaaaggaaacttaggatgcccaggttccagcacaaaatgcacttcccactgccgaggtgaaactatctgaggcattgaatgaggaacaatacaatttttgagaaagctaaggaggtgcctaccaacccgcaccaacgcatttgtttttgagaaacgtggtgcttatttgcaaatgctgaagaataccagcctcctatatggaaatcatacttatatcagttacagcaagaggcacctcgtcccaagagaatcatttgtcctcgggaggtggaaaacagaccaaaatattatggaagagagtttcatgggatcatctctcgggagcaggcggatgagcttcttggaggcgtggagggtgcctacatccttagagaaagccagcggcaaccaggatgctacacgctggctctcaggtttggaaaccagaccttaaactacaggctcttccacgacgggaaacactttgtgggtgagaagaggtttgagtcgattcatgatctggtgacagatggcttgataacactgtacatagaaacaaaagctgccgagtacatttcaaaaatgacaactaaccccatctatgaacacattggatatgccaccctactcagagaaaaagtatccagaaggctgagcaggtctaaaaatgaaccaagaaaaacaaacgtcacacatgaagaacacacagcggtggaaaagatctcctccctggttcgaagggctgccctcacacacaacgacaaccacttcaattatgagaagacacacaactttaaggtccacacgttccgaggcccacactggtgtgaatattgtgccaatttcatgtgggggctcatcgcccaaggggtccggtgctcagactgtggattgaacgtacacaaacagtgttccaagcacgttcccaatgactgccaacctgatctcaagaggatcaagaaagtgtactgttgtgacctcacaacacttgtgaaggctcacaacactcagagacccatggtggtagacatatgcattcgggaaattgaagcaagaggattaaaatcggaaggcctttacagagtctctgggttcactgaacacattgaagatgtcaaaatggcatttgacagagatggtgaaaaggccgatatatctgccaatgtctatccagacataaacatcatcactggagcccttaaactgtatttcagagacttacccatccctgtcatcacatatgatacctattccaaatttatagatgcagcaaaaatctccaatgcagatgagaggctggaagccgtccatgaagtgctgatgctgctgcctcctgcccactatgaaaccctccggtacctaatgatccacctcaaaaaggttactatgaatgaaaaagacaatttcatgaatgcagaaaatctggggatcgtgtttgggcccactctgatgaggccccctgaggacagcaccctgaccaccctgcatgatatgcggtaccaaaagctgattgtgcagattttaatagaaaacgaagacgttttattctaatccatcagggaaatgagctgaatggccccagcaccatccaagttgacacagctaaaggaataaaaacatttcttaccacttgatttgttttccaagcaagtgctagaatttgctggactgcagaggatcgctgagtggggtactgtgtctcatagacatgcgccacctccacgtgagaacaagggtgaaggtgagggaagcccctcaccttgggtcttttgctgtgcctcctatgtatgtctggtttgctggaagagtgattaatacatctttaatttattaaaaaacaatgtagacctttaaacttcagtcttattggtaataaaagggaacttaattcatacaggtacttgatacagttatacattttccacttacaaaaagaagacaattctgttaaatgaaacctgtatcgtaaaatgtatttttattttacccacgagaatgttgttatttttagcaaatagaactcaatgcagtgcattggttattaccctgtgtaccttgtccctcattttgctgtgacaccctgaaaaagctgaccacaaatgcagtattatcttgacatacctctgtcctcctcagtgctttttaatgaaatttcacctgccccttgtgttcctgctttggatagtttttgctcttaagcattggcattcttctattgtatggtatgtatttatagcaattgtaggatggtctgaaatgtccacacactttctatgcatacaaattttgtgaattcccaaagtatgctttggaattggtcatagtcttttcgtatcatgagtgtgtatcccagaagatacagaatgcggtcattttacctgaaattatttgagaacactggatgtatctggtctgtgtaaaaagttagcacttttaccctcttttcttcctggccaagccctctgaattcatctgttaatatcaaattgtatttttgccacatttctgtattggtgaaaagcgaatctgcagaataactgccaacgtttttcattcttgttttacaaacctattttttaaagtgagaataaggttggtttttaccaaatatttgttcctccttgacaaaagtagctctgtgtggataatatgattttattactacagttccagtcacttggttatatttatcttagcatgagcctttcacaccaagatttctatattttgtaacataggtgaaatatttaaaacatcaaaaactgtaaatctagatttttaaaaaatccaactgcaatgtcttttcctttgattgagatgatttgtgtaaactcaccagtcttgctttggagtgagcagaagagaatgactattttacgtggagcatcattgtgtgactgttgacctggacagtcccaagggctatgcagatggactccattggcacagggaggtttgacctcttccctgctattatccctcctcccaactgtacagatttgtttgttgtagtttatgtacttcttgatactgtcaaaaaattatctggaaatggttttattttgtgaagtgaacaatactttgtaatttatgatagtgtaaatggaaggcaaagcatcacatgtattaaattcttctgtctatta

SEQ ID NO: 315300 - DNA, 2275 bp, Homo sapiens
aacaaacttagaaaacttcatgtactctggagttcacaggtgttttccttttgcatgttgccttctcctttcctcctatcacaaagaatgcttctattatcactcccagtcacttaaatgccattctgcttctttagcaggaaaaaatacctgaatgaattctcttacagaaagacagtttgactgaatttgctttttacaatcagtgtggaaaatatcatagtcaattgaggcaatcagtagaaatctcactaaaagtttgtaccccctgagtatgggtaacagcttaaacggcaagaatatataaaagtagcaacagtttagtgggagccaaaaagcactaggttaaatatcatactacgtttttaaagacttgataaatgtgtacacttgaacaaccatccagagggatagttacttgagcattacagagtagtggaactcaaaatctaagattcatctgggatacttctaaaagaaatgtagagttttgaatctcactcttaaaaatgtgtattcccaggctaggcatggtggctcacgcctgtaatcctagcactttgggaggccaaggcgggtgaatcacttgaagtcaggagatcaagaccagcttggtcgacatggtgaaaccccgtctctactaaaagtacaaaaaaattagctgggcatgatggcgtgtgcctataatcccacctactcgggaggctgaggcaggagaatcgcttgaacctgggaggcggaagttgcagtgagccgagatggcgccactgtagtccagtctgggcgacagagtgagattctgcctcaaaataaataaataaataaaaatttgtattccattgatttgggtagacaccaggaatgtgcatttctaacaagctttccaggcgatcctatagtaagtcatctgtggactactttaagaaactcttctatagagaatggagttggattaataataggtgattttttacactggactgattcacaagaacctaaacagtagtccatgaagctgctcatctgtggtaactatttggccccgtctcactctgaaagcagcaggagatgttgtttactttgtttctatcccctttgtctggagattaattttggaatgaaagtttttctctctatgccattcctggttcttttccaaagcctcatacaagaggattaggtcacaatgcatgcattaccttttaaaagaatgcgatattgataccgatgcttactttttttttttttactacttgttttattcctt[450 bp omitted]cttccttggtatagtggaggatttgaggattggaatatagagtagagtgcttgcttaagcctgggagcccatctttatagctatttgatgtaagaaaagagacatggccatttctaaactatataaggtgagtgtgtctattcccagcagatataaaggaaaaaggaaacttttttgattcccaccttcccagcctcacctagccatcttccagcctcaaatatagagatgttagtgcaaggtcctgggctctaggtgatcatttcataagtcctttacagataaagaaaaagtagtgtttgtatgtttgtttttaagtaaccccaaaacaaatttatattgtattcagcaaaattggaattcaggtgtttaattttagaacatgaagtgcctgctgttttaagcattgacttgtataaaaagaattgcatgtctccagtaagcttatgggttttctcatttttaggtatatggcttttaatcatgtaaagtgaaacattagttttcttgcattttattacaggttctttgttgcaataaagatgctgctgaaattaa

SEQ ID NO: 315301 - DNA, 2381 bp, Homo sapiens
  misc_feature (2372)..(2372): n is a, c, g, or t
aacaaacttagaaaacttcatgtactctggagttcacaggtgttttccttttgcatgttgccttctcctttcctcctatcacaaagaatgcttctattatcactcccagtcacttaaatgccattctgcttctttagcaggaaaaaatacctgaatgaattctcttacagaaagacagtttgactgaatttgctttttacaatcagtgtggaaaatatcatagtcaattgaggcaatcagtagaaatctcactaaaagtttgtaccccctgagtatgggtaacagcttaaacggcaagaatatataaaagtagcaacagtttagtgggagccaaaaagcactaggttaaatatcatactacgtttttaaagacttgataaatgtgtacacttgaacaaccatccagagggatagttacttgagcattacagagtagtggaactcaaaatctaagattcatctgggatacttctaaaagaaatgtagagttttgaatctcactcttaaaaatgtgtattcccaggctaggcatggtggctcacgcctgtaatcctagcactttgggaggccaaggcgggtgaatcacttgaagtcaggagatcaagaccagcttggtcgacatggtgaaaccccgtctctactaaaagtacaaaaaaattagctgggcatgatggcgtgtgcctataatcccacctactcgggaggctgaggcaggagaatcgcttgaacctgggaggcggaagttgcagtgagccgagatggcgccactgtagtccagtctgggcgacagagtgagattctgcctcaaaataaataaataaataaaaatttgtattccattgatttgggtagacaccaggaatgtgcatttctaacaagctttccaggcgatcctatagtaagtcatctgtggactactttaagaaactcttctatagagaatggagttggattaataataggtgattttttacactggactgattcacaagaacctaaacagtagtccatgaagctgctcatctgtggtaactatttggccccgtctcactctgaaagcagcaggagatgttgtttactttgtttctatcccctttgtctggagattaattttggaatgaaagtttttctctctatgccattcctggttcttttccaaagcctcatacaagaggattaggtcacaatgcatgcattaccttttaaaagaatgcgatattgataccgatgcttactttttttttttttactacttgttttattcctt[450 bp omitted]cttccttggtatagtggaggatttgaggattggaatatagagtagagtgcttgcttaagcctgggagcccatctttatagctatttgatgtaagaaaagagacatggccatttctaaactatataaggtgagtgtgtctattcccagcagatataaaggaaaaaggaaacttttttgattcccaccttcccagcctcacctagccatcttccagcctcaaatatagagatgttagtgcaaggtcctgggctctaggtgatcatttcataagtcctttacagataaagaaaaagtagtgtttgtatgtttgtttttaagtaaccccaaaacaaatttatattgtattcagcaaaattggaattcaggtgtttaattttagaacatgaagtgcctgctgttttaagcattgacttgtataaaaagaattgcatgtctccagtaagcttatgggttttctcatttttaggtatatggcttttaatcatgtaaagtgaaacattagttttcttgcattttattacaggttctttgttgcaataaagatgctgctgaaattaaaaaaaaaaataaaaaaaaactccaggggggggcccggtcctcaacttcgcctttagtgggtcggattccaattaacttggccgtcctttataaccgnctgactgtg

SEQ ID NO: 315302 - DNA, 2218 bp, Homo sapiens
aacaaacttagaaaacttcatgtactctggagttcacaggtgttttccttttgcatgttgccttctcctttcctcctatcacaaagaatgcttctattatcactcccagtcacttaaatgccattctgcttctttagcaggaaaaaatacctgaatgaattctcttacagaaagacagtttgactgaatttgctttttacaatcagtgtggaaaatatcatagtcaattgaggcaatcagtagaaatctcactaaaagtttgtaccccctgagtatgggtaacagcttaaacggcaagaatatataaaagtagcaacagtttagtgggagccaaaaagcactaggttaaatatcatactacgtttttaaagacttgataaatgtgtacacttgaacaaccatccagagggatagttacttgagcattacagagtagtggaactcaaaatctaagattcatctgggatacttctaaaagaaatgtagagttttgaatctcactcttaaaaatgtgtattcccaggctaggcatggtggctcacgcctgtaatcctagcactttgggaggccaaggcgggtgaatcacttgaagtcaggagatcaagaccagcttggtcgacatggtgaaaccccgtctctactaaaagtacaaaaaaattagctgggcatgatggcgtgtgcctataatcccacctactcgggaggctgaggcaggagaatcgcttgaacctgggaggcggaagttgcagtgagccgagatggcgccactgtagtccagtctgggcgacagagtgagattctgcctcaaaataaataaataaataaaaatttgtattccattgatttgggtagacaccaggaatgtgcatttctaacaagctttccaggcgatcctatagtaagtcatctgtggactactttaagaaactcttctatagagaatggagttggattaataataggtgattttttacactggactgattcacaagaacctaaacagtagtccatgaagctgctcatctgtggtaactatttggccccgtctcactctgaaagcagcaggagatgttgtttactttgtttctatcccctttgtctggagattaattttggaatgaaagtttttctctctatgccattcctggttcttttccaaagcctcatacaagaggattaggtcacaatgcatgcattaccttttttcctt[450 bp omitted]cttccttggtatagtggaggatttgaggattggaatatagagtagagtgcttgcttaagcctgggagcccatctttatagctatttgatgtaagaaaagagacatggccatttctaaactatataaggtgagtgtgtctattcccagcagatataaaggaaaaaggaaacttttttgattcccaccttcccagcctcacctagccatcttccagcctcaaatatagagatgttagtgcaaggtcctgggctctaggtgatcatttcataagtcctttacagataaagaaaaagtagtgtttgtatgtttgtttttaagtaaccccaaaacaaatttatattgtattcagcaaaattggaattcaggtgtttaattttagaacatgaagtgcctgctgttttaagcattgacttgtataaaaagaattgcatgtctccagtaagcttatgggttttctcatttttaggtatatggcttttaatcatgtaaagtgaaacattagttttcttgcattttattacaggttctttgttgcaataaagatgctgctgaaattaa

SEQ ID NO: 315303 - DNA, 720 bp, Homo sapiens
agcgggccccgtcgcacgagcgctccctgcgagtggcgcaggtaacagaccgcaggggcaagacagccggcgcgggaggaggatggcgctgtcggtgctgcgcttggcgctgctgctcctggcagttaccttcgcaggtagcgctcggagcggtcctggcgagcggggacctccggagaaaagcgggtttgggagtcagaccggcggcggaccctgccctgctccgggcggcctcggcgacgcctctctgatccctcaatttggtctgttttcaaaatatagaacgccaaactgctctcagtatagattaccaggatgtcccagacactttaaccctgtgtgtggcagtgacatgtccacttatgccaatgaatgtactctgtgcatgaaaatcagggaaggtggtcataatattaaaatcattcgaaatggaccctgctgatggagcagtttacagaaaagaagatggagagaccaccttcactggcagactagataaattgcatttcccctttttctcttttcctgtgtttctttacatgagatttgttaacacacattttctgagagcaggtatggaagacagccatgtgtagtgatggataatttaaagaaaaaaagaatccttgtttcttggcttttgctcctggagttaagcttactgcccaggtgacttgtgcattgctttatttagttgaaataaaatcagcattgaattca

SEQ ID NO: 315304 - DNA, 903 bp, Homo sapiens
agcgggccccgtcgcacgagcgctccctgcgagtggcgcaggtaacagaccgcaggggcaagacagccggcgcgggaggaggatggcgctgtcggtgctgcgcttggcgctgctgctcctggcagttaccttcgcaggtagcgctcggagcggtcctggcgagcggggacctccggagaaaagcgggtttgggagtcagaccggcggcggaccctgccctgctccgggcggcctcggcgacggtacccgcgcgcccgttactggcggttccccagaggacctgccaggtggaggaacgcgaactgggggttgtgggggtggctttgtggagtcagccaccctctttagttcttgcttgggcttcgctcccagctctaaggacacctgccatctagagcgctttctctgttaaagtagattttcagcctctctgatccctcaatttggtctgttttcaaaatatagaacgccaaactgctctcagtatagattaccaggatgtcccagacactttaaccctgtgtgtggcagtgacatgtccacttatgccaatgaatgtactctgtgcatgaaaatcagggaaggtggtcataatattaaaatcattcgaaatggaccctgctgatggagcagtttacagaaaagaagatggagagaccaccttcactggcagactagataaattgcatttcccctttttctcttttcctgtgtttctttacatgagatttgttaacacacattttctgagagcaggtatggaagacagccatgtgtagtgatggataatttaaagaaaaaaagaatccttgtttcttggcttttgctcctggagttaagcttactgcccaggtgacttgtgcattgctttatttagttgaaataaaatcagcattgaattca

SEQ ID NO: 315305 - DNA, 859 bp, Homo sapiens
agcgggccccgtcgcacgagcgctccctgcgagtggcgcaggtaacagaccgcaggggcaagacagccggcgcgggaggaggatggcgctgtcggtgctgcgcttggcgctgctgctcctggcagttaccttcgcaggtagcgctcggagcggtcctggcgagcggggacctccggagaaaagcgggtttgggagtcagaccggcggcggaccctgccctgctccgggcggcctcggcgacggtacccgcgcgcccgttactggcggttccccagaggacctgccaggtggaggaacgcgaactgggggttgtgggggtggctttgtggagtcagccaccctctttagttcttgcttgggcttcgctcccagctctaaggacacctgccatctagagcgctttctctgttaaagtagattttcagccaaactgctctcagtatagattaccaggatgtcccagacactttaaccctgtgtgtggcagtgacatgtccacttatgccaatgaatgtactctgtgcatgaaaatcagggaaggtggtcataatattaaaatcattcgaaatggaccctgctgatggagcagtttacagaaaagaagatggagagaccaccttcactggcagactagataaattgcatttcccctttttctcttttcctgtgtttctttacatgagatttgttaacacacattttctgagagcaggtatggaagacagccatgtgtagtgatggataatttaaagaaaaaaagaatccttgtttcttggcttttgctcctggagttaagcttactgcccaggtgacttgtgcattgctttatttagttgaaataaaatcagcattgaattca

SEQ ID NO: 315306 - DNA, 488 bp, Homo sapiens
actagtaccagtttgtgatctgatggttggaaacccctgctctagagtataaagccaaactgctctcagtatagattaccaggatgtcccagacactttaaccctgtgtgtggcagtgacatgtccacttatgccaatgaatgtactctgtgcatgaaaatcagggaaggtggtcataatattaaaatcattcgaaatggaccctgctgatggagcagtttacagaaaagaagatggagagaccaccttcactggcagactagataaattgcatttcccctttttctcttttcctgtgtttctttacatgagatttgttaacacacattttctgagagcaggtatggaagacagccatgtgtagtgatggataatttaaagaaaaaaagaatccttgtttcttggcttttgctcctggagttaagcttactgcccaggtgacttgtgcattgctttatttagttgaaataaaatcagcattgaattca

SEQ ID NO: 315307 - DNA, 1218 bp, Homo sapiens
agcgggccccgtcgcacgagcgctccctgcgagtggcgcaggtaacagaccgcaggggcaagacagccggcgcgggaggaggatggcgctgtcggtgctgcgcttggcgctgctgctcctggcagttaccttcgcaggtagcgctcggagcggtcctggcgagcggggacctccggagaaaagcgggtttgggagtcagaccggcggcggaccctgccctgctccgggcggcctcggcgacggtacccgcgcgcccgttactggcggttccccagaggacctgccaggtggaggaacgcgaactgggggttgtgggggtggctttgtggagtcagccaccctctttagttcttgcttgggcttcgctcccagctctaaggacacctgccatctagagcgctttctctgttaaagtagattttcagccaaactgctctcagtatagattaccaggatgtcccagacactttaaccctgtgtgtggcagtgacatgtccacttatgccaatgaatgtactctgtgcatgaaaatcagggaaggtggtcataatattaaaatcattcgaaatggaccctgctgatggagcagtttacagaaaagaagatggagagaccaccttcactggcagactagataaattgcatttcccctttttctcttttcctgtgtttctttacatgagatttgttaacacacattttctgagagcaggtatggaagacagccatgtgtagtgatggataatttaaagaaaaaaagaatccttgtttcttggcttttgctcctggagttaagcttactgcccaggtgacttgtgcattgctttatttagttgaaataaaatcagcattgaattcaagttcctactgttctctgttgaaaataccattctcattccagaggaggcagagttttacctctatccttcaagagtttttcagctgggcctgagaattaaatggacataagacagatcaacaggaggaaagcatacagacttatttaatacaagtttcacttggcatgggagccttcataaagaaataaacactcggcggggcgtggtggctcacgcctgtaatcccagcactttgggaggctgaggcgggcgtatcatgagctcaagagatcaagaccatcctggccagcatggtgaaacctcgtctctcctaaaaatacaaaaattaactgggtgtggtggcacatgcctgtagtcc

SEQ ID NO: 315308 - DNA, 702 bp, Homo sapiens
agcgggccccgtcgcacgagcgctccctgcgagtggcgcaggtaacagaccgcaggggcaagacagccggcgcgggaggaggatggcgctgtcggtgctgcgcttggcgctgctgctcctggcagttaccttcgcagcctctctgatccctcaatttggtctgttttcaaaatatagaacgccaaactgctctcagtatagattaccaggatgtcccagacactttaaccctgtgtgtggcagtgacatgtccacttatgccaatgaatgtactctgtgcatgaaaatcagggaaggtggtcataatattaaaatcattcgaaatggaccctgctgatggagcagtttacagaaaagaagatggagagaccaccttcactggcagactagataaattgcatttcccctttttctcttttcctgtgtttctttacatgagatttgttaacacacattttctgagagcaggtatggaagacagccatgtgtagtgatggataatttaaagaaaaaaagaatccttgtttcttggcttttgctcctggagttaagcttactgcccaggtgacttgtgcattgctttatttagttgaaataaaatcagcattgaattcaaaaaaaagaaaaacggtccccccccatcattttccccgtactccgttttcggaaaaaaaagaacacaaatggccccgttggcccaac

SEQ ID NO: 315309 - DNA, 864 bp, Homo sapiens
agcgggccccgtcgcacgagcgctccctgcgagtggcgcaggtaacagaccgcaggggcaagacagccggcgcgggaggaggatggcgctgtcggtgctgcgcttggcgctgctgctcctggcagttaccttcgcagcctctctgatccctcaatttggtctgttttcaaaatatagaacgggaaggtggtcataatattaaaatcattcgaaatggaccctgctgatggagcagtttacagaaaagaagatggagagaccaccttcactggcagactagataaattgcatttcccctttttctcttttcctgtgtttctttacatgagatttgttaacacacattttctgagagcaggtatggaagacagccatgtgtagtgatggataatttaaagaaaaaaagaatccttgtttcttggcttttgctcctggagttaagcttactgcccaggtgacttgtgcattgctttatttagttgaaataaaatcagcattgaattcaagttcctactgttctctgttgaaaataccattctcattccagaggaggcagagttttacctctatccttcaagagtttttcagctgggcctgagaattaaatggacataagacagatcaacaggaggaaagcatacagacttatttaatacaagtttcacttggcatgggagccttcataaagaaataaacactcggcggggcgtggtggctcacgcctgtaatcccagcactttgggaggctgaggcgggcgtatcatgagctcaagagatcaagaccatcctggccagcatggtgaaacctcgtctctcctaaaaatacaaaaattaactgggtgtggtggcacatgcctgtagtcc

SEQ ID NO: 315310 - DNA, 615 bp, Homo sapiens
agcgggccccgtcgcacgagcgctccctgcgagtggcgcaggtaacagaccgcaggggcaagacagccggcgcgggaggaggatggcgctgtcggtgctgcgcttggcgctgctgctcctggcagttaccttcgcagcctctctgatccctcaatttggtctgttttcaaaatatagaacgccaaactgctctcagtatagattaccaggatgtcccagacactttaaccctgtgtgtggcagtgacatgtccacttatgccaatgaatgtactctgtgcatgaaaatcagggaaggtggtcataatattaaaatcattcgaaatggaccctgctgatggagcagtttacagaaaagaagatggagagaccaccttcactggcagactagataaattgcatttcccctttttctcttttcctgtgtttctttacatgagatttgttaacacacattttctgagagcaggtatggaagacagccatgtgtagtgatggataatttaaagaaaaaaagaatccttgtttcttggcttttgctcctggagttaagcttactgcccaggtgacttgtgcattgctttatttagttgaaataaaatcagcattgaattca

SEQ ID NO: 315311 - DNA, 765 bp, Homo sapiens
agcgggccccgtcgcacgagcgctccctgcgagtggcgcaggtaacagaccgcaggggcaagacagccggcgcgggaggaggatggcgctgtcggtgctgcgcttggcgctgctgctcctggcagttaccttcgcaggtagcgctcggagcggtcctggcgagcggggacctccggagaaaagcgggtttgggagtcagaccggcggcggaccctgccctgctccgggcggcctcggcgacggtacccgcgcgcccgttactggcggttccccagaggacctgccagcctctctgatccctcaatttggtctgttttcaaaatatagaacgccaaactgctctcagtatagattaccaggatgtcccagacactttaaccctgtgtgtggcagtgacatgtccacttatgccaatgaatgtactctgtgcatgaaaatcagggaaggtggtcataatattaaaatcattcgaaatggaccctgctgatggagcagtttacagaaaagaagatggagagaccaccttcactggcagactagataaattgcatttcccctttttctcttttcctgtgtttctttacatgagatttgttaacacacattttctgagagcaggtatggaagacagccatgtgtagtgatggataatttaaagaaaaaaagaatccttgtttcttggcttttgctcctggagttaagcttactgcccaggtgacttgtgcattgctttatttagttgaaataaaatcagcattgaattca

SEQ ID NO: 315312 - DNA, 676 bp, Homo sapiens
agcgggccccgtcgcacgagcgctccctgcgagtggcgcaggtaacagaccgcaggggcaagacagccggcgcgggaggaggatggcgctgtcggtgctgcgcttggcgctgctgctcctggcagttaccttcgcaggtagcgctcggagcggtcctggcgagcggggacctccggagaaaagcgggtttgggagtcagaccggcggcggaccctgccctgctccgggcggcctcggcgacgccaaactgctctcagtatagattaccaggatgtcccagacactttaaccctgtgtgtggcagtgacatgtccacttatgccaatgaatgtactctgtgcatgaaaatcagggaaggtggtcataatattaaaatcattcgaaatggaccctgctgatggagcagtttacagaaaagaagatggagagaccaccttcactggcagactagataaattgcatttcccctttttctcttttcctgtgtttctttacatgagatttgttaacacacattttctgagagcaggtatggaagacagccatgtgtagtgatggataatttaaagaaaaaaagaatccttgtttcttggcttttgctcctggagttaagcttactgcccaggtgacttgtgcattgctttatttagttgaaataaaatcagcattgaattca

SEQ ID NO: 315313 - DNA, 1244 bp, Homo sapiens
agcgggccccgtcgcacgagcgctccctgcgagtggcgcaggtaacagaccgcaggggcaagacagccggcgcgggaggaggatggcgctgtcggtgctgcgcttggcgctgctgctcctggcagttaccttcgcaggtagcgctcggagcggtcctggcgagcggggacctccggagaaaagcgggtttgggagtcagaccggcggcggaccctgccctgctccgggcggcctcggcgacggtacccgcgcgcccgttactggcggttccccagaggacctgccaggtggaggaacgcgaactgggggttgtgggggtggctttgtggagtcagccaccctctttagttcttgcttgggcttcgctcccagctctaaggacacctgccatctagagcgctttctctgttaaagtagattttcagcctctctgatccctcaatttggtctgttttcaaaatatagaacgccaaactgctctcagtatagattaccaggatgtcccagacactttaaccctgtgtgtggcagtgacatgtccacttatgccaatgaatgtactctgtgcatgaaaatcagggaaggtggtcataatattaaaatcattcgaaatggaccctgctgatggagcagtttacagaaaagaagatggagagaccaccttcactggcagactagataaattgcatttcccctttttctcttttcctgtgtttctttacatgagatttgttaacacacattttctgagagcaggtatggaagacagccatgtgtagtgatggataatttaaagaaaaaaagaatccttgtttcttggcttttgctcctggagttaagcttactgcccaggtgacttgtgcattgctttatttagttgaaataaaatcagcattgaattcaaaaaaaaaaaaaaaaaaaaacaacaaaaaaaaaaaagaacaaaaaacaaaacaaaacaaaaacaacgaaaaaaaaaaaaaaaaggggggggcgcgcggcaccaaacaaaatcccccggcgaagagggggcacatgcatgaggcagacccccaacgttggtttgtgggggaagcaggggcggcccacaaaaagaggaggtgttaaatataaacacacaaccagggcgggcggcggtcttataaaccaaccgacacgcaagaaaaacaatgcgatacgggggagacttgtggcgcagagcacaaccctcgggggggggacaagtggggggcacacacacccaa

SEQ ID NO: 315314 - DNA, 611 bp, Homo sapiens
agcgggccccgtcgcacgagcgctccctgcgagtggcgcaggtaacagaccgcaggggcaagacagccggcgcgggaggaggatggcgctgtcggtgctgcgcttggcgctgctgctcctggcagttaccttcgcaggtagcgctcggagcggtcctggcgagcggggacctccggagaaaagcgggtttgggagtcagaccggcggcggaccctgccctgctccgggcggcctcggcgacggtacccgcgcgcccgttactggcggttccccagaggacctgccagggaaggtggtcataatattaaaatcattcgaaatggaccctgctgatggagcagtttacagaaaagaagatggagagaccaccttcactggcagactagataaattgcatttcccctttttctcttttcctgtgtttctttacatgagatttgttaacacacattttctgagagcaggtatggaagacagccatgtgtagtgatggataatttaaagaaaaaaagaatccttgtttcttggcttttgctcctggagttaagcttactgcccaggtgacttgtgcattgctttatttagttgaaataaaatcagcattgaattca

SEQ ID NO: 315315 - DNA, 1929 bp, Homo sapiens
catccgtggacttggaggctggctcgggcccgcacctcccatccccagctgcccgcaacccccagtgactcgggatcccccggagagccctcccctctcggcaggagggggctgactcagggagaaatggcagtttagggcctagggggccacgtgaccctcccccaggaatgtggtgacgtcatcggaggcgtggtcgtccccaaaattagggaggaagaggaaaaaaaaaagccagaaaaagttttcttttctggagtcccaaaacgaggtgcgggacggaagagggggtgaaggccagaggctcggggcttcaagaccgctgtctggagtccccctttccaggccatgtcggggcccacctggctgcccccgaagcagccggagcccgccagagcccctcaggggagggcgatcccccgcggcaccccggggccaccaccggcccacggagcagcactccagccccaccccagggtcaatttttgcccccttccatctgagcagtgttaccaggccccagggggaccggaggatcgggggccggcgtgggtggggtcccatggagtactccagcacacgcaggggctccctgcagacagggggggccttcgccctggaagcctggacgccgagatagacttgctgagcagcacgctggccgagctgaatgggggtcggggtcatgcgtcacggcgaccagaccgacaggcatatgagcccccgccacctcctgcctaccgcacgggctccctgaagccaaatccagcctcgccgctcccagcgtctccctatgggggccccactccagcctcttacactaccgccagcaccccggctggcccagccttccccgtgcaagtgaaggtggcacagccagtgaggggctgcggcccacccaggcggggagcctctcaggcctctgggcccctcccgggcccccactttcctctcccaggccgaggtgaagtctgggggcctggctataggagccagagagagccagggccaggggccaaagaggaagctgctggggtctctggccctgcaggaagaggaagaggaggcgagcacgggccccaggtgcccctgagccagcctccagaggatgagctggataggctgacgaagaagctggttcacgacatgaaccacccgcccagcggggagtactttggccagtgtggtggctgcggagaagatgtggttggggatggggctggggttgtggcccttgatcgcgtctttcacgtgggctgctttgtgtgttctacatgccgggcccagcttcgcggccagcatttctacgccgtggagaggagggcatattgcgagggctgctacgtggccaccctggagaaatgtgccacgtgctcccagcccatcctggaccggatcctgcgggctatggggaaggcctaccaccctggctgcttcacctgcgtggtgtgtcaccgcggcctcgacggcatccccttcacagtggatgctacgagccagatccactgcattgaggactttcacaggaagtttgccccaagatgctcagtgtgcggtggggccataatgcctgagccaggtcaggaggagactgtgagaattgttgctctggatcgaagttttcacattggctgttacaagtgcgaggagtgtgggctgctgctctcctctgagggcgagtgtcagggctgctacccgctggatgggcacatcttgtgcaaggcctgcagcgcctggcgcatccaggagctctcagccaccgtcaccactgactgctgagtcttcctagaagtacctgctgggttctcagttccagttcccatcctttgattgatcactctccctgacatccacctgtatgactttgtcaccaaatgctgtcttctctttctccaatcaagaaataataatccctcgagtttacaaaac

SEQ ID NO: 315316 - DNA, 414 bp, Homo sapiens
aaatgcaagcccgtgttgtcatagaaaaacagaaaccagatggttgctatggagatttgtttaaatacacacctagaacatggcccagttgctctggatcgaagttttcacattggctgttacaagtgcgaggagtgtgggctgctgctctcctctgagggcgagtgtcagggctgctacccgctggatgggcacatcttgtgcaaggcctgcagcgcctggcgcatccaggagctctcagccaccgtcaccactgactgctgagtcttcctagaagtacctgctgggttctcagttccagttcccatcctttgattgatcactctccctgacatccacctgtatgactttgtcaccaaatgctgtcttctctttctccaatcaagaaataataatccctcgagtttacaaaac

SEQ ID NO: 315317 - DNA, 2264 bp, Homo sapiens
catccgtggacttggaggctggctcgggcccgcacctcccatccccagctgcccgcaacccccagtgactcgggatcccccggagagccctcccctctcggcaggagggggctgactcagggagaaatggcagtttagggcctagggggccacgtgaccctcccccaggaatgtggtgacgtcatcggaggcgtggtcgtccccaaaattagggaggaagaggaaaaaaaaaagccagaaaaagttttcttttctggagtcccaaaacgaggtgcgggacggaagagggggtgaaggccagaggctcggggcttcaagaccgctgtctggagtccccctttccaggccatgtcggggcccacctggctgcccccgaagcagccggagcccgccagagcccctcaggggagggcgatcccccgcggcaccccggggccaccaccggcccacggagcagcactccagccccaccccagggtcaatttttgcccccttccatctgagcagtgttaccaggccccagggggaccggaggatcgggggccggcgtgggtggggtcccatggagtactccagcacacgcaggggctccctgcagacagggggggccttcgccctggaagcctggacgccgagatagacttgctgagcagcacgctggccgagctgaatgggggtcggggtcatgcgtcacggcgaccagaccgacaggcatatgagcccccgccacctcctgcctaccgcacgggctccctgaagccaaatccagcctcgccgctcccagcgtctccctatgggggccccactccagcctcttacactaccgccagcaccccggctggcccagccttccccgtgcaagtgaaggtggcacagccagtgaggggctgcggcccacccaggcggggagcctctcaggcctctgggcccctcccgggcccccactttcctctcccaggccgaggtgaagtctgggggcctggctataggagccagagagagccagggccaggggccaaagaggaagctgctggggtctctggccctgcaggaagaggaagaggaggcgagcacgggccccaggtgcccctgagccagcctccagaggatgagctggataggctgacgaagaagctggttcacgacatgaaccacccgcccagcggggagtactttggccagtgtggtggctgcggagaagatgtggttggggatggggctggggttgtggcccttgatcgcgtctttcacgtgggctgctttgtgtgttctacatgccgggcccagcttcgcggccagcatttctacgccgtggagaggagggcatattgcgagggctgctacgtggccaccctggagaaatgtgccacgtgctcccagcccatcctggaccggatcctgcgggctatggggaaggcctaccaccctggctgcttcacctgcgtggtgtgtcaccgcggcctcgacggcatccccttcacagtggatgctacgagccagatccactgcattgaggactttcacaggaagtttgccccaagatgctcagtgtgcggtggggccataatgcctgagccaggtcaggaggagactgtgagaattgttgctctggatcgaagttttcacattggctgttacaagtgcgaggagtgtgggctgctgctctcctctgagggcgagtgtcagggctgctacccgctggatgggcacatcttgtgcaaggcctgcagcgcctggcgcatccaggagctctcagccaccgtcaccactgactgctgagtcttcctagaagtacctgctgggttctcagttccagttcccatcctttgattgatcactctccctgacatccacctgtatgactttgtcaccaaatgctgtcttctctttctccaatcaagaaataataatccctcgagtttacaaaaccaaaaaaaaaaaaaaaaaaaaaaaaaaaaattgggggggcgcggggccaggaaaaaagttttcaacaccccatctctctgggggcggcggcgcgcgcccatggtaggacatctggacaacttgggcgccacagcggtgtgccaaagggagaccctccggcgcacagcgaaataagggcgtgggttctccccccaaaataaaaaaccgccgcggcgggccaccggggtgctctcggacccacaccccagaggggattgccgggagggccgcagccggggtctcacacacaccaggggtccccaggagacgcaggaaaaatacgcggcgcggtggga

SEQ ID NO: 315318 - DNA, 1749 bp, Homo sapiens
catccgtggacttggaggctggctcgggcccgcacctcccatccccagctgcccgcaacccccagtgactcgggatcccccggagagccctcccctctcggcaggagggggctgactcagggagaaatggcagtttagggcctagggggccacgtgaccctcccccaggaatgtggtgacgtcatcggaggcgtggtcgtccccaaaattagggaggaagaggaaaaaaaaaagccagaaaaagttttcttttctggagtcccaaaacgaggtgcgggacggaagagggggtgaaggccagaggctcggggcttcaagaccgctgtctggagtccccctttccaggccatgtcggggcccacctggctgcccccgaagcagccggagcccgccagagcccctcaggggagggcgatcccccgcggcaccccggggccaccaccggcccacggagcagcactccagccccaccccagggtcaatttttgcccccttccatctgagcagtgttaccaggccccagggggaccggaggatcgggggccggcgtgggtggggtcccatggagtactccagcacacgcaggggctccctgcagacagggggggccttcgccctggaagcctggacgccgagatagacttgctgagcagcacgctggccgagctgaatgggggtcggggtcatgcgtcacggcgaccagaccgacaggcatatgagcccccgccacctcctgcctaccgcacgggctccctgaagccaaatccagcctcgccgctcccagcgtctccctatgggggccccactccagcctcttacactaccgccagcaccccggctggcccagccttccccgtgcaagtgaaggtggcacagccagtgaggggctgcggcccacccaggcggggagcctctcaggcctctgggcccctcccgggcccccactttcctctcccaggccgaggtgaagtctgggggcctggctataggagccagagagagccagggccaggggccaaagaggaagctgctggggtctctggccctgcaggaagaggaagaggaggcgagcacgggccccaggtgcccctgagccagcctccagaggatgagctggataggctgacgaagaagctggttcacgacatgaaccacccgcccagcggggagtactttggccagtgtggtggctgcggagaagatgtggttggggatggggctggggttgtggcccttgatcgcgtctttcacgtgggctgctttgtgtgttctacatgccgggcccagcttcgcggccagcatttctacgccgtggagaggagggcatattgcgagggctgctacgtggccaccctggagaaatgtgccacgtgctcccagcccatcctggaccggatcctgcgggctatggggaaggcctaccaccctggctgcttcacctgcgtggtgtgtcaccgcggcctcgacggcatccccttcacagtggatgctacgagccagatccactgcattgaggactttcacaggaagtttgccccaagatgctcagtgtgcggtggggccataatgcctgagccaggtcaggaggagactgtgagaattgttgctctggatcgaagttttcacattggctgttacaagtgcgaggtcaggggcccccagcacgtgcaaggggctggcagtgtctagggtgctgggtagagcatgagggggaacacagaggtctggggttgatggaaacctgttgct

SEQ ID NO: 315319 - DNA, 1707 bp, Homo sapiens
catccgtggacttggaggctggctcgggcccgcacctcccatccccagctgcccgcaacccccagtgactcgggatcccccggagagccctcccctctcggcaggagggggctgactcagggagaaatggcagtttagggcctagggggccacgtgaccctcccccaggaatgtggtgacgtcatcggaggcgtggtcgtccccaaaattagggaggaagaggaaaaaaaaaagccagaaaaagttttcttttctggagtcccaaaacgaggtgcgggacggaagagggggtgaaggccagaggctcggggcttcaagaccgctgtctggagtccccctttccaggccatgtcggggcccacctggctgcccccgaagcagccggagcccgccagagcccctcaggggagggcgatcccccgcggcaccccggggccaccaccggcccacggagcagcactccagccccaccccagggtcaatttttgcccccttccatctgagcagtgttaccaggccccagggggaccggaggatcgggggccggcgtgggtggggtcccatggagtactccagcacacgcaggggctccctgcagacagggggggccttcgccctggaagcctggacgccgagatagacttgctgagcagcacgctggccgagctgaatgggggtcggggtcatgcgtcacggcgaccagaccgacaggcatatgagcccccgccacctcctgcctaccgcacgggctccctgaagccaaatccagcctcgccgctcccagcgtctccctatgggggccccactccagcctcttacactaccgccagcaccccggctggcccagccttccccgtgcaagtgaaggtggcacagccagtgaggggctgcggcccacccaggcggggagcctctcaggcctctgggcccctcccgggcccccactttcctctcccaggccgaggtgaagtctgggggcctggctataggagccagagagagccagggccaggggccaaagaggaagctgctggggtctctggccctgcaggaagaggaagaggaggcgagcacgggccccaggtgcccctgagccagcctccagaggatgagctggataggctgacgaagaagctggttcacgacatgaaccacccgcccagcggggagtactttggccagtgtggtggctgcggagaagatgtggttggggatggggctggggttgtggcccttgatcgcgtctttcacgtgggctgctttgtgtgttctacatgccgggcccagcttcgcggccagcatttctacgccgtggagaggagggcatattgcgagggctgctacgtggccaccctggagaaatgtgccacgtgctcccaggttgctctggatcgaagttttcacattggctgttacaagtgcgaggagtgtgggctgctgctctcctctgagggcgagtgtcagggctgctacccgctggatgggcacatcttgtgcaaggcctgcagcgcctggcgcatccaggagctctcagccaccgtcaccactgactgctgagtcttcctagaagtacctgctgggttctcagttccagttcccatcctttgattgatcactctccctgacatccacctgtatgactttgtcaccaaatgctgtcttctctttctccaatcaagaaataataatccctcgagtttacaaaac

SEQ ID NO: 315320 - DNA, 1801 bp, Homo sapiens
catccgtggacttggaggctggctcgggcccgcacctcccatccccagctgcccgcaacccccagtgactcgggatcccccggagagccctcccctctcggcaggagggggctgactcagggagaaatggcagtttagggcctagggggccacgtgaccctcccccaggaatgtggtgacgtcatcggaggcgtggtcgtccccaaaattagggaggaagaggaaaaaaaaaagccagaaaaagttttcttttctggagtcccaaaacgaggtgcgggacggaagagggggtgaaggccagaggctcggggcttcaagaccgctgtctggagtccccctttccaggccatgtcggggcccacctggctgcccccgaagcagccggagcccgccagagcccctcaggggagggcgatcccccgcggcaccccggggccaccaccggcccacggagcaggggctccctgcagacagggggggccttcgccctggaagcctggacgccgagatagacttgctgagcagcacgctggccgagctgaatgggggtcggggtcatgcgtcacggcgaccagaccgacaggcatatgagcccccgccacctcctgcctaccgcacgggctccctgaagccaaatccagcctcgccgctcccagcgtctccctatgggggccccactccagcctcttacactaccgccagcaccccggctggcccagccttccccgtgcaagtgaaggtggcacagccagtgaggggctgcggcccacccaggcggggagcctctcaggcctctgggcccctcccgggcccccactttcctctcccaggccgaggtgaagtctgggggcctggctataggagccagagagagccagggccaggggccaaagaggaagctgctggggtctctggccctgcaggaagaggaagaggaggcgagcacgggccccaggtgcccctgagccagcctccagaggatgagctggataggctgacgaagaagctggttcacgacatgaaccacccgcccagcggggagtactttggccagtgtggtggctgcggagaagatgtggttggggatggggctggggttgtggcccttgatcgcgtctttcacgtgggctgctttgtgtgttctacatgccgggcccagcttcgcggccagcatttctacgccgtggagaggagggcatattgcgagggctgctacgtggccaccctggagaaatgtgccacgtgctcccagcccatcctggaccggatcctgcgggctatggggaaggcctaccaccctggctgcttcacctgcgtggtgtgtcaccgcggcctcgacggcatccccttcacagtggatgctacgagccagatccactgcattgaggactttcacaggaagtttgccccaagatgctcagtgtgcggtggggccataatgcctgagccaggtcaggaggagactgtgagaattgttgctctggatcgaagttttcacattggctgttacaagtgcgaggagtgtgggctgctgctctcctctgagggcgagtgtcagggctgctacccgctggatgggcacatcttgtgcaaggcctgcagcgcctggcgcatccaggagctctcagccaccgtcaccactgactgctgagtcttcctagaagtacctgctgggttctcagttccagttcccatcctttgattgatcactctccctgacatccacctgtatgactttgtcaccaaatgctgtcttctctttctccaatcaagaaataataatccctcgagtttacaaaac

SEQ ID NO: 315321 - DNA, 2183 bp, Homo sapiens
catccgtggacttggaggctggctcgggcccgcacctcccatccccagctgcccgcaacccccagtgactcgggatcccccggagagccctcccctctcggcaggagggggctgactcagggagaaatggcagtttagggcctagggggccacgtgaccctcccccaggaatgtggtgacgtcatcggaggcgtggtcgtccccaaaattagggaggaagaggaaaaaaaaaagccagaaaaagttttcttttctggagtcccaaaacgaggtgcgggacggaagagggggtgaaggccagaggctcggggcttcaagaccgctgtctggagtccccctttccaggccatgtcggggcccacctggctgcccccgaagcagccggagcccgccagagcccctcaggggagggcgatcccccgcggcaccccggggccaccaccggcccacggagcaggtaaggcagcccttgtgagacagaagagccacccagctgtggcgctcacctctgtcctaccgctccagcctcccgccctggctgcttcctcctgccccttccccaagccgaggcggggggaacagccgcctgcgctctcttgggaccctagatttgggggaggaggtaacgagaggcggagagggtggctcctcaaatatacacccctcctgtcctccgccaccccacctttgatttctcttccctcaacccagcactccagccccaccccagggtcaatttttgcccccttccatctgagcagtgttaccaggccccagggggaccggaggatcgggggccggcgtgggtggggtcccatggagtactccagcacacgcaggggctccctgcagacagggggggccttcgccctggaagcctggacgccgagatagacttgctgagcagcacgctggccgagctgaatgggggtcggggtcatgcgtcacggcgaccagaccgacaggcatatgagcccccgccacctcctgcctaccgcacgggctccctgaagccaaatccagcctcgccgctcccagcgtctccctatgggggccccactccagcctcttacactaccgccagcaccccggctggcccagccttccccgtgcaagtgaaggtggcacagccagtgaggggctgcggcccacccaggcggggagcctctcaggcctctgggcccctcccgggcccccactttcctctcccaggccgaggtgaagtctgggggcctggctataggagccagagagagccagggccaggggccaaagaggaagctgctggggtctctggccctgcaggaagaggaagaggaggcgagcacgggccccaggtgcccctgagccagcctccagaggatgagctggataggctgacgaagaagctggttcacgacatgaaccacccgcccagcggggagtactttggccagtgtggtggctgcggagaagatgtggttggggatggggctggggttgtggcccttgatcgcgtctttcacgtgggctgctttgtgtgttctacatgccgggcccagcttcgcggccagcatttctacgccgtggagaggagggcatattgcgagggctgctacgtggccaccctggagaaatgtgccacgtgctcccagcccatcctggaccggatcctgcgggctatggggaaggcctaccaccctggctgcttcacctgcgtggtgtgtcaccgcggcctcgacggcatccccttcacagtggatgctacgagccagatccactgcattgaggactttcacaggaagtttgccccaagatgctcagtgtgcggtggggccataatgcctgagccaggtcaggaggagactgtgagaattgttgctctggatcgaagttttcacattggctgttacaagtgcgaggagtgtgggctgctgctctcctctgagggcgagtgtcagggctgctacccgctggatgggcacatcttgtgcaaggcctgcagcgcctggcgcatccaggagctctcagccaccgtcaccactgactgctgagtcttcctagaagtacctgctgggttctcagttccagttcccatcctttgattgatcactctccctgacatccacctgtatgactttgtcaccaaatgctgtcttctctttctccaatcaagaaataataatccctcgagtttacaaaac

SEQ ID NO: 315322 - DNA, 1436 bp, Homo sapiens
catccgtggacttggaggctggctcgggcccgcacctcccatccccagctgcccgcaacccccagtgactcgggatcccccggagagccctcccctctcggcaggagggggctgactcagggagaaatggcagtttagggcctagggggccacgtgaccctcccccaggaatgtggtgacgtcatcggaggcgtggtcgtccccaaaattagggaggaagaggaaaaaaaaaagccagaaaaagttttcttttctggagtcccaaaacgaggtgcgggacggaagagggggtgaaggccagaggctcggggcttcaagaccgctgtctggagtccccctttccaggccatgtcggggcccacctggctgcccccgaagcagccggagcccgccagagcccctcaggggagggcgatcccccgcggcaccccggggccaccaccggcccacggagcagcactccagccccaccccagggtcaatttttgcccccttccatctgagcagtgttaccaggccccagggggaccggaggatcgggggccggcgtgggtggggtcccatggagtactccagcacacgcaggggctccctgcagacagggggggccttcgccctggaagcctggacgccgagatagacttgctgagcagcacgctggccgagctgaatgggggtcggggtcatgcgtcacggcgaccagaccgacaggcatatgagcccccgccacctcctgcctaccgcacgggctccctgaagccaaatccagcctcgccgctcccagcgtctccctatgggggccccactccagcctcttacactaccgccagcaccccggctggcccagccttccccgtgcaagtgaaggtggcacagccagtgaggggctgcggcccacccaggcggggagcctctcaggcctctgggcccctcccgggcccccactttcctctcccaggccgaggtgaagtctgggggcctggctataggagccagagagagccagggccaggggccaaagaggaagctgctggggtctctggccctgcaggaagaggaagaggaggcgagcacgggccccaggtgcccctgagccagcctccagaggatgagctggataggctgacgaagaagctggttcacgacatgaaccacccgcccagcggggagtactttggccagtgtggtggctgcggagaagatgtggttggggatggggctggggttgtggcccttgatcgcgtctttcacgtgggctgctttgtgtgttctacatgccgggcccagcttcgcggccagcatttctacgccgtggagaggagggcatattgcgagggctgctacgtgataaaggccccccctgcataaaggtgcctccagctctcagacattcctagaccggatggtaaagactattgcgaaagcctatcgatatg

SEQ ID NO: 315323 - DNA, 1417 bp, Homo sapiens
tgatcgatcccccatgtgtgtaatgtgcaccccagcatggaggaagcgtggctgcaagtaccaacatgtcagccacttgaggacgggaccttgtcaaatgcaaaaagcctgtgcttccccacagccagggtcatttccacaaatgtgggtcttggagtggggtccttgcttacgacttctggcctgcgtttctcctcaggcatatgagcccccgccacctcctgcctaccgcacgggctccctgaagccaaatccagcctcgccgctcccagcgtctccctatgggggccccactccagcctcttacactaccgccagcaccccggctggcccagccttccccgtgcaagtgaaggtggcacagccagtgaggggctgcggcccacccaggcggggagcctctcaggcctctgggcccctcccgggcccccactttcctctcccaggccgaggtgaagtctgggggcctggctataggagccagagagagccagggccaggggccaaagaggaagctgctggggtctctggccctgcaggaagaggaagaggaggcgagcacgggccccaggtgcccctgagccagcctccagaggatgagctggataggctgacgaagaagctggttcacgacatgaaccacccgcccagcggggagtactttggccagtgtggtggctgcggagaagatgtggttggggatggggctggggttgtggcccttgatcgcgtctttcacgtgggctgctttgtgtgttctacatgccgggcccagcttcgcggccagcatttctacgccgtggagaggagggcatattgcgagggctgctacgtggccaccctggagaaatgtgccacgtgctcccagcccatcctggaccggatcctgcgggctatggggaaggcctaccaccctggctgcttcacctgcgtggtgtgtcaccgcggcctcgacggcatccccttcacagtggatgctacgagccagatccactgcattgaggactttcacaggaagtttgccccaagatgctcagtgtgcggtggggccataatgcctgagccaggtcaggaggagactgtgagaattgttgctctggatcgaagttttcacattggctgttacaagtgcgaggagtgtgggctgctgctctcctctgagggcgagtgtcagggctgctacccgctggatgggcacatcttgtgcaaggcctgcagcgcctggcgcatccaggagctctcagccaccgtcaccactgactgctgagtcttcctagaagtacctgctgggttctcagttccagttcccatcctttgattgatcactctccctgacatccacctgtatgactttgtcaccaaatgctgtcttctctttctccaatcaagaaataataatccctcgagtttacaaaac

SEQ ID NO: 315324 - DNA, 973 bp, Homo sapiens
aggctcccgagcagttgggattacaggtgcccaccaccacacccagctaatttttgtatttttagtagagacagggtttcgccatgttggccaggctgttttgaaactcctggcctcaagcagtccgcccactctggcctcccaaagtgctggcattacaggcgtgagccactgcacccagcctgattcctgtttttctcatagtgtttaaataccgtgtatagtgctgggacctgaactcagatctgctcaagtctgcctttcaccgaatcacatgcaggaggctgcatgcaggaggctgcagaaattagatggctgggttgctggggttcctgttgagctgccatggctcccgcccgctcccagatcttcctgccttccttcccaacaggccaccctggagaaatgtgccacgtgctcccagcccatcctggaccggatcctgcgggctatggggaaggcctaccaccctggctgcttcacctgcgtggtgtgtcaccgcggcctcgacggcatccccttcacagtggatgctacgagccagatccactgcattgaggactttcacaggaagtttgccccaagatgctcagtgtgcggtggggccataatgcctgagccaggtcaggaggagactgtgagaattgttgctctggatcgaagttttcacattggctgttacaagtgcgaggagtgtgggctgctgctctcctctgagggcgagtgtcagggctgctacccgctggatgggcacatcttgtgcaaggcctgcagcgcctggcgcatccaggagctctcagccaccgtcaccactgactgctgagtcttcctagaagtacctgctgggttctcagttccagttcccatcctttgattgatcactctccctgacatccacctgtatgactttgtcaccaaatgctgtcttctctttctccaatcaagaaataataatccctcgagtttacaaaac

SEQ ID NO: 315325 - DNA, 1050 bp, Homo sapiens
aagactgatgctgtttctccctgtcctcaggcgccagtgtggtggctgcggagaagatgtggttggggatggggctggggttgtggcccttgatcgcgtctttcacgtgggctgctttgtgtgttctacatgccgggcccagcttcgcggccagcatttctacgccgtggagaggagggcatattgcgagggctgctacgtgggtgagtggctggggctgggaggagggagtcagtggctggatgcagggggcttccatccaaggtggtaactagagcgtccaagaccaaaggaggaacggtgctaaaagccaggcgactgaaagtgatgtacaaacagggcggaattctgcaagtatcaagcaagtagcttaacactggtggctgaagggaaggacgcagctcttacaagtgtggagcatcttacagttaaagagaatgtgttagattcccatgacacccctgtgaggccaccctggagaaatgtgccacgtgctcccagcccatcctggaccggatcctgcgggctatggggaaggcctaccaccctggctgcttcacctgcgtggtgtgtcaccgcggcctcgacggcatccccttcacagtggatgctacgagccagatccactgcattgaggactttcacaggaagtttgccccaagatgctcagtgtgcggtggggccataatgcctgagccaggtcaggaggagactgtgagaattgttgctctggatcgaagttttcacattggctgttacaagtgcgaggagtgtgggctgctgctctcctctgagggcgagtgtcagggctgctacccgctggatgggcacatcttgtgcaaggcctgcagcgcctggcgcatccaggagctctcagccaccgtcaccactgactgctgagtcttcctagaagtacctgctgggttctcagttccagttcccatcctttgattgatcactctccctgacatccacctgtatgactttgtcaccaaatgctgtcttctctttctccaatcaagaaataataatccctcgagtttacaaaac

SEQ ID NO: 315326 - DNA, 640 bp, Homo sapiens
cgggcatggaccacagagattgcatcttgtgagtctgtagaaatggtcaaagccttgtcctctcttaggtccagagctcaggtgaatgcagattttcccggccatctgtgctgaagtccctgtgggaggctcctggctggtttcctgtaggtagacagctacacgtcctgcccttcattggcttcttttcatgaagctcctgccatctacaaaacatgtctcccttcttgaatcacatctctgttattgaaactcttgaactcctgaccttgtgatcctcctgcctcggcttctcaaagtgctgggattacaggcgtgagccatcgcgcccggccaattgttgcttctttttcaacaggagtgtgggctgctgctctcctctgagggcgagtgtcagggctgctacccgctggatgggcacatcttgtgcaaggcctgcagcgcctggcgcatccaggagctctcagccaccgtcaccactgactgctgagtcttcctagaagtacctgctgggttctcagttccagttcccatcctttgattgatcactctccctgacatccacctgtatgactttgtcaccaaatgctgtcttctctttctccaatcaagaaataataatccctcgagtttacaaaac

SEQ ID NO: 315327 - DNA, 2001 bp, Homo sapiens
catccgtggacttggaggctggctcgggcccgcacctcccatccccagctgcccgcaacccccagtgactcgggatcccccggagagccctcccctctcggcaggagggggctgactcagggagaaatggcagtttagggcctagggggccacgtgaccctcccccaggaatgtggtgacgtcatcggaggcgtggtcgtccccaaaattagggaggaagaggaaaaaaaaaagccagaaaaagttttcttttctggagtcccaaaacgaggtgcgggacggaagagggggtgaaggccagaggctcggggcttcaagaccgctgtctggagtccccctttccaggccatgtcggggcccacctggctgcccccgaagcagccggagcccgccagagcccctcaggggagggcgatcccccgcggcaccccggggccaccaccggcccacggagcagcactccagccccaccccagggtcaatttttgcccccttccatctgagcagtgttaccaggccccagggggaccggaggatcgggggccggcgtgggtggggtcccatggagtactccagcacacgcaggggctccctgcagacagggggggccttcgccctggaagcctggacgccgagatagacttgctgagcagcacgctggccgagctgaatgggggtcggggtcatgcgtcacggcgaccagaccgacaggcatatgagcccccgccacctcctgcctaccgcacgggctccctgaagccaaatccagcctcgccgctcccagcgtctccctatgggggccccactccagcctcttacactaccgccagcaccccggctggcccagccttccccgtgcaagtgaaggtggcacagccagtgaggggctgcggcccacccaggcggggagcctctcaggcctctgggcccctcccgggcccccactttcctctcccaggccgaggtgaagtctgggggcctggctataggagccagagagagccagggccaggggccaaagaggaagctgctggggtctctggccctgcaggaagaggaagaggaggcgagcacgggccccaggtgcccctgagccagcctccagaggatgagctggataggctgacgaagaagctggttcacgacatgaaccacccgcccagcggggagtactttggccagtgtggtggctgcggagaagatgtggttggggatggggctggggttgtggcccttgatcgcgtctttcacgtgggctgctttgtgtgttctacatgccgggcccagcttcgcggccagcatttctacgccgtggagaggagggcatattgcgagggctgctacgtggccaccctggagaaatgtgccacgtgctcccagcccatcctggaccggatcctgcgggctatggggaaggcctaccaccctggctgcttcacctgcgtggtgtgtcaccgcggcctcgacggcatccccttcacagtggatgctacgagccagatccactgcattgaggactttcacaggaagtttgccccaagatgctcagtgtgcggtggggccataatgcctgagccaggtcaggaggagactgtgagaattgttgctctggatcgaagttttcacattggctgttacaagtgcgaggagtgtgggctgctgctctcctctgagggcgagtgtcagggctgctacccgctggatgggcacatcttgtgcaaggcctgcagcgcctggcgcatccaggagctctcagccaccgtcaccactgactgctgagtcttcctagaagtacctgctgggttctcagttccagttcccatcctttgattgatcactctccctgacatccacctgtatgactttgtcaccaaatgctgtcttctctttctccaatcaagaaataataatccctcgagtttacaaaacacttccaagtctgttgtctcatctgattctcccagtagcccattaaaggcccagtcattgttactgcctgca

SEQ ID NO: 315328 - DNA, 1913 bp, Homo sapiens
  misc_feature (1653)..(1653): n is a, c, g, or t
catccgtggacttggaggctggctcgggcccgcacctcccatccccagctgcccgcaacccccagtgactcgggatcccccggagagccctcccctctcggcaggagggggctgactcagggagaaatggcagtttagggcctagggggccacgtgaccctcccccaggaatgtggtgacgtcatcggaggcgtggtcgtccccaaaattagggaggaagaggaaaaaaaaaagccagaaaaagttttcttttctggagtcccaaaacgaggtgcgggacggaagagggggtgaaggccagaggctcggggcttcaagaccgctgtctggagtccccctttccaggccatgtcggggcccacctggctgcccccgaagcagccggagcccgccagagcccctcaggggagggcgatcccccgcggcaccccggggccaccaccggcccacggagcagcactccagccccaccccagggtcaatttttgcccccttccatctgagcagtgttaccaggccccagggggaccggaggatcgggggccggcgtgggtggggtcccatggagtactccagcacacgcaggggctccctgcagacagggggggccttcgccctggaagcctggacgccgagatagacttgctgagcagcacgctggccgagctgaatgggggtcggggtcatgcgtcacggcgaccagaccgacaggcatatgagcccccgccacctcctgcctaccgcacgggctccctgaagccaaatccagcctcgccgctcccagcgtctccctatgggggccccactccagcctcttacactaccgccagcaccccggctggcccagccttccccgtgcaagtgaaggtggcacagccagtgaggggctgcggcccacccaggcggggagcctctcaggcctctgggcccctcccgggcccccactttcctctcccaggccgaggtgaagtctgggggcctggctataggagccagagagagccagggccaggggccaaagaggaagctgctggggtctctggccctgcaggaagaggaagaggaggcgagcacgggccccaggtgcccctgagccagcctccagaggatgagctggataggctgacgaagaagctggttcacgacatgaaccacccgcccagcggggagtactttggccagtgtggtggctgcggagaagatgtggttggggatggggctggggttgtggcccttgatcgcgtctttcacgtgggctgctttgtgtgttctacatgccgggcccagcttcgcggccagcatttctacgccgtggagaggagggcatattgcgagggctgctacgtggccaccctggagaaatgtgccacgtgctcccagcccatcctggaccggatcctgcgggctatggggaaggcctaccaccctggctgcttcacctgcgtggtgtgtcaccgcggcctcgacggcatccccttcacagtggatgctacgagccagatccactgcattgaggactttcacaggaagtttgccccaagatgctcagtgtgcggtggggccataatgcctgagccaggtcaggaggagactgtgagaattgttgctctggatcgaagttttcacattggctgttacaagtgcgaggagtgnggctgctacgttgccaccctggagtaactgtgtcatgtgctcccatgccatcctggagcaggatcctgcgggctatggggaaggcctaccaccctggctgcttcacctgcgtggtgtgtcaccgcggcctcgacggcatccccttcacagtggatgctacgagccagatccactgcattgaggactttcacaggaagtttgccccaagatgctcagtgtgcggtggggccataatgcctgagccaggtcaggaggagact

SEQ ID NO: 315329 - DNA, 1702 bp, Homo sapiens
catccgtggacttggaggctggctcgggcccgcacctcccatccccagctgcccgcaacccccagtgactcgggatcccccggagagccctcccctctcggcaggagggggctgactcagggagaaatggcagtttagggcctagggggccacgtgaccctcccccaggaatgtggtgacgtcatcggaggcgtggtcgtccccaaaattagggaggaagaggaaaaaaaaaagccagaaaaagttttcttttctggagtcccaaaacgaggtgcgggacggaagagggggtgaaggccagaggctcggggcttcaagaccgctgtctggagtccccctttccaggccatgtcggggcccacctggctgcccccgaagcagccggagcccgccagagcccctcaggggagggcgatcccccgcggcaccccggggccaccaccggcccacggagcagcactccagccccaccccagggtcaatttttgcccccttccatctgagcagtgttaccaggccccagggggaccggaggatcgggggccggcgtgggtggggtcccatggagtactccagcacacgcaggggctccctgcagacagggggggccttcgccctggaagcctggacgccgagatagacttgctgagcagcacgctggccgagctgaatgggggtcggggtcatgcgtcacggcgaccagaccgacaggcatatgagcccccgccacctcctgcctaccgcacgggctccctgaagccaaatccagcctcgccgctcccagcgtctccctatgggggccccactccagcctcttacactaccgccagcaccccggctggcccagccttccccgtgcaagtgaaggtggcacagccagtgaggggctgcggcccacccaggcggggagcctctcaggcctctgggcccctcccgggcccccactttcctctcccaggccgaggtgaagtctgggggcctggctataggagccagagagagccagggccaggggccaaagaggaagctgctggggtctctggccctgcaggaagaggaagaggaggcgagcacgggccccaggtgcccctgagccagcctccagaggatgagctggataggctgacgaagaagctggttcacgacatgaaccacccgcccagcggggagtactttggccagtgtggtggctgcggagaagatgtggttggggatggggctggggttgtggcccttgatcgcgtctttcacgtgggctgctttgtgtgttctacatgccgggcccagcttcgcggccagcatttctacgccgtggagaggagggcatattgcgagggctgctacgtggccaccctggagaaatgtgccacgtgctcccagcccatcctggaccggatcctgcgggctatggggaaggcctaccaccctggctgcttcacctgcgtggtgtgtcaccgcggcctcgacggcatccccttcacagtggatgctacgagccagatccactgcattgaggactttcacaggaagtttgccccaagatgctcagtgtgcggtggggccataatgcctgagccaggtcaggaggagactgtgagaattgttgctctggatcgaagttttcacattggctgttacaagtgcgagcccccgcggcaccccggggccaccaccggcccacggagcagcactccagccccac

SEQ ID NO: 315330 - DNA, 1879 bp, Homo sapiens
catccgtggacttggaggctggctcgggcccgcacctcccatccccagctgcccgcaacccccagtgactcgggatcccccggagagccctcccctctcggcaggagggggctgactcagggagaaatggcagtttagggcctagggggccacgtgaccctcccccaggaatgtggtgacgtcatcggaggcgtggtcgtccccaaaattagggaggaagaggaaaaaaaaaagccagaaaaagttttcttttctggagtcccaaaacgaggtgcgggacggaagagggggtgaaggccagaggctcggggcttcaagaccgctgtctggagtccccctttccaggccatgtcggggcccacctggctgcccccgaagcagccggagcccgccagagcccctcaggggagggcgatcccccgcggcaccccggggccaccaccggcccacggagcagtgttaccaggccccagggggaccggaggatcgggggccggcgtgggtggggtcccatggagtactccagcacacgcaggggctccctgcagacagggggggccttcgccctggaagcctggacgccgagatagacttgctgagcagcacgctggccgagctgaatgggggtcggggtcatgcgtcacggcgaccagaccgacaggcatatgagcccccgccacctcctgcctaccgcacgggctccctgaagccaaatccagcctcgccgctcccagcgtctccctatgggggccccactccagcctcttacactaccgccagcaccccggctggcccagccttccccgtgcaagtgaaggtggcacagccagtgaggggctgcggcccacccaggcggggagcctctcaggcctctgggcccctcccgggcccccactttcctctcccaggccgaggtgaagtctgggggcctggctataggagccagagagagccagggccaggggccaaagaggaagctgctggggtctctggccctgcaggaagaggaagaggaggcgagcacgggccccaggtgcccctgagccagcctccagaggatgagctggataggctgacgaagaagctggttcacgacatgaaccacccgcccagcggggagtactttggccagtgtggtggctgcggagaagatgtggttggggatggggctggggttgtggcccttgatcgcgtctttcacgtgggctgctttgtgtgttctacatgccgggcccagcttcgcggccagcatttctacgccgtggagaggagggcatattgcgagggctgctacgtggccaccctggagaaatgtgccacgtgctcccagcccatcctggaccggatcctgcgggctatggggaaggcctaccaccctggctgcttcacctgcgtggtgtgtcaccgcggcctcgacggcatccccttcacagtggatgctacgagccagatccactgcattgaggactttcacaggaagtttgccccaagatgctcagtgtgcggtggggccataatgcctgagccaggtcaggaggagactgtgagaattgttgctctggatcgaagttttcacattggctgttacaagtgcgaggagtgtgggctgctgctctcctctgagggcgagtgtcagggctgctacccgctggatgggcacatcttgtgcaaggcctgcagcgcctggcgcatccaggagctctcagccaccgtcaccactgactgctgagtcttcctagaagtacctgctgggttctcagttccagttcccatcctttgattgatcactctccctgacatccacctgtatgactttgtcaccaaatgctgtcttctctttctccaatcaagaaataataatccctcgagtttacaaaac

SEQ ID NO: 315331 - DNA, 2015 bp, Homo sapiens
catccgtggacttggaggctggctcgggcccgcacctcccatccccagctgcccgcaacccccagtgactcgggatcccccggagagccctcccctctcggcaggagggggctgactcagggagaaatggcagtttagggcctagggggccacgtgaccctcccccaggaatgtggtgacgtcatcggaggcgtggtcgtccccaaaattagggaggaagaggaaaaaaaaaagccagaaaaagttttcttttctggagtcccaaaacgaggtgcgggacggaagagggggtgaaggccagaggctcggggcttcaagaccgctgtctggagtccccctttccaggccatgtcggggcccacctggctgcccccgaagcagccggagcccgccagagcccctcaggggagggcgatcccccgcggcaccccggggccaccaccggcccacggagcagcactccagccccaccccagggtcaatttttgcccccttccatctgagcagtgttaccaggccccagggggaccggaggatcgggggccggcgtgggtggggtcccatggagtactccagcacacgcaggggctccctgcagacagggggggccttcgccctggaagcctggacgccgagatagacttgctgagcagcacgctggccgagctgaatgggggtcggggtcatgcgtcacggcgaccagaccgacaggcatatgagcccccgccacctcctgcctaccgcacgggctccctgaagccaaatccagcctcgccgctcccagcgtctccctatgggggccccactccagcctcttacactaccgccagcaccccggctggcccagccttccccgtgcaagtgaaggtggcacagccagtgaggggctgcggcccacccaggcggggagcctctcaggcctctgggcccctcccgggcccccactttcctctcccaggccgaggtgaagtctgggggcctggctataggagccagagagagccagggccaggggccaaagaggaagctgctggggtctctggccctgcaggaagaggaagaggaggcgagcacgggccccaggtgcccctgagccagcctccagaggatgagctggataggctgacgaagaagctggttcacgacatgaaccacccgcccagcggggagtactttggccagtgtggtggctgcggagaagatgtggttggggatggggctggggttgtggcccttgatcgcgtctttcacgtgggctgctttgtgtgttctacatgccgggcccagcttcgcggccagcatttctacgccgtggagaggagggcatattgcgagggctgctacgtgggtgagtggctggggctgggaggagggagtcagtggctggatgcagggggcttccatccaaggtggtaactagagcgtccaagaccaaaggaggaacggtgctaaaagccaggcgactgaaagtgatgtacaaacagggcggaattctgcaagtatcaagcaagtagcttaacactggtggctgaagggaaggacgcagctcttacaagtgtggagcatcttacagttaaagagaatgtgttagattcccatgacacccctgtgaggccaccctggagaaatgtgccacgtgctcccagcccatcctggaccggatcctgcgggctatggggaaggcctaccaccctggctgcttcacctgcgtggtgtgtcaccgcggcctcgacggcatccccttcacagtggatgctacgagccagatccactgcattgaggactttcacaggaagtttgccccaagatgctcagtgtgcggtggggccataatgcctgagccaggtcaggaggagactgtgagaattgttgctctggatcgaagttttcacattggctgttacaagtgcgaggtcaggggcccccagcacgtgcaaggggctggcagtgtctagggtgctgggtagagcatgagggggaacacagaggtctggggttgatggaaacctgttgct

SEQ ID NO: 315332 - DNA, 1286 bp, Homo sapiens
  misc_feature (1272)..(1272): n is a, c, g, or t
catccgtggacttggaggctggctcgggcccgcacctcccatccccagctgcccgcaacccccagtgactcgggatcccccggagagccctcccctctcggcaggagggggctgactcagggagaaatggcagtttagggcctagggggccacgtgaccctcccccaggaatgtggtgacgtcatcggaggcgtggtcgtccccaaaattagggaggaagaggaaaaaaaaaagccagaaaaagttttcttttctggagtcccaaaacgaggtgcgggacggaagagggggtgaaggccagaggctcggggcttcaagaccgctgtctggagtccccctttccaggccatgtcggggcccacctggctgcccccgaagcagccggagcccgccagagcccctcaggggagggcgatcccccgcggcaccccggggccaccaccggcccacggagcagcactccagccccaccccagggtcaatttttgcccccttccatctgagcagtgttaccaggccccagggggaccggaggatcgggggccggcgtgggtggggtcccatggagtactccagcacacgcaggggctccctgcagacagggggggccttcgccctggaagcctggacgccgagatagacttgctgagcagcacgctggccgagctgaatgggggtcggggtcatgcgtcacggcgaccagaccgacaggcatatgagcccccgccacctcctgcctaccgcacgggctccctgaagccaaatccagcctcgccgctcccagcgtctccctatgggggccccactccagcctcttacactaccgccagcaccccggctggcccagccttccccgtgcaagtgaaggtggcacagccagtgaggggctgcggcccacccaggcggggagcctctcaggcctctgggcccctcccgggcccccactttcctctcccaggccgaggtgaagtctgggggcctggctataggagccagagagagccagggccaggggccaaagaggaagctgctggggtctctggccctgcaggaagaggaagaggaggcgagcacgggccccaggtgcccctgagccagcctccagaggatgagctggataggctgacgaagaagctggttcacgacatgaaccacccgcccagcggggagtactttgccaatgtggtgggttgcgaaaaaaatgtggtgggggattgggcctgggatatttacttatgcctctaatttttattctaactttacttaggggtnttatggggttttta

SEQ ID NO: 315333 - DNA, 746 bp, Homo sapiens
gtgatccacccacctcggcttcccaaaatgctgggactacaggcatgagccaccgcgcccagcctgcattttctttagttcaatgcattaagtgcgttcacattgttgtacaaccatcaccactatccatctccagaactctttttcatcttcccaagctgaaagccaccctggagaaatgtgccacgtgctcccagcccatcctggaccggatcctgcgggctatggggaaggcctaccaccctggctgcttcacctgcgtggtgtgtcaccgcggcctcgacggcatccccttcacagtggatgctacgagccagatccactgcattgaggactttcacaggaagtttgccccaagatgctcagtgtgcggtggggccataatgcctgagccaggtcaggaggagactgtgagaattgttgctctggatcgaagttttcacattggctgttacaagtgcgaggagtgtgggctgctgctctcctctgagggcgagtgtcagggctgctacccgctggatgggcacatcttgtgcaaggcctgcagcgcctggcgcatccaggagctctcagccaccgtcaccactgactgctgagtcttcctagaagtacctgctgggttctcagttccagttcccatcctttgattgatcactctccctgacatccacctgtatgactttgtcaccaaatgctgtcttctctttctccaatcaagaaataataatccctcgagtttacaaaac

SEQ ID NO: 315334 - DNA, 399 bp, Homo sapiens
acccctcctgtcctccgccaccccacctttgatttctcttccctcaacccagcactccagccccaccccagggtcaatttttgcccccttccatctgagcagtgttaccaggccccagggggaccggaggatcgggggccggcgtgggtggggtcccatggagtactccagcacacgcaggtgagacccgggatcgtggggtgggacatgtgggatcccccagaaccgagtctgagggacccaggacaggagaaggcctatggtgatttgcattcttcctgccctggctccatcctcaggggctccctgcagacagggggggccttcgccctggaagcctggacgccgagatagacttgctgagcagcacgctggccgagctgaatgggggtcggggtc

SEQ ID NO: 315335 - DNA, 652 bp, Homo sapiens
ggaagtaactttagaggaggatctgactctctctccctcctttcctcagaggatgtccggcttccagatcaacctcaacccgctcaaggagccactcggcttcatcaaggtcctcgagtggattgcttctatctttgcttttgccacctgtggaggttttaagggccaaacagaaattcaagtgaattgtcctcctgcagttactgagaataaaactgttacagctacttttggttatccattcaggttgaatgaggcatcatttcagccacctccaggtgtaaacatatgtgatgtaaattggaaagattacgtcctcataggcgattactcttcttctgcacaattctatgttacctttgcagtctttgtgttcctgtactgcattgctgcccttctgctttatgttggctacacgagtctgtatctggatagtcgtaaacttcctatgatagactttgttgttacacttgttgccacttttttgtggttggtgagcacttcagcctgggctaaagctctgacagatattaaaatagctactggtcacaatattattgatgaacttccgccttgtaagaagaaagcgcctggaaaaagtctgggatatttggccttctcaatatgataatctggggaagaaatgctttgt

SEQ ID NO: 315336 - DNA, 2133 bp, Homo sapiens
agcgcgccagccccgcctgcccttcctcgccaccgggctgctctggtctcgtcggtcccctcctccgccccgtcgtcctgactctctctccctcctttcctcagaggatgtccggcttccagatcaacctcaacccgctcaaggagccactcggcttcatcaaggtcctcgagtggattgcttctatctttgcttttgccacctgtggaggttttaagggccaaacagaaattcaagtgaattgtcctcctgcagttactgagaataaaactgttacagctacttttggttatccattcaggttgaatgaggcatcatttcagccacctccaggtgtaaacatatgtgatgtaaattggaaagattacgtcctcataggcgattactcttcttctgcacaattctatgttacctttgcagtctttgtgttcctgtactgcattgctgcccttctgctttatgttggctacacgagtctgtatctggatagtcgtaaacttcctatgatagactttgttgttacacttgttgccacttttttgtggttggtgagcacttcagcctgggctaaagctctgacagatattaaaatagctactggtcacaatattattgatgaacttccgccttgtaagaagaaagcagtactgtgttactttggctctgtgaccagtatgggatccctaaatgtatctgtgatatttggctttctaaatatgatactctggggaggaaatgcttggtttgtgtacaaggagaccagcctacacagtccatcaaatacatctgcccctcatagccaaggaggtattccacctcctaccggaatataattaaagggagaaatacactgtatgaagtatatgttgatactatgacatgttgccaacaccttgagaagcattatttgtttctaataaaagtaatggctttgtcaatatattggtgggtttaaaactttgctgcttttttacataaagcctgtgcctttcctagaaagttaagatgtaaatgtattctcacatgtaaatttgaaagttcaggggtctattatgaaatgatacacatttttaaatgaaccataatttttttcactaagctgtttgccttccaaagtgtttacaccttaagccttaacatgtatcttcattcagaaaacagttatattgtcataccatagtaggaagaaaaacctttatttggaatatacactactgtaagtttgtacagatcatatacctaccacctgtctttgcttaaagagccttgattacataaatatgtaggaaaaaacatattgagttcaaaatttatatctaacattgtttatgttatgatttttttttaattgcaaagactaggtgtatatttttttctgtttttctaaatgacccgtggtacttaataggtgtactaaaattgtgttgggagcagggatttggaaatttctgagagatgtgtagttaatttagtaattctgtttcatgagatatgatctgttatgctagtggtttaataggcttgctatgtaagtagaacgtggctcaactagatatctttatatgtatgggcattactcttagtgatatttgtttcctgtcctttgttgctcatgctgtttaagtgcaggctgagacccagcctctttgtaagtacagtaaaataatccaccgttttttacagaccctagtcaaagggttaaaaaaattaagattgctttccatgtttgaaatttaccattgagagtcaatgaagttgctattttgagtttagcattgatattgtgaaaataagtgcaatttggatttcatgtttcttaatattcattcttgtttcacaaatgaatgattaaggaattatgcatcataaaggaacctaagtgaggtatatgatgagtgtattgtctttgcacacacatataggtatattctgaatacaagcttattcacattttgcttcctaatctttttgttgtacagggattcaggtttcttattcttacaacatgattgtttatatgtgaagcacatcttgctgttgccttatttttgatgcttttattcatgacaagaattgtcaatataagaatgtatatcttttttgcaaccaatttaataaaggagttgaaagaaa

SEQ ID NO: 315337 - DNA, 2256 bp, Homo sapiens
agcgcgccagccccgcctgcccttcctcgccaccgggctgctctggtctcgtcggtcccctcctccgccccgtcgtcctgactctctctccctcctttcctcagaggatgtccggcttccagatcaacctcaacccgctcaaggagccactcggcttcatcaaggtcctcgagtggattgcttctatctttgcttttgccacctgtggaggttttaagggccaaacagaaattcaagtgaattgtcctcctgcagttactgagaataaaactgttacagctacttttggttatccattcaggttgaatgaggcatcatttcagccacctccaggtgtaaacatatgtgatgtaaattggaaagattacgtcctcataggcgattactcttcttctgcacaattctatgttacctttgcagtctttgtgttcctgtactgcattgctgcccttctgctttatgttggctacacgagtctgtatctggatagtcgtaaacttcctatgatagactttgttgttacacttgttgccacttttttgtggttggtgagcacttcagcctgggctaaagctctgacagatattaaaatagctactggtcacaatattattgatgaacttccgccttgtaagaagaaagcagtactgtgttactttggctctgtgaccagtatgggatccctaaatgtatctgtgatatttggctttctaaatatgatactctggggaggaaatgcttggtttgtgtacaaggagaccagcctacacagtccatcaaatacatctgcccctcatagccaaggaggtattccacctcctaccggaatataattaaagggagaaatacactgtatgaagtatatgttgatactatgacatgttgccaacaccttgagaagcattatttgtttctaataaaagtaatggctttgtcaatatattggtgggtttaaaactttgctgcttttttacataaagcctgtgcctttcctagaaagttaagatgtaaatgtattctcacatgtaaatttgaaagttcaggggtctattatgaaatgatacacatttttaaatgaaccataatttttttcactaagctgtttgccttccaaagtgtttacaccttaagccttaacatgtatcttcattcagaaaacagttatattgtcataccatagtaggaagaaaaacctttatttggaatatacactactgtaagtttgtacagatcatatacctaccacctgtctttgcttaaagagccttgattacataaatatgtaggaaaaaacatattgagttcaaaatttatatctaacattgtttatgttatgatttttttttaattgcaaagactaggtgtatatttttttctgtttttctaaatgacccgtggtacttaataggtgtactaaaattgtgttgggagcagggatttggaaatttctgagagatgtgtagttaatttagtaattctgtttcatgagatatgatctgttatgctagtggtttaataggcttgctatgtaagtagaacgtggctcaactagatatctttatatgtatgggcattactcttagtgatatttgtttcctgtcctttgttgctcatgctgtttaagtgcaggctgagacccagcctctttgtaagtacagtaaaataatccaccgttttttacagaccctagtcaaagggttaaaaaaattaagattgctttccatgtttgaaatttaccattgagagtcaatgaagttgctattttgagtttagcattgatattgtgaaaataagtgcaatttggatttcatgtttcttaatattcattcttgtttcacaaatgaatgattaaggaattatgcatcataaaggaacctaagtgaggtatatgatgagtgtattgtctttgcacacacatataggtatattctgaatacaagcttattcacattttgcttcctaatctttttgttgtacagggattcaggtttcttattcttacaacatgattgtttatatgtgaagcacatcttgctgttgccttatttttgatgcttttattcatgacaagaattgtcaatataagaatgtatatcttttttgagaagacaatcccctcatcatatacctcacttaggaacctttataatgcataaatacatcatcattaatttgtgaacacagcatgaatattaagaaacccgaactccaaaatgcacaaaacataacgtcgaagcggccacgtactacaactac

SEQ ID NO: 315338 - DNA, 2024 bp, Homo sapiens
ggaagtaactttagaggaggatctgactctctctccctcctttcctcagaggatgtccggcttccagatcaacctcaacccgctcaaggagccactcggcttcatcaaggtcctcgagtggattgcttctatctttgcttttgccacctgtggaggttttaagggccaaacagaaattcaagtgaattgtcctcctgcagttactgagaatcagccacctccaggtgtaaacatatgtgatgtaaattggaaagattacgtcctcataggcgattactcttcttctgcacaattctatgttacctttgcagtctttgtgttcctgtactgcattgctgcccttctgctttatgttggctacacgagtctgtatctggatagtcgtaaacttcctatgatagactttgttgttacacttgttgccacttttttgtggttggtgagcacttcagcctgggctaaagctctgacagatattaaaatagctactggtcacaatattattgatgaacttccgccttgtaagaagaaagcagtactgtgttactttggctctgtgaccagtatgggatccctaaatgtatctgtgatatttggctttctaaatatgatactctggggaggaaatgcttggtttgtgtacaaggagaccagcctacacagtccatcaaatacatctgcccctcatagccaaggaggtattccacctcctaccggaatataattaaagggagaaatacactgtatgaagtatatgttgatactatgacatgttgccaacaccttgagaagcattatttgtttctaataaaagtaatggctttgtcaatatattggtgggtttaaaactttgctgcttttttacataaagcctgtgcctttcctagaaagttaagatgtaaatgtattctcacatgtaaatttgaaagttcaggggtctattatgaaatgatacacatttttaaatgaaccataatttttttcactaagctgtttgccttccaaagtgtttacaccttaagccttaacatgtatcttcattcagaaaacagttatattgtcataccatagtaggaagaaaaacctttatttggaatatacactactgtaagtttgtacagatcatatacctaccacctgtctttgcttaaagagccttgattacataaatatgtaggaaaaaacatattgagttcaaaatttatatctaacattgtttatgttatgatttttttttaattgcaaagactaggtgtatatttttttctgtttttctaaatgacccgtggtacttaataggtgtactaaaattgtgttgggagcagggatttggaaatttctgagagatgtgtagttaatttagtaattctgtttcatgagatatgatctgttatgctagtggtttaataggcttgctatgtaagtagaacgtggctcaactagatatctttatatgtatgggcattactcttagtgatatttgtttcctgtcctttgttgctcatgctgtttaagtgcaggctgagacccagcctctttgtaagtacagtaaaataatccaccgttttttacagaccctagtcaaagggttaaaaaaattaagattgctttccatgtttgaaatttaccattgagagtcaatgaagttgctattttgagtttagcattgatattgtgaaaataagtgcaatttggatttcatgtttcttaatattcattcttgtttcacaaatgaatgattaaggaattatgcatcataaaggaacctaagtgaggtatatgatgagtgtattgtctttgcacacacatataggtatattctgaatacaagcttattcacattttgcttcctaatctttttgttgtacagggattcaggtttcttattcttacaacatgattgtttatatgtgaagcacatcttgctgttgccttatttttgatgcttttattcatgacaagaattgtcaatataagaatgtatatcttttttgcaaccaatttaataaaggagttgaaagaaa

SEQ ID NO: 315339 - DNA, 2078 bp, Homo sapiens
agcgcgccagccccgcctgcccttcctcgccaccgggctgctctggtctcgtcggtcccctcctccgccccgtcgtcctgactctctctccctcctttcctcagaggatgtccggcttccagatcaacctcaacccgctcaaggagccactcggcttcatcaaggtcctcgagtggattgcttctatctttgcttttgccacctgtggaggttttaagggccaaacagaaattcaagtgaattgtcctcctgcagttactgagaataaaactgttacagctacttttggttatccattcaggttgaatgaggcatcatttcagccacctccaggtgtaaacatatgtgatgtaaattggaaagattacgtcctcataggcgattactcttcttctgcacaattctatgttacctttgcagtctttgtgttcctgtactgcattgctgcccttctgctttatgttggctacacgagtctgtatctggatagtcgtaaacttcctatgatagactttgttgttacacttgttgccacttttttgtggttggtgagcacttcagcctgggctaaagctctgacagatattaaaatagctactggtcacaatattattgatgaacttccgccttgtaagaagaaagcatatttggctttctaaatatgatactctggggaggaaatgcttggtttgtgtacaaggagaccagcctacacagtccatcaaatacatctgcccctcatagccaaggaggtattccacctcctaccggaatataattaaagggagaaatacactgtatgaagtatatgttgatactatgacatgttgccaacaccttgagaagcattatttgtttctaataaaagtaatggctttgtcaatatattggtgggtttaaaactttgctgcttttttacataaagcctgtgcctttcctagaaagttaagatgtaaatgtattctcacatgtaaatttgaaagttcaggggtctattatgaaatgatacacatttttaaatgaaccataatttttttcactaagctgtttgccttccaaagtgtttacaccttaagccttaacatgtatcttcattcagaaaacagttatattgtcataccatagtaggaagaaaaacctttatttggaatatacactactgtaagtttgtacagatcatatacctaccacctgtctttgcttaaagagccttgattacataaatatgtaggaaaaaacatattgagttcaaaatttatatctaacattgtttatgttatgatttttttttaattgcaaagactaggtgtatatttttttctgtttttctaaatgacccgtggtacttaataggtgtactaaaattgtgttgggagcagggatttggaaatttctgagagatgtgtagttaatttagtaattctgtttcatgagatatgatctgttatgctagtggtttaataggcttgctatgtaagtagaacgtggctcaactagatatctttatatgtatgggcattactcttagtgatatttgtttcctgtcctttgttgctcatgctgtttaagtgcaggctgagacccagcctctttgtaagtacagtaaaataatccaccgttttttacagaccctagtcaaagggttaaaaaaattaagattgctttccatgtttgaaatttaccattgagagtcaatgaagttgctattttgagtttagcattgatattgtgaaaataagtgcaatttggatttcatgtttcttaatattcattcttgtttcacaaatgaatgattaaggaattatgcatcataaaggaacctaagtgaggtatatgatgagtgtattgtctttgcacacacatataggtatattctgaatacaagcttattcacattttgcttcctaatctttttgttgtacagggattcaggtttcttattcttacaacatgattgtttatatgtgaagcacatcttgctgttgccttatttttgatgcttttattcatgacaagaattgtcaatataagaatgtatatcttttttgcaaccaatttaataaaggagttgaaagaaa

SEQ ID NO: 315340 - DNA, 2078 bp, Homo sapiens
agcgcgccagccccgcctgcccttcctcgccaccgggctgctctggtctcgtcggtcccctcctccgccccgtcgtcctgactctctctccctcctttcctcagaggatgtccggcttccagatcaacctcaacccgctcaaggagccactcggcttcatcaaggtcctcgagtggattgcttctatctttgcttttgccacctgtggaggttttaagggccaaacagaaattcaagtgaattgtcctcctgcagttactgagaataaaactgttacagctacttttggttatccattcaggttgaatgaggcatcatttcagccacctccaggtgtaaacatatgtgatgtaaattggaaagattacgtcctcataggcgattactcttcttctgcacaattctatgttacctttgcagtctttgtgttcctgtactgcattgctgcccttctgctttatgttggctacacgagtctgtatctggatagtcgtaaacttcctatgatagactttgttgttacacttgttgccacttttttgtggttggtgagcacttcagcctgggctaaagctctgacagatattaagtactgtgttactttggctctgtgaccagtatgggatccctaaatgtatctgtgatatttggctttctaaatatgatactctggggaggaaatgcttggtttgtgtacaaggagaccagcctacacagtccatcaaatacatctgcccctcatagccaaggaggtattccacctcctaccggaatataattaaagggagaaatacactgtatgaagtatatgttgatactatgacatgttgccaacaccttgagaagcattatttgtttctaataaaagtaatggctttgtcaatatattggtgggtttaaaactttgctgcttttttacataaagcctgtgcctttcctagaaagttaagatgtaaatgtattctcacatgtaaatttgaaagttcaggggtctattatgaaatgatacacatttttaaatgaaccataatttttttcactaagctgtttgccttccaaagtgtttacaccttaagccttaacatgtatcttcattcagaaaacagttatattgtcataccatagtaggaagaaaaacctttatttggaatatacactactgtaagtttgtacagatcatatacctaccacctgtctttgcttaaagagccttgattacataaatatgtaggaaaaaacatattgagttcaaaatttatatctaacattgtttatgttatgatttttttttaattgcaaagactaggtgtatatttttttctgtttttctaaatgacccgtggtacttaataggtgtactaaaattgtgttgggagcagggatttggaaatttctgagagatgtgtagttaatttagtaattctgtttcatgagatatgatctgttatgctagtggtttaataggcttgctatgtaagtagaacgtggctcaactagatatctttatatgtatgggcattactcttagtgatatttgtttcctgtcctttgttgctcatgctgtttaagtgcaggctgagacccagcctctttgtaagtacagtaaaataatccaccgttttttacagaccctagtcaaagggttaaaaaaattaagattgctttccatgtttgaaatttaccattgagagtcaatgaagttgctattttgagtttagcattgatattgtgaaaataagtgcaatttggatttcatgtttcttaatattcattcttgtttcacaaatgaatgattaaggaattatgcatcataaaggaacctaagtgaggtatatgatgagtgtattgtctttgcacacacatataggtatattctgaatacaagcttattcacattttgcttcctaatctttttgttgtacagggattcaggtttcttattcttacaacatgattgtttatatgtgaagcacatcttgctgttgccttatttttgatgcttttattcatgacaagaattgtcaatataagaatgtatatcttttttgcaaccaatttaataaaggagttgaaagaaa

SEQ ID NO: 315341 - DNA, 1533 bp, Homo sapiens
tatcctatatagtgaagcagaattcaccaagcgtagcattgttcacttaggcacatacacacacactggcacacgcaggcatcatccatccgtcattcattcaaatatttattgagcacctactatgtgcccagccctgttctaggcactgggcattaccatggagaacaaaatagacaaatacatctgcccctcatagccaaggaggtattccacctcctaccggaatataattaaagggagaaatacactgtatgaagtatatgttgatactatgacatgttgccaacaccttgagaagcattatttgtttctaataaaagtaatggctttgtcaatatattggtgggtttaaaactttgctgcttttttacataaagcctgtgcctttcctagaaagttaagatgtaaatgtattctcacatgtaaatttgaaagttcaggggtctattatgaaatgatacacatttttaaatgaaccataatttttttcactaagctgtttgccttccaaagtgtttacaccttaagccttaacatgtatcttcattcagaaaacagttatattgtcataccatagtaggaagaaaaacctttatttggaatatacactactgtaagtttgtacagatcatatacctaccacctgtctttgcttaaagagccttgattacataaatatgtaggaaaaaacatattgagttcaaaatttatatctaacattgtttatgttatgatttttttttaattgcaaagactaggtgtatatttttttctgtttttctaaatgacccgtggtacttaataggtgtactaaaattgtgttgggagcagggatttggaaatttctgagagatgtgtagttaatttagtaattctgtttcatgagatatgatctgttatgctagtggtttaataggcttgctatgtaagtagaacgtggctcaactagatatctttatatgtatgggcattactcttagtgatatttgtttcctgtcctttgttgctcatgctgtttaagtgcaggctgagacccagcctctttgtaagtacagtaaaataatccaccgttttttacagaccctagtcaaagggttaaaaaaattaagattgctttccatgtttgaaatttaccattgagagtcaatgaagttgctattttgagtttagcattgatattgtgaaaataagtgcaatttggatttcatgtttcttaatattcattcttgtttcacaaatgaatgattaaggaattatgcatcataaaggaacctaagtgaggtatatgatgagtgtattgtctttgcacacacatataggtatattctgaatacaagcttattcacattttgcttcctaatctttttgttgtacagggattcaggtttcttattcttacaacatgattgtttatatgtgaagcacatcttgctgttgccttatttttgatgcttttattcatgacaagaattgtcaatataagaatgtatatcttttttgcaaccaatttaataaaggagttgaaagaaa

SEQ ID NO: 315342 - DNA, 808 bp, Homo sapiens
agcgcgccagccccgcctgcccttcctcgccaccgggctgctctggtctcgtcggtcccctcctccgccccgtcgtcctgactctctctccctcctttcctcagaggatgtccggcttccagatcaacctcaacccgctcaaggagccactcggcttcatcaaggtcctcgagtggattgcttctatctttgcttttgccacctgtggaggttttaagggccaaacagaaattcaagtgaattgtcctcctgcagttactgagaataaaactgttacagctacttttggttatccattcaggttgaatgaggcatcatttcagccacctccaggtgtaaacatatgtgatgtaaattggaaagattacgtcctcataggcgattactcttcttctgcacaattctatgttacctttgcagtctttgtgttcctgtactgcattgctgcccttctgctttatgttggctacacgagtctgtatctggatagtcgtaaacttcctatgatagactttgttgttacacttgttgccacttttttgtggttggtgagcacttcagcctgggctaaagctctgacagatattaaaatagctactggtcacaatattattgatgaacttccgccttgtaagaagaaagcagtactgtgttactttggctctgtgaccagtatgggatccctaaatgtatctgtgggatatttggctttctaaatttggtactttggggagggaattccttggttggggtcccagggtaaccagcccaaccaggtcgtgtaaattcctatgcccccttttgagcc

SEQ ID NO: 315343 - DNA, 524 bp, Homo sapiens
attttgagtttagcattgatattgtgaaaataagtgcaatttggatttcatgtttcttaatattcattcttgtttcacaaatgaatgattaaggaattatgcatcataaaggaacctaagtgaggtatatgatgagtgtattgtctttgcacacacatataggtatattctgaatacaagcttattcacattttgcttcctaatctttttgttgtacagggattcaggtttcttattcttacaacatgattgtttatatgtgaagcacatcttgctgttgccttatttttgatgcttttattcatgacaagaattgtcaatataagaatgtatatcttttttgcaaccaatttaataaaggagttgaaagaaaaagaaagagtgcactgattgttaatattacaaagaaaccttcatcttaaaggcattgagcagtgcaaaacagaactgattttcaaagcaggaaatagaatcacagttttaatgtttggcaaggaataaaacagacagaaatgctttggaga

SEQ ID NO: 315344 - DNA, 2180 bp, Homo sapiens
agcgcggcgcgggcccaacgagcgcacgcgtacacgcgtgcgcaggggaagaccgagtgccagggctgaaccgcagggaagggggcgcggcgcacgcagtatggcgcccaacatctacttggttcgccagcggatcagtcgactcggccagaggatgtccggcttccagatcaacctcaacccgctcaaggagccactcggcttcatcaaggtcctcgagtggattgcttctatctttgcttttgccacctgtggaggttttaagggccaaacagaaattcaagtgaattgtcctcctgcagttactgagaataaaactgttacagctacttttggttatccattcaggttgaatgaggcatcatttcagccacctccaggtgtaaacatatgtgatgtaaattggaaagattacgtcctcataggcgattactcttcttctgcacaattctatgttacctttgcagtctttgtgttcctgtactgcattgctgcccttctgctttatgttggctacacgagtctgtatctggatagtcgtaaacttcctatgatagactttgttgttacacttgttgccacttttttgtggttggtgagcacttcagcctgggctaaagctctgacagatattaaaatagctactggtcacaatattattgatgaacttccgccttgtaagaagaaagcagtactgtgttactttggctctgtgaccagtatgggatccctaaatgtatctgtgatatttggctttctaaatatgatactctggggaggaaatgcttggtttgtgtacaaggagaccagcctacacagtccatcaaatacatctgcccctcatagccaaggaggtattccacctcctaccggaatataattaaagggagaaatacactgtatgaagtatatgttgatactatgacatgttgccaacaccttgagaagcattatttgtttctaataaaagtaatggctttgtcaatatattggtgggtttaaaactttgctgcttttttacataaagcctgtgcctttcctagaaagttaagatgtaaatgtattctcacatgtaaatttgaaagttcaggggtctattatgaaatgatacacatttttaaatgaaccataatttttttcactaagctgtttgccttccaaagtgtttacaccttaagccttaacatgtatcttcattcagaaaacagttatattgtcataccatagtaggaagaaaaacctttatttggaatatacactactgtaagtttgtacagatcatatacctaccacctgtctttgcttaaagagccttgattacataaatatgtaggaaaaaacatattgagttcaaaatttatatctaacattgtttatgttatgatttttttttaattgcaaagactaggtgtatatttttttctgtttttctaaatgacccgtggtacttaataggtgtactaaaattgtgttgggagcagggatttggaaatttctgagagatgtgtagttaatttagtaattctgtttcatgagatatgatctgttatgctagtggtttaataggcttgctatgtaagtagaacgtggctcaactagatatctttatatgtatgggcattactcttagtgatatttgtttcctgtcctttgttgctcatgctgtttaagtgcaggctgagacccagcctctttgtaagtacagtaaaataatccaccgttttttacagaccctagtcaaagggttaaaaaaattaagattgctttccatgtttgaaatttaccattgagagtcaatgaagttgctattttgagtttagcattgatattgtgaaaataagtgcaatttggatttcatgtttcttaatattcattcttgtttcacaaatgaatgattaaggaattatgcatcataaaggaacctaagtgaggtatatgatgagtgtattgtctttgcacacacatataggtatattctgaatacaagcttattcacattttgcttcctaatctttttgttgtacagggattcaggtttcttattcttacaacatgattgtttatatgtgaagcacatcttgctgttgccttatttttgatgcttttattcatgacaagaattgtcaatataagaatgtatatcttttttgcaaccaatttaataaaggagttgaaagaaa

SEQ ID NO: 315345 - DNA, 2291 bp, Homo sapiens
  misc_feature (2189)..(2189): n is a, c, g, or t
  misc_feature (2224)..(2224): n is a, c, g, or t
  misc_feature (2230)..(2231): n is a, c, g, or t
  misc_feature (2235)..(2235): n is a, c, g, or t
agcgcgccagccccgcctgcccttcctcgccaccgggctgctctggtctcgtcggtcccctcctccgccccgtcgtcctgactctctctccctcctttcctcagaggatgtccggcttccagatcaacctcaacccgctcaaggagccactcggcttcatcaaggtcctcgagtggattgcttctatctttgcttttgccacctgtggaggttttaagggccaaacagaaattcaagtgaattgtcctcctgcagttactgagaataaaactgttacagctacttttggttatccattcaggttgaatgaggcatcatttcagccacctccaggtgtaaacatatgtgatgtaaattggaaagattacgtcctcataggcgattactcttcttctgcacaattctatgttacctttgcagtctttgtgttcctgtactgcattgctgcccttctgctttatgttggctacacgagtctgtatctggatagtcgtaaacttcctatgatagactttgttgttacacttgttgccacttttttgtggttggtgagcacttcagcctgggctaaagctctgacagatattaaaatagctactggtcacaatattattgatgaacttccgccttgtaagaagaaagcagtactgtgttactttggctctgtgaccagtatgggatccctaaatgtatctgtgatatttggctttctaaatatgatactctggggaggaaatgcttggtttgtgtacaaggagaccagcctacacagtccatcaaatacatctgcccctcatagccaaggaggtattccacctcctaccggaatataattaaagggagaaatacactgtatgaagtatatgttgatactatgacatgttgccaacaccttgagaagcattatttgtttctaataaaagtaatggctttgtcaatatattggtgggtttaaaactttgctgcttttttacataaagcctgtgcctttcctagaaagttaagatgtaaatgtattctcacatgtaaatttgaaagttcaggggtctattatgaaatgatacacatttttaaatgaaccataatttttttcactaagctgtttgccttccaaagtgtttacaccttaagccttaacatgtatcttcattcagaaaacagttatattgtcataccatagtaggaagaaaaacctttatttggaatatacactactgtaagtttgtacagatcatatacctaccacctgtctttgcttaaagagccttgattacataaatatgtaggaaaaaacatattgagttcaaaatttatatctaacattgtttatgttatgatttttttttaattgcaaagactaggtgtatatttttttctgtttttctaaatgacccgtggtacttaataggtgtactaaaattgtgttgggagcagggatttggaaatttctgagagatgtgtagttaatttagtaattctgtttcatgagatatgatctgttatgctagtggtttaataggcttgctatgtaagtagaacgtggctcaactagatatctttatatgtatgggcattactcttagtgatatttgtttcctgtcctttgttgctcatgctgtttaagtgcaggctgagacccagcctctttgtaagtacagtaaaataatccaccgttttttacagaccctagtcaaagggttaaaaaaattaagattgctttccatgtttgaaatttaccattgagagtcaatgaagttgctattttgagtttagcattgatattgtgaaaataagtgcaatttggatttcatgtttcttaatattcattcttgtttcacaaatgaatgattaaggaattatgcatcataaaggaacctaagtgaggtatatgatgagtgtattgtctttgcacacacatataggtatattctgaatacaagcttattcacattttgcttcctaatctttttgttgtacagggattcaggtttcttattcttacaacatgattgtttatatgtgaagcacatcttgctgttgccttatttttgatgcttttattcatgacaagaattgtcaatataagaatgtatatcttttttgcaaccaatttaataaaggagttgaaagaaaaaaaaaaaaaaaaaaaaaaaaaaaaaaaaaaaaaaagcgttgcggccgcaagcgtnttccctttagagagggagggggggcgcgttcgatntggttnntagntggctgaggtgagtgggggggggggggggggggggggggggggggggggggcggga

SEQ ID NO: 315346 - DNA, 2097 bp, Homo sapiens
agcgcgccagccccgcctgcccttcctcgccaccgggctgctctggtctcgtcggtcccctcctccgccccgtcgtcctgactctctctccctcctttcctcagaggatgtccggcttccagatcaacctcaacccgctcaaggagccactcggcttcatcaaggtcctcgagtggattgcttctatctttgcttttgccacctgtggaggttttaagggccaaacagaaattcaagtgaattgtcctcctgcagttactgagaataaaactgttacagctacttttggttatccattcaggttgaatgaggcatcatttcagccacctccaggtgtaaacatatgtgatgtaaattggaaagattacgtcctcataggcgattactcttcttctgcacaattctatgttacctttgcagtctttgtgttcctgtactgcattgctgcccttctgctttatgttggctacacgagtctgtatctggatagtcgtaaacttcctatgatagactttgttgttacacttgttgccacttttttgtggttggtgagcacttcagcctgggctaaagctctgacagatattaaaatagctactggtcacaatattattgatgaacttccgccttgtaagaagaaagcagtactgtgttactttggctctgtgaccagtatgggatccctaaatgtatctgtgatatttggctttctaaatatgatactctggggaggaaatgcttggtttgtgtacaaggagaccagcctacacagtccatcaaatacatctgcccctcatagccaaggaggtattccacctcctaccggaatataattaaagggagaaatacactgtatgaagtatatgttgatactatgacatgttgccaacaccttgagaagcattatttgtttctaataaaagtaatggctttgtcaatatattggtgggtttaaaactttgctgcttttttacataaagcctgtgcctttcctagaaagttaagatgtaaatgtattctcacatgtaaatttgaaagttcaggggtctattatgaaatgatacacatttttaaatgaaccataatttttttcactaagctgtttgccttccaaagtgtttacaccttaagccttaacatgtatcttcattcagaaaacagttatattgtcataccatagtaggaagaaaaacctttatttggaatatacactactgtaagtttgtacagatcatatacctaccacctgtctttgcttaaagagccttgattacataaatatgtaggaaaaaacatattgagttcaaaatttatatctaacattgtttatgttatgatttttttttaattgcaaagactaggtgtatatttttttctgtttttctaaatgacccgtggtacttaataggtgtactaaaattgtgttgggagcagggatttggaaatttctgagagatgtgtagttaatttagtaattctgtttcatgagatatgatctgttatgctagtggtttaataggcttgctatgtaagtagaacgtggctcaactagatatctttatatgtatgggcattactcttagtgatatttgtttcctgtcctttgttgctcatgctgtttaagtgcaggctgagacccagcctctttgtaagtacagtaaaataatccaccgttttttacagaccctagtcaaagggttaaaaaaattaagattgctttccatgtttgaaatttaccattgagagtcaatgaagttgctattttgagtttagcattgatattgtgaaaataagtgcaatttggatttcatgtttcttaatattcattcttgtttcacaaatgaatgattaaggaattatgcatcataaaggaacctaagtgaggtatatgatgagtgtattgtctttgcacacacatataggtatattctgaatacttgttttttttctatcttttttgtctttccttatcttgcacaatcgttatcaatcatgtccagatgtttcgattgcataccaatctatagagcttcaaccatggcaagatgtacttcccttagcaacactgcacacgctatatattcaggaccgagccct

SEQ ID NO: 315347 - DNA, 2255 bp, Homo sapiens
agcgcgccagccccgcctgcccttcctcgccaccgggctgctctggtctcgtcggtcccctcctccgccccgtcgtcctgactctctctccctcctttcctcagaggatgtccggcttccagatcaacctcaacccgctcaaggagccactcggcttcatcaaggtcctcgagtggattgcttctatctttgcttttgccacctgtggaggttttaagggccaaacagaaattcaagtgaattgtcctcctgcagttactgagaataaaactgttacagctacttttggttatccattcaggttgaatgaggcatcatttcagccacctccaggtgtaaacatatgtgatgtaaattggaaagattacgtcctcataggcgattactcttcttctgcacaattctatgttacctttgcagtctttgtgttcctgtactgcattgctgcccttctgctttatgttggctacacgagtctgtatctggatagtcgtaaacttcctatgatagactttgttgttacacttgttgccacttttttgtggttggtgagcacttcagcctgggctaaagctctgacagatattaaaatagctactggtcacaatattattgatgaacttccgccttgtaagaagaaagcagtactgtgttactttggctctgtgaccagtatgggatccctaaatgtatctgtgatggagtttcgctatgtcgctcagactggagtgcagtggcatgatctcggcacactgcaacctccgcctcctgggttcaagtgattctcctacctcagcctcccaggtagctgggattacagatatttggctttctaaatatgatactctggggaggaaatgcttggtttgtgtacaaggagaccagcctacacagtccatcaaatacatctgcccctcatagccaaggaggtattccacctcctaccggaatataattaaagggagaaatacactgtatgaagtatatgttgatactatgacatgttgccaacaccttgagaagcattatttgtttctaataaaagtaatggctttgtcaatatattggtgggtttaaaactttgctgcttttttacataaagcctgtgcctttcctagaaagttaagatgtaaatgtattctcacatgtaaatttgaaagttcaggggtctattatgaaatgatacacatttttaaatgaaccataatttttttcactaagctgtttgccttccaaagtgtttacaccttaagccttaacatgtatcttcattcagaaaacagttatattgtcataccatagtaggaagaaaaacctttatttggaatatacactactgtaagtttgtacagatcatatacctaccacctgtctttgcttaaagagccttgattacataaatatgtaggaaaaaacatattgagttcaaaatttatatctaacattgtttatgttatgatttttttttaattgcaaagactaggtgtatatttttttctgtttttctaaatgacccgtggtacttaataggtgtactaaaattgtgttgggagcagggatttggaaatttctgagagatgtgtagttaatttagtaattctgtttcatgagatatgatctgttatgctagtggtttaataggcttgctatgtaagtagaacgtggctcaactagatatctttatatgtatgggcattactcttagtgatatttgtttcctgtcctttgttgctcatgctgtttaagtgcaggctgagacccagcctctttgtaagtacagtaaaataatccaccgttttttacagaccctagtcaaagggttaaaaaaattaagattgctttccatgtttgaaatttaccattgagagtcaatgaagttgctattttgagtttagcattgatattgtgaaaataagtgcaatttggatttcatgtttcttaatattcattcttgtttcacaaatgaatgattaaggaattatgcatcataaaggaacctaagtgaggtatatgatgagtgtattgtctttgcacacacatataggtatattctgaatacaagcttattcacattttgcttcctaatctttttgttgtacagggattcaggtttcttattcttacaacatgattgtttatatgtgaagcacatcttgctgttgccttatttttgatgcttttattcatgacaagaattgtcaatataagaatgtatatcttttttgcaaccaatttaataaaggagttgaaagaaa

SEQ ID NO: 315348 - DNA, 2023 bp, Homo sapiens
ggaagtaactttagaggaggatctgactctctctccctcctttcctcagaggatgtccggcttccagatcaacctcaacccgctcaaggagccactcggcttcatcaaggtcctcgagtggattgcttctatctttgcttttgccacctgtggaggttttaagggccaaacagaaattcaagtgaattgtcctcctgcagttactgagaataaaactgttacagctacttttggttatccattcaggttgaatgaggcatcatttcagccacctccaggtgtaaacatatgtgatgtaaattggaaagattacgtcctcataggcgattactcttcttctgcacaattctatgttacctttgcagtctttgtgttcctgtactgcattgctgcccttctgctttatgttggctacacgagtctgtatctggatagtcgtaaacttcctatgatagactttgttgttacacttgttgccacttttttgtggttggtgagcacttcagcctgggctaaagctctgacagatattaagtactgtgttactttggctctgtgaccagtatgggatccctaaatgtatctgtgatatttggctttctaaatatgatactctggggaggaaatgcttggtttgtgtacaaggagaccagcctacacagtccatcaaatacatctgcccctcatagccaaggaggtattccacctcctaccggaatataattaaagggagaaatacactgtatgaagtatatgttgatactatgacatgttgccaacaccttgagaagcattatttgtttctaataaaagtaatggctttgtcaatatattggtgggtttaaaactttgctgcttttttacataaagcctgtgcctttcctagaaagttaagatgtaaatgtattctcacatgtaaatttgaaagttcaggggtctattatgaaatgatacacatttttaaatgaaccataatttttttcactaagctgtttgccttccaaagtgtttacaccttaagccttaacatgtatcttcattcagaaaacagttatattgtcataccatagtaggaagaaaaacctttatttggaatatacactactgtaagtttgtacagatcatatacctaccacctgtctttgcttaaagagccttgattacataaatatgtaggaaaaaacatattgagttcaaaatttatatctaacattgtttatgttatgatttttttttaattgcaaagactaggtgtatatttttttctgtttttctaaatgacccgtggtacttaataggtgtactaaaattgtgttgggagcagggatttggaaatttctgagagatgtgtagttaatttagtaattctgtttcatgagatatgatctgttatgctagtggtttaataggcttgctatgtaagtagaacgtggctcaactagatatctttatatgtatgggcattactcttagtgatatttgtttcctgtcctttgttgctcatgctgtttaagtgcaggctgagacccagcctctttgtaagtacagtaaaataatccaccgttttttacagaccctagtcaaagggttaaaaaaattaagattgctttccatgtttgaaatttaccattgagagtcaatgaagttgctattttgagtttagcattgatattgtgaaaataagtgcaatttggatttcatgtttcttaatattcattcttgtttcacaaatgaatgattaaggaattatgcatcataaaggaacctaagtgaggtatatgatgagtgtattgtctttgcacacacatataggtatattctgaatacaagcttattcacattttgcttcctaatctttttgttgtacagggattcaggtttcttattcttacaacatgattgtttatatgtgaagcacatcttgctgttgccttatttttgatgcttttattcatgacaagaattgtcaatataagaatgtatatcttttttgcaaccaatttaataaaggagttgaaagaaa

SEQ ID NO: 315349 - DNA, 722 bp, Homo sapiens
  misc_feature (688)..(688): n is a, c, g, or t
agcgcgccagccccgcctgcccttcctcgccaccgggctgctctggtctcgtcggtcccctcctccgccccgtcgtcctgactctctctccctcctttcctcagaggatgtccggcttccagatcaacctcaacccgctcaaggagccactcggcttcatcaaggtcctcgagtggattgcttctatctttgcttttgccacctgtggaggttttaagggccaaacagaaattcaagtgaattgtcctcctgcagttactgagaataaaactgttacagctacttttggttatccattcaggttgaatgaggcatcatttcagccacctccaggtgtaaacatatgtgatgtaaattggaaagattacgtcctcataggcgattactcttcttctgcacaattctatgttacctttgcagtctttgtgttcctgtactgcattgctgcccttctgctttatgttggctacacgagtctgtatctggatagtcgtaaacttcctatgatagactttgttgttacacttgttgccacttttttgtggttggtgagcacttcagcctgggctaaagctctgacagatattaaaatagctactggtcacaatattattgatgaacttccgccttgtaagaagaaagccaaatatcacagatacatttagagatcccatactggtcacagagncacaagctaacacagtactgctttctcctcgtcc

SEQ ID NO: 315350 - DNA, 722 bp, Homo sapiens
  misc_feature (24)..(24): n is a, c, g, or t
ccgaaaggaaatggcatggtagcnctagtggatcccccgggctgcaggcttgcccaattttctcaagtgcattgaattccatgctcagcaaatgggacctccccgtcttcaccctccctttcaacatggcgttgtcaatgtacctttcagccacaggacattacaatccattctttccagccaaactggtcatacctataactacagctccaaatatctcctggtctgacctcagtgccctggagttgttgaaatctataccagtgggagttggtcagatctatggctgtgataatccatggacagggggcattttcctgggagccatcctactctcctccccactcatgtgcctgcatgctgccataggatcattgctgggcatagcagcgggactcagtctttcagccccatttgaggacatctactttggactctggggtttcaacagctctctggcctgcattgcaatgggaggaatgttcatggcgctcacctggcaaacccacctcctggctcttggctgtgccctgttcacggcctatcttggagtcggcatggcaaactttatggctgaggttggattgccagcttgtacctggcccttctgtttggccacgctattgttcctcatcatgaccacatacccgatcttgtacctgcacgccacgtgaatggaggacaagcccttagtggaacggcccatttggagaccggtcccc

SEQ ID NO: 315351 - DNA, 210 bp, Homo sapiens
ggggggggcaaaaaaccccaaatttgttttggggttcaacaccccaaacattattgtcgaatttaaatgatattaattttctcaagctatttttgttactattttcctaaaattgaatatttgcagggagcacttatactttttcctaatgtctgtataacaaatttctatgcaagtacatgaataaattatgctcacagctcaaaaaaa

SEQ ID NO: 315352 - DNA, 3935 bp, Homo sapiens
  misc_feature (2781)..(2781): n is a, c, g, or t
  misc_feature (3195)..(3195): n is a, c, g, or t
cctccctccagcaccatctcctgagaagcactctcccttgtcgtggaggtgggcaaatctttatcagccactgccttctgctgccaggaagccagctagagtggtctttaaagaaaactgggcatctcctgctacttaaaatcaaaaactacctaaaataaagattatagagccagaggaagagatagccatggaggacagccccactatggttagagtggacagccccactatggttaggggtgaaaaccaggtttcgccatgtcaagggagaaggtgcttccccaaagctcttggctatgtcaccggtgacatgaaagaacttgccaaccagcttaaagacaaacccgtggtgctccagttcattgactggattctccggggcatatcccaagtggtgttcgtcaacaaccccgtcagtggaatcctgattctggtaggacttcttgttcagaacccctggtgggctctcactggctggctgggaacagtggtctccactctgatggccctcttgctcagccaggacaggtcattaatagcatctgggctctatggctacaatgccaccctggtgggagtactcatggctgtcttttcggacaagggagactatttctggtggctgttactccctgtatgtgctatgtccatgacttgcccaattttctcaagtgcattgaattccatgctcagcaaatgggacctccccgtcttcaccctccctttcaacatggcgttgtcaatgtacctttcagccacaggacattacaatccattctttccagccaaactggtcatacctataactacagctccaaatatctcctggtctgacctcagtgccctggagttgttgaaatctataccagtgggagttggtcagatctatggctgtgataatccatggacagggggcattttcctgggagccatcctactctcctccccactcatgtgcctgcatgctgccataggatcattgctgggcatagcagcgggactcagtctttcagccccatttgaggacatctactttggactctggggtttcaacagctctctggcctgcattgcaatgggaggaatgttcatggcgctcacctggcaaacccacctcctggctcttggctgtgccctgttcacggcctatcttggagtcggcatggcaaactttatggctgaggttggattgccagcttgtacctggcccttctgtttggccacgctattgttcctcatcatgaccacaaaaaattccaacatctacaagatgcccctcagtaaagttacttatcctgaagaaaaccgcatcttctacctgcaagccaagaaaagaatggtggaaagccctttgtgagaacaagccccatttgcagccatggtcacgagtcatttctgcctgactgctccagctaacttccagggtctcagcaaactgctgtttttcacgagtatcaactttcatactgacgcgtctgtaatctgttcttatgctcattttgtattttcctttcaactccaggaatatccttgagcatatgagagtcacatccaggtgatgtgctctggtatggaatttgaaaccccaatggggccttggcactaagactggaatgtatataaagtcaaagtgctccaacagaaggaggaagtgaaaacaaactattagtatttattgatattcttggtgtttagctggctcgatgatgttaacagtattaaaaattaaaccccataaaccaactaagccttatggaattcacagtcacaaaatcgaagttaatccagaattctgtgataagcagcttggctttttttttaaatcaatgcaagttacacattatagccagaatctgtatcacagaggtgcaagctgacagcagagctcagtccccacttcctgcaaacaatggcctgcaccctatcccttgtgtgtgtgacattctctcatgggacaatgttggggtttttcagactgacaggactgcaagagggagaaaggaattttgtcaatcaaaattattctgtattgcaacttttctcagagattgcaaaggattttttaggtagagattatttttccttatgaaaaatgatctgttttaaatgagataaaataggagaagttcctggcttaacctgttcttacatattaaagaaaagttacttactgtatttatgaaatactcagcttaggcatttttactttaacccctaaattgattttgtaaatgccacaaatgcatagaattgttaccaacctccaaagggctctttaaaatcatattttttattcatttgaggatgtcttataaagactgaaggcaaaggtcagattgcttacgggtgttatttttataagttgttgaattccttaatttaaaaaagctcattattttttgcacactcacaatattctctctcagaaatcaatggcatttgaaccaccaaaaagaaataaagggctgagtgtggtggctcacgcctgtaatcccagcactttggggagcccaggcgggcagattgcttgaacccaggagttcaagaccagcctgggcagcatggtgaaaccctgtatctacaaaaaatacaaaaattagccaggcatggtggtgggtgcctgtagttccagctacttgggaggctgaggtgggaaaatgacttgagcccaggaggaggaggctgcagtgagctaagattgcaccactgcactccaacctgggcgacaagagtgaaactgtgtctctcaaaaaaaaaaaaaaacaaacaaaaacaaanacaaaacaaaacaaaacaaaacaaaacaggtaaggattcccctgttttcctctctttaattttaaagttatcagttccgtaaagtctctgtaaccaaacatactgaagacagcaacagaagtcacgttcagggactggctcacacctgtaatcccagcactttgggagatggaggtaaaaggatctcttgagcccaggagttcaagaccagcttgggcaacatagcaagactccatctcttaaaaaataaaaatagtaacattagccaggtgtagcagcacacatctgcagcagctactcaggaggctgaggtggaaagatcgcttgtgcacagaagttcgaggctgcagtgagctatatgatcatgtcactgcactccagcctgtgtgaccgagcaagaccctatctcaaaanaattaattaattaattaattaattaatttaaaaaggaagtcatgttcatttactttccacttcagtgtgtatcgtgtagtattttggaggttggaaagtgaaacgtaggaatcctgaagattttttccacttctagtttgcagtgctcagtgcacaatatacattttgctgaatgaataaacagaaatagggaagtaaacctacaaatattttagggagaagctcacttcttccttttctcaggaaaccaagcaagcaaacatatcgttccaattttaaaacccagtgaccaaagcctttggaactatgaatttgcaactgtcataggtttatggatattgctgtggagaagctcaattttcagtgtttgaactgaaccctttcttgttagggaacgtgtgaaagaagaattgtggggaaaaaaaagcaagcataaccaaagatcatcagcagtgaagaatctaggctgtggctgagagaaccagaggcctctaaaatggacctgagtcgatcttcagaacagggatctaccatgcaggagcttcttgtgctcacacaaatctgtaaatgggaacattgtacattgtcgaatttaaatgatattaattttctcaagctatttttgttactattttcctaaaattgaatatttgcagggagcacttatactttttcctaatgtctgtataacaaatttctatgcaagtacatgaataaattatgctcacagctcaaaaaaa

SEQ ID NO: 315353 - DNA, 3573 bp, Homo sapiens
  misc_feature (2419)..(2419): n is a, c, g, or t
  misc_feature (2833)..(2833): n is a, c, g, or t
cctccctccagcaccatctcctgagaagcactctcccttgtcgtggaggtgggcaaatctttatcagccactgccttctgctgccaggaagccagctagagtggtctttaaagaaaactgggcatctcctgctacttaaaatcaaaaactacctaaaataaagattatagtcattaatagcatctgggctctatggctacaatgccaccctggtgggagtactcatggctgtcttttcggacaagggagactatttctggtggctgttactccctgtatgtgctatgtccatgacttgcccaattttctcaagtgcattgaattccatgctcagcaaatgggacctccccgtcttcaccctccctttcaacatggcgttgtcaatgtacctttcagccacaggacattacaatccattctttccagccaaactggtcatacctataactacagctccaaatatctcctggtctgacctcagtgccctggagttgttgaaatctataccagtgggagttggtcagatctatggctgtgataatccatggacagggggcattttcctgggagccatcctactctcctccccactcatgtgcctgcatgctgccataggatcattgctgggcatagcagcgggactcagtctttcagccccatttgaggacatctactttggactctggggtttcaacagctctctggcctgcattgcaatgggaggaatgttcatggcgctcacctggcaaacccacctcctggctcttggctgtgccctgttcacggcctatcttggagtcggcatggcaaactttatggctgaggttggattgccagcttgtacctggcccttctgtttggccacgctattgttcctcatcatgaccacaaaaaattccaacatctacaagatgcccctcagtaaagttacttatcctgaagaaaaccgcatcttctacctgcaagccaagaaaagaatggtggaaagccctttgtgagaacaagccccatttgcagccatggtcacgagtcatttctgcctgactgctccagctaacttccagggtctcagcaaactgctgtttttcacgagtatcaactttcatactgacgcgtctgtaatctgttcttatgctcattttgtattttcctttcaactccaggaatatccttgagcatatgagagtcacatccaggtgatgtgctctggtatggaatttgaaaccccaatggggccttggcactaagactggaatgtatataaagtcaaagtgctccaacagaaggaggaagtgaaaacaaactattagtatttattgatattcttggtgtttagctggctcgatgatgttaacagtattaaaaattaaaccccataaaccaactaagccttatggaattcacagtcacaaaatcgaagttaatccagaattctgtgataagcagcttggctttttttttaaatcaatgcaagttacacattatagccagaatctgtatcacagaggtgcaagctgacagcagagctcagtccccacttcctgcaaacaatggcctgcaccctatcccttgtgtgtgtgacattctctcatgggacaatgttggggtttttcagactgacaggactgcaagagggagaaaggaattttgtcaatcaaaattattctgtattgcaacttttctcagagattgcaaaggattttttaggtagagattatttttccttatgaaaaatgatctgttttaaatgagataaaataggagaagttcctggcttaacctgttcttacatattaaagaaaagttacttactgtatttatgaaatactcagcttaggcatttttactttaacccctaaattgattttgtaaatgccacaaatgcatagaattgttaccaacctccaaagggctctttaaaatcatattttttattcatttgaggatgtcttataaagactgaaggcaaaggtcagattgcttacgggtgttatttttataagttgttgaattccttaatttaaaaaagctcattattttttgcacactcacaatattctctctcagaaatcaatggcatttgaaccaccaaaaagaaataaagggctgagtgtggtggctcacgcctgtaatcccagcactttggggagcccaggcgggcagattgcttgaacccaggagttcaagaccagcctgggcagcatggtgaaaccctgtatctacaaaaaatacaaaaattagccaggcatggtggtgggtgcctgtagttccagctacttgggaggctgaggtgggaaaatgacttgagcccaggaggaggaggctgcagtgagctaagattgcaccactgcactccaacctgggcgacaagagtgaaactgtgtctctcaaaaaaaaaaaaaaacaaacaaaaacaaanacaaaacaaaacaaaacaaaacaaaacaggtaaggattcccctgttttcctctctttaattttaaagttatcagttccgtaaagtctctgtaaccaaacatactgaagacagcaacagaagtcacgttcagggactggctcacacctgtaatcccagcactttgggagatggaggtaaaaggatctcttgagcccaggagttcaagaccagcttgggcaacatagcaagactccatctcttaaaaaataaaaatagtaacattagccaggtgtagcagcacacatctgcagcagctactcaggaggctgaggtggaaagatcgcttgtgcacagaagttcgaggctgcagtgagctatatgatcatgtcactgcactccagcctgtgtgaccgagcaagaccctatctcaaaanaattaattaattaattaattaattaatttaaaaaggaagtcatgttcatttactttccacttcagtgtgtatcgtgtagtattttggaggttggaaagtgaaacgtaggaatcctgaagattttttccacttctagtttgcagtgctcagtgcacaatatacattttgctgaatgaataaacagaaatagggaagtaaacctacaaatattttagggagaagctcacttcttccttttctcaggaaaccaagcaagcaaacatatcgttccaattttaaaacccagtgaccaaagcctttggaactatgaatttgcaactgtcataggtttatggatattgctgtggagaagctcaattttcagtgtttgaactgaaccctttcttgttagggaacgtgtgaaagaagaattgtggggaaaaaaaagcaagcataaccaaagatcatcagcagtgaagaatctaggctgtggctgagagaaccagaggcctctaaaatggacctgagtcgatcttcagaacagggatctaccatgcaggagcttcttgtgctcacacaaatctgtaaatgggaacattgtacattgtcgaatttaaatgatattaattttctcaagctatttttgttactattttcctaaaattgaatatttgcagggagcacttatactttttcctaatgtctgtataacaaatttctatgcaagtacatgaataaattatgctcacagctcaaaaaaa

SEQ ID NO: 315354 - DNA, 3327 bp, Homo sapiens
  misc_feature (24)..(24): n is a, c, g, or t
  misc_feature (2173)..(2173): n is a, c, g, or t
  misc_feature (2587)..(2587): n is a, c, g, or t
ccgaaaggaaatggcatggtagcnctagtggatcccccgggctgcaggcttgcccaattttctcaagtgcattgaattccatgctcagcaaatgggacctccccgtcttcaccctccctttcaacatggcgttgtcaatgtacctttcagccacaggacattacaatccattctttccagccaaactggtcatacctataactacagctccaaatatctcctggtctgacctcagtgccctggagttgttgaaatctataccagtgggagttggtcagatctatggctgtgataatccatggacagggggcattttcctgggagccatcctactctcctccccactcatgtgcctgcatgctgccataggatcattgctgggcatagcagcgggactcagtctttcagccccatttgaggacatctactttggactctggggtttcaacagctctctggcctgcattgcaatgggaggaatgttcatggcgctcacctggcaaacccacctcctggctcttggctgtgccctgttcacggcctatcttggagtcggcatggcaaactttatggctgaggttggattgccagcttgtacctggcccttctgtttggccacgctattgttcctcatcatgaccacaaaaaattccaacatctacaagatgcccctcagtaaagttacttatcctgaagaaaaccgcatcttctacctgcaagccaagaaaagaatggtggaaagccctttgtgagaacaagccccatttgcagccatggtcacgagtcatttctgcctgactgctccagctaacttccagggtctcagcaaactgctgtttttcacgagtatcaactttcatactgacgcgtctgtaatctgttcttatgctcattttgtattttcctttcaactccaggaatatccttgagcatatgagagtcacatccaggtgatgtgctctggtatggaatttgaaaccccaatggggccttggcactaagactggaatgtatataaagtcaaagtgctccaacagaaggaggaagtgaaaacaaactattagtatttattgatattcttggtgtttagctggctcgatgatgttaacagtattaaaaattaaaccccataaaccaactaagccttatggaattcacagtcacaaaatcgaagttaatccagaattctgtgataagcagcttggctttttttttaaatcaatgcaagttacacattatagccagaatctgtatcacagaggtgcaagctgacagcagagctcagtccccacttcctgcaaacaatggcctgcaccctatcccttgtgtgtgtgacattctctcatgggacaatgttggggtttttcagactgacaggactgcaagagggagaaaggaattttgtcaatcaaaattattctgtattgcaacttttctcagagattgcaaaggattttttaggtagagattatttttccttatgaaaaatgatctgttttaaatgagataaaataggagaagttcctggcttaacctgttcttacatattaaagaaaagttacttactgtatttatgaaatactcagcttaggcatttttactttaacccctaaattgattttgtaaatgccacaaatgcatagaattgttaccaacctccaaagggctctttaaaatcatattttttattcatttgaggatgtcttataaagactgaaggcaaaggtcagattgcttacgggtgttatttttataagttgttgaattccttaatttaaaaaagctcattattttttgcacactcacaatattctctctcagaaatcaatggcatttgaaccaccaaaaagaaataaagggctgagtgtggtggctcacgcctgtaatcccagcactttggggagcccaggcgggcagattgcttgaacccaggagttcaagaccagcctgggcagcatggtgaaaccctgtatctacaaaaaatacaaaaattagccaggcatggtggtgggtgcctgtagttccagctacttgggaggctgaggtgggaaaatgacttgagcccaggaggaggaggctgcagtgagctaagattgcaccactgcactccaacctgggcgacaagagtgaaactgtgtctctcaaaaaaaaaaaaaaacaaacaaaaacaaanacaaaacaaaacaaaacaaaacaaaacaggtaaggattcccctgttttcctctctttaattttaaagttatcagttccgtaaagtctctgtaaccaaacatactgaagacagcaacagaagtcacgttcagggactggctcacacctgtaatcccagcactttgggagatggaggtaaaaggatctcttgagcccaggagttcaagaccagcttgggcaacatagcaagactccatctcttaaaaaataaaaatagtaacattagccaggtgtagcagcacacatctgcagcagctactcaggaggctgaggtggaaagatcgcttgtgcacagaagttcgaggctgcagtgagctatatgatcatgtcactgcactccagcctgtgtgaccgagcaagaccctatctcaaaanaattaattaattaattaattaattaatttaaaaaggaagtcatgttcatttactttccacttcagtgtgtatcgtgtagtattttggaggttggaaagtgaaacgtaggaatcctgaagattttttccacttctagtttgcagtgctcagtgcacaatatacattttgctgaatgaataaacagaaatagggaagtaaacctacaaatattttagggagaagctcacttcttccttttctcaggaaaccaagcaagcaaacatatcgttccaattttaaaacccagtgaccaaagcctttggaactatgaatttgcaactgtcataggtttatggatattgctgtggagaagctcaattttcagtgtttgaactgaaccctttcttgttagggaacgtgtgaaagaagaattgtggggaaaaaaaagcaagcataaccaaagatcatcagcagtgaagaatctaggctgtggctgagagaaccagaggcctctaaaatggacctgagtcgatcttcagaacagggatctaccatgcaggagcttcttgtgctcacacaaatctgtaaatgggaacattgtacattgtcgaatttaaatgatattaattttctcaagctatttttgttactattttcctaaaattgaatatttgcagggagcacttatactttttcctaatgtctgtataacaaatttctatgcaagtacatgaataaattatgctcacagctcaaaaaaa

SEQ ID NO: 315355 - DNA, 1492 bp, Homo sapiens
cctccctccagcaccatctcctgagaagcactctcccttgtcgtggaggtgggcaaatctttatcagccactgccttctgctgccaggaagccagctagagtggtctttaaagaaaactgggcatctcctgctacttaaaatcaaaaactacctaaaataaagattataaaaaagtaaggatgaatggacggtctttgattggcggcgctggtgacgcccgtcatggtcctgtttggaaggacccttttggaactaaagctggtgacgcagcgcgcagaggcatcgcccggctaagcttggccctggcagatgggtcgcaggaacaggagccagaggaagagatagccatggaggacagccccactatggttagagtggacagccccactatggttaggggtgaaaaccaggtttcgccatgtcaagggagaaggtgcttccccaaagctcttggctatgtcaccggtgacatgaaagaacttgccaaccagcttaaagacaaacccgtggtgctccagttcattgactggattctccggggcatatcccaagtggtgttcgtcaacaaccccgtcagtggaatcctgattctggtaggacttcttgttcagaacccctggtgggctctcactggctggctgggaacagtggtctccactctgatggccctcttgctcagccaggacaggtcattaatagcatctgggctctatggctacaatgccaccctggtgggagtactcatggctgtcttttcggacaagggagactatttctggtggctgttactccctgtatgtgctatgtccatgacttgcccaattttctcaagtgcattgaattccatgctcagcaaatgggacctccccgtcttcaccctccctttcaacatggcgttgtcaatgtacctttcagccacaggacattacaatccattctttccagccaaactggtcatacctataactacagctccaaatatctcctggtctgacctcagtgccctggagttgttgaaatctataccagtgggagttggtcagatctatggctgtgataatccatggacagggggcattttcctgggagccatcctactctcctccccactcatgtgcctgcatgctgccataggatcattgctgggcatagcagcgggactcagtctttcagccccatttgaggacatctactttggactctggggtttcaacagctctctggcctgcattgcaatgggaggaatgttcatggcgctcacctggcaaacccacctcctggctcttggctgtggtgagtctcccacgcccctgggggagggctgctcatgactacaggatctcaatcaaggataagcagtaaaaacggactgcatgaaaaatcagggccagggttctggcttgagcccacttgctgtctaagtgtgtgaacaggacaagtgacgtcccctctctgagagcattaaaatcacctctgcctacctctctgatg

SEQ ID NO: 315356 - DNA, 4093 bp, Homo sapiens
  misc_feature (2939)..(2939): n is a, c, g, or t
  misc_feature (3353)..(3353): n is a, c, g, or t
cctccctccagcaccatctcctgagaagcactctcccttgtcgtggaggtgggcaaatctttatcagccactgccttctgctgccaggaagccagctagagtggtctttaaagaaaactgggcatctcctgctacttaaaatcaaaaactacctaaaataaagattataaaaaagtaaggatgaatggacggtctttgattggcggcgctggtgacgcccgtcatggtcctgtttggaaggacccttttggaactaaagctggtgacgcagcgcgcagaggcatcgcccggctaagcttggccctggcagatgggtcgcaggaacaggagccagaggaagagatagccatggaggacagccccactatggttagagtggacagccccactatggttaggggtgaaaaccaggtttcgccatgtcaagggagaaggtgcttccccaaagctcttggctatgtcaccggtgacatgaaagaacttgccaaccagcttaaagacaaacccgtggtgctccagttcattgactggattctccggggcatatcccaagtggtgttcgtcaacaaccccgtcagtggaatcctgattctggtaggacttcttgttcagaacccctggtgggctctcactggctggctgggaacagtggtctccactctgatggccctcttgctcagccaggacaggtcattaatagcatctgggctctatggctacaatgccaccctggtgggagtactcatggctgtcttttcggacaagggagactatttctggtggctgttactccctgtatgtgctatgtccatgacttgcccaattttctcaagtgcattgaattccatgctcagcaaatgggacctccccgtcttcaccctccctttcaacatggcgttgtcaatgtacctttcagccacaggacattacaatccattctttccagccaaactggtcatacctataactacagctccaaatatctcctggtctgacctcagtgccctggagttgttgaaatctataccagtgggagttggtcagatctatggctgtgataatccatggacagggggcattttcctgggagccatcctactctcctccccactcatgtgcctgcatgctgccataggatcattgctgggcatagcagcgggactcagtctttcagccccatttgaggacatctactttggactctggggtttcaacagctctctggcctgcattgcaatgggaggaatgttcatggcgctcacctggcaaacccacctcctggctcttggctgtgccctgttcacggcctatcttggagtcggcatggcaaactttatggctgaggttggattgccagcttgtacctggcccttctgtttggccacgctattgttcctcatcatgaccacaaaaaattccaacatctacaagatgcccctcagtaaagttacttatcctgaagaaaaccgcatcttctacctgcaagccaagaaaagaatggtggaaagccctttgtgagaacaagccccatttgcagccatggtcacgagtcatttctgcctgactgctccagctaacttccagggtctcagcaaactgctgtttttcacgagtatcaactttcatactgacgcgtctgtaatctgttcttatgctcattttgtattttcctttcaactccaggaatatccttgagcatatgagagtcacatccaggtgatgtgctctggtatggaatttgaaaccccaatggggccttggcactaagactggaatgtatataaagtcaaagtgctccaacagaaggaggaagtgaaaacaaactattagtatttattgatattcttggtgtttagctggctcgatgatgttaacagtattaaaaattaaaccccataaaccaactaagccttatggaattcacagtcacaaaatcgaagttaatccagaattctgtgataagcagcttggctttttttttaaatcaatgcaagttacacattatagccagaatctgtatcacagaggtgcaagctgacagcagagctcagtccccacttcctgcaaacaatggcctgcaccctatcccttgtgtgtgtgacattctctcatgggacaatgttggggtttttcagactgacaggactgcaagagggagaaaggaattttgtcaatcaaaattattctgtattgcaacttttctcagagattgcaaaggattttttaggtagagattatttttccttatgaaaaatgatctgttttaaatgagataaaataggagaagttcctggcttaacctgttcttacatattaaagaaaagttacttactgtatttatgaaatactcagcttaggcatttttactttaacccctaaattgattttgtaaatgccacaaatgcatagaattgttaccaacctccaaagggctctttaaaatcatattttttattcatttgaggatgtcttataaagactgaaggcaaaggtcagattgcttacgggtgttatttttataagttgttgaattccttaatttaaaaaagctcattattttttgcacactcacaatattctctctcagaaatcaatggcatttgaaccaccaaaaagaaataaagggctgagtgtggtggctcacgcctgtaatcccagcactttggggagcccaggcgggcagattgcttgaacccaggagttcaagaccagcctgggcagcatggtgaaaccctgtatctacaaaaaatacaaaaattagccaggcatggtggtgggtgcctgtagttccagctacttgggaggctgaggtgggaaaatgacttgagcccaggaggaggaggctgcagtgagctaagattgcaccactgcactccaacctgggcgacaagagtgaaactgtgtctctcaaaaaaaaaaaaaaacaaacaaaaacaaanacaaaacaaaacaaaacaaaacaaaacaggtaaggattcccctgttttcctctctttaattttaaagttatcagttccgtaaagtctctgtaaccaaacatactgaagacagcaacagaagtcacgttcagggactggctcacacctgtaatcccagcactttgggagatggaggtaaaaggatctcttgagcccaggagttcaagaccagcttgggcaacatagcaagactccatctcttaaaaaataaaaatagtaacattagccaggtgtagcagcacacatctgcagcagctactcaggaggctgaggtggaaagatcgcttgtgcacagaagttcgaggctgcagtgagctatatgatcatgtcactgcactccagcctgtgtgaccgagcaagaccctatctcaaaanaattaattaattaattaattaattaatttaaaaaggaagtcatgttcatttactttccacttcagtgtgtatcgtgtagtattttggaggttggaaagtgaaacgtaggaatcctgaagattttttccacttctagtttgcagtgctcagtgcacaatatacattttgctgaatgaataaacagaaatagggaagtaaacctacaaatattttagggagaagctcacttcttccttttctcaggaaaccaagcaagcaaacatatcgttccaattttaaaacccagtgaccaaagcctttggaactatgaatttgcaactgtcataggtttatggatattgctgtggagaagctcaattttcagtgtttgaactgaaccctttcttgttagggaacgtgtgaaagaagaattgtggggaaaaaaaagcaagcataaccaaagatcatcagcagtgaagaatctaggctgtggctgagagaaccagaggcctctaaaatggacctgagtcgatcttcagaacagggatctaccatgcaggagcttcttgtgctcacacaaatctgtaaatgggaacattgtacattgtcgaatttaaatgatattaattttctcaagctatttttgttactattttcctaaaattgaatatttgcagggagcacttatactttttcctaatgtctgtataacaaatttctatgcaagtacatgaataaattatgctcacagctcaaaaaaa

SEQ ID NO: 315357 - DNA, 1693 bp, Homo sapiens
cctccctccagcaccatctcctgagaagcactctcccttgtcgtggaggtgggcaaatctttatcagccactgccttctgctgccaggaagccagctagagtggtctttaaagaaaactgggcatctcctgctacttaaaatcaaaaactacctaaaataaagattataaaaaagtaaggatgaatggacggtctttgattggcggcgctggtgacgcccgtcatggtcctgtttggaaggacccttttggaactaaagctggtgacgcagcgcgcagaggcatcgcccggctaagcttggccctggcagatgggtcgcaggaacaggagccagaggaagagatagccatggaggacagccccactatggttagagtggacagccccactatggttaggggtgaaaaccaggtttcgccatgtcaagggagaaggtgcttccccaaagctcttggctatgtcaccggtgacatgaaagaacttgccaaccagcttaaagacaaacccgtggtgctccagttcattgactggattctccggggcatatcccaagtggtgttcgtcaacaaccccgtcagtggaatcctgattctggtaggacttcttgttcagaacccctggtgggctctcactggctggctgggaacagtggtctccactctgatggccctcttgctcagccaggacaggtcattaatagcatctgggctctatggctacaatgccaccctggtgggagtactcatggctgtcttttcggacaagggagactatttctggtggctgttactccctgtatgtgctatgtccatgacttgcccaattttctcaagtgcattgaattccatgctcagcaaatgggacctccccgtcttcaccctccctttcaacatggcgttgtcaatgtacctttcagccacaggacattacaatccattctttccagccaaactggtcatacctataactacagctccaaatatctcctggtctgacctcagtgccctggagttgttgaaatctataccagtgggagttggtcagatctatggctgtgataatccatggacagggggcattttcctgggagccatcctactctcctccccactcatgtgcctgcatgctgccataggatcattgctgggcatagcagcgggactcagtctttcagccccatttgaggacatctactttggactctggggtttcaacagctctctggcctgcattgcaatgggaggaatgttcatggcgctcacctggcaaacccacctcctggctcttggctgtgccctgttcacggcctatcttggagtcggcatggcaaactttatggctgagggaacgtgtgaaagaagaattgtggggaaaaaaaagcaagcataaccaaagatcatcagcagtgaagaatctaggctgtggctgagagaaccagaggcctctaaaatggacctgagtcgatcttcagaacagggatctaccatgcaggagcttcttgtgctcacacaaatctgtaaatgggaacattgtacattgtcgaatttaaatgatattaattttctcaagctatttttgttactattttcctaaaattgaatatttgcagggagcacttatactttttcctaatgtctgtataacaaatttctatgcaagtacatgaataaattatgctcacagctcaaaaaaa

SEQ ID NO: 315358 - DNA, 482 bp, Homo sapiens
tgctgggattacaggcgtgagccaccgcgcccggccatagatagcattttcaatgattatcaacctgtcactgttaaatgaatatttaaaactccctaaagaaatctaaatcaagatgtgtgggaacaattacaggatcacagaacccattgaatttttagagatggaagtattttagagacaatcctagttcctagttccttattttacacagaatctgaagctgaagtttcttgtccccaagttacccagatgactagtagcttaaatcctaggtgtccaaagttttcattgggtactcagtcccccacacaatccagatagcagtgagggagaatgagtggctttagaagcatcataatgtgcatccacactgccaactcatacagagagaaaacgtgacacatctcttcacagaacacttggtacttcaaatgactttcctatacattatctcctttagtctgtagagggttcactat

SEQ ID NO: 315359 - DNA, 2688 bp, Homo sapiens
agcgggtctggcccctcccctccgcccgtcaccgcctccttgaagctgccgctgtcgctgctgctcgttcgagtcgcagatccttgccagcacattacagaatatttttgttgaaccttcttgagaattcagagaaactgctgagtgaccactgaacgaaaagatctaatcttaaggcttacgcgtgttccatccaccacatcagaacaatgtcgtatgtttttgtaaatgattcttctcagactaacgtgcccttgctgcaagcctgtattgatggggactttaattattccaagcggcttttggaaagtggctttgacccaaatattcgtgacagcaggggcagaacaggccttcaccttgcagcagctcgagggaatgtagacatctgccagttactgcataaattcggtgccgatcttctggccacagattatcaaggaaacacagctcttcacctctgtggccatgtggatactatccaatttttggtttccaatggactcaaaattgatatttgcaatcatcaaggtgctacccctttagttctggcaaagcgcagaggagtaaataaagatgtcatccgattgctggaatctttggaagaacaggaggtgaaaggatttaacagaggaacccactcgaaactggagaccatgcaaacagctgagagtgaaagtgccatggaaagccattcactcctcaatcccaacctgcagcaaggtgaaggagtcctctccagcttccgaaccacgtggcaggagtttgtggaggatctgggcttctggagagtattgctgttgatcttcgtcattgctttgctgtctcttggcattgcttattatgtgagtggggtgctacccttcgtggaaaaccagcctgaactggtgcattaaaggagctcatggaagatgaggcaattaattgcctgtttcctggcttccaatgtttgttctcagtttctcagaatttttcttagcgcaaagcagtgagggcagtacatgttctttttgcatttttaattattgtaatccttttagataatgatgtgttcatttgaactaactacatactatgatcaagtatattgcatcctaacgctacctctgactcaacctgactttgtaggaaagcctacacgtagccttgtttgataaaaacacggaagtgactagagaatggaagataaaggaagaagctaggaagtccttgctatcaaaaccttatcctaatataggaccaattgaagtattcaaaaagaaaaacagtatcttatatgattagtttttgttggtggttttgttttcatttatttttgcaagagccactttttatttactttctctagggataagagataaaacttgaagtacttttttcaaatcttgtgtgcaaattagtattgttagcatctatttggcttattttagtatttttaagtctagtcacaaaccaaacaaaacttttgaaaatgagctatattttgttcaaagataattgatttgatcttatatttatttgtttttaggataatttttgatctttttgtaaactgctttgcttgttaatatctgtgaaaaataaatgagttcattttgttcactttccaattttcccgagtatcctagtcatcaaagataacagttcatcagaattacagtcagaaaatcctttttctactgaatagttagcagggaaaaataattctgatatttaactgtcataattctgtagtgctattatagtgaaaaactcagttctataagctagctgtgttgtcacagttttatcatagttcataattatttcatgtgcaatcctatttggaggccctgttagacttttaacaatcccatccatatctgtaattctctgatggcaagaatggatggagcatttctgagttaacagtgctggacagtatcgtactgggtgtcataaactctttatgaatggtaatattatgtaaattgaaatctggccctcaaactatattgcagctttcagcagtatgtttgaaggcctcttttgttaatgattctgtaatgtatgaattatgttcttgagtggttaaaaaagaatatgaaggcttgataattatttattgggtaaagtcaggaaattgtagtgaaagaactaatggttttgttttttggaataaaggcacctaagctattgctaattgaattgctgctagaattagaaattatgctttagaatagaattggtatttctgtgattctttttgcttcttggtattttctcttgtatctatgtatctagtattgaggcttgctctttcatgtggctttatcctctctttaatagctgttgtaaaattcctgagtaactggctgcttcaggatcagcttgcagagtcttgcttttaggttagatacaaacaaagtaaatcatagttggtgtaaatccagcaaaaaacagctggctttggaatggagaacactacaattcaaatttgaagtatattcagaagaaaactttggaattagctttacatttgtttgtaaatctaaacaaatatgcaaaattggtcaaaatgtaagtatatagcatttttaaagattaatggttccttttatgtgctgatttctttgtattctgttctctgcattcatcattcaggaataccaccaataaatgtatttatatatcccttaatcacgattt

SEQ ID NO: 315360 - DNA, 3467 bp, Homo sapiens
  misc_feature (146)..(146): n is a, c, g, or t
agcgggtctggcccctcccctccgcccgtcaccgcctccttgaagctgccgctgtcgctgctgctcgttcgagtcgcaggtacttggcccggggcctgtgggcagcgcctgggctagagccacttgatatctcctgcaccgtccantgtagcactggaggtccagtaggcctggccggggccctgaggggcgagggtgcccgggcttcccacaccttccgcggcgactggagggagccgggccgaggaagcgaccgcgggtccgtgatggcttcttcgcggtctgtgtgttcacgagggccgggcagaggcctgcgagggttctcgtttgcgcttgcgggttagggctgtggtccggggaacccctgggcagcgcgggcagccctggctcgcggttaatcggggggtggagcgcggaagccacgccgcaggtccagctgctcggccggggcgagacggtgctttcgcggcgtgtgcttgcaggagcgcacagttcaggcgccgggacaagctgttggggtgtgagtgagctctccagaatggcacatggctccggggtgcccgggttaaaaggaaggatttgcacaccttccacttagggctcgggtaatcgcaaacttcctcccttaattggcttgcagtgctaaaaagcagatcgttctctctgaggttttcccaacagtacctcaagaaaataacatctgttttttgtaacgttccacggtattcggaattggctacagaacataataagatccttgccagcacattacagaatatttttgttgaaccttcttgagaattcagagaaactgctgagtgaccactgaacgaaaagatctaatcttaaggcttacgcctcactttgatgcccaggctggagtgctgtggctcaatcacagctcatcgcaacctcgacctcccgggctcaagtgatcctctcacctcagcgtcccgaacaggcgtgttccatccaccacatcagaacaatgtcgtatgtttttgtaaatgattcttctcagactaacgtgcccttgctgcaagcctgtattgatggggactttaattattccaagcggcttttggaaagtggctttgacccaaatattcgtgacagcaggggcagaacaggccttcaccttgcagcagctcgagggaatgtagacatctgccagttactgcataaattcggtgccgatcttctggccacagattatcaaggaaacacagctcttcacctctgtggccatgtggatactatccaatttttggtttccaatggactcaaaattgatatttgcaatcatcaaggtgctacccctttagttctggcaaagcgcagaggagtaaataaagatgtcatccgattgctggaatctttggaagaacaggaggtgaaaggatttaacagaggaacccactcgaaactggagaccatgcaaacagctgagagtgaaagtgccatggaaagccattcactcctcaatcccaacctgcagcaaggtgaaggagtcctctccagcttccgaaccacgtggcaggagtttgtggaggatctgggcttctggagagtattgctgttgatcttcgtcattgctttgctgtctcttggcattgcttattatgtgagtggggtgctacccttcgtggaaaaccagcctgaactggtgcattaaaggagctcatggaagatgaggcaattaattgcctgtttcctggcttccaatgtttgttctcagtttctcagaatttttcttagcgcaaagcagtgagggcagtacatgttctttttgcatttttaattattgtaatccttttagataatgatgtgttcatttgaactaactacatactatgatcaagtatattgcatcctaacgctacctctgactcaacctgactttgtaggaaagcctacacgtagccttgtttgataaaaacacggaagtgactagagaatggaagataaaggaagaagctaggaagtccttgctatcaaaaccttatcctaatataggaccaattgaagtattcaaaaagaaaaacagtatcttatatgattagtttttgttggtggttttgttttcatttatttttgcaagagccactttttatttactttctctagggataagagataaaacttgaagtacttttttcaaatcttgtgtgcaaattagtattgttagcatctatttggcttattttagtatttttaagtctagtcacaaaccaaacaaaacttttgaaaatgagctatattttgttcaaagataattgatttgatcttatatttatttgtttttaggataatttttgatctttttgtaaactgctttgcttgttaatatctgtgaaaaataaatgagttcattttgttcactttccaattttcccgagtatcctagtcatcaaagataacagttcatcagaattacagtcagaaaatcctttttctactgaatagttagcagggaaaaataattctgatatttaactgtcataattctgtagtgctattatagtgaaaaactcagttctataagctagctgtgttgtcacagttttatcatagttcataattatttcatgtgcaatcctatttggaggccctgttagacttttaacaatcccatccatatctgtaattctctgatggcaagaatggatggagcatttctgagttaacagtgctggacagtatcgtactgggtgtcataaactctttatgaatggtaatattatgtaaattgaaatctggccctcaaactatattgcagctttcagcagtatgtttgaaggcctcttttgttaatgattctgtaatgtatgaattatgttcttgagtggttaaaaaagaatatgaaggcttgataattatttattgggtaaagtcaggaaattgtagtgaaagaactaatggttttgttttttggaataaaggcacctaagctattgctaattgaattgctgctagaattagaaattatgctttagaatagaattggtatttctgtgattctttttgcttcttggtattttctcttgtatctatgtatctagtattgaggcttgctctttcatgtggctttatcctctctttaatagctgttgtaaaattcctgagtaactggctgcttcaggatcagcttgcagagtcttgcttttaggttagatacaaacaaagtaaatcatagttggtgtaaatccagcaaaaaacagctggctttggaatggagaacactacaattcaaatttgaagtatattcagaagaaaactttggaattagctttacatttgtttgtaaatctaaacaaatatgcaaaattggtcaaaatgtaagtatatagcatttttaaagattaatggttccttttatgtgctgatttctttgtattctgttctctgcattcatcattcaggaataccaccaataaatgtatttatatatcccttaatcacgattt

SEQ ID NO: 315361 - DNA, 2793 bp, Homo sapiens
agcgggtctggcccctcccctccgcccgtcaccgcctccttgaagctgccgctgtcgctgctgctcgttcgagtcgcagatccttgccagcacattacagaatatttttgttgaaccttcttgagaattcagagaaactgctgagtgaccactgaacgaaaagatctaatcttaaggcttacgcctcactttgatgcccaggctggagtgctgtggctcaatcacagctcatcgcaacctcgacctcccgggctcaagtgatcctctcacctcagcgtcccgaacaggcgtgttccatccaccacatcagaacaatgtcgtatgtttttgtaaatgattcttctcagactaacgtgcccttgctgcaagcctgtattgatggggactttaattattccaagcggcttttggaaagtggctttgacccaaatattcgtgacagcaggggcagaacaggccttcaccttgcagcagctcgagggaatgtagacatctgccagttactgcataaattcggtgccgatcttctggccacagattatcaaggaaacacagctcttcacctctgtggccatgtggatactatccaatttttggtttccaatggactcaaaattgatatttgcaatcatcaaggtgctacccctttagttctggcaaagcgcagaggagtaaataaagatgtcatccgattgctggaatctttggaagaacaggaggtgaaaggatttaacagaggaacccactcgaaactggagaccatgcaaacagctgagagtgaaagtgccatggaaagccattcactcctcaatcccaacctgcagcaaggtgaaggagtcctctccagcttccgaaccacgtggcaggagtttgtggaggatctgggcttctggagagtattgctgttgatcttcgtcattgctttgctgtctcttggcattgcttattatgtgagtggggtgctacccttcgtggaaaaccagcctgaactggtgcattaaaggagctcatggaagatgaggcaattaattgcctgtttcctggcttccaatgtttgttctcagtttctcagaatttttcttagcgcaaagcagtgagggcagtacatgttctttttgcatttttaattattgtaatccttttagataatgatgtgttcatttgaactaactacatactatgatcaagtatattgcatcctaacgctacctctgactcaacctgactttgtaggaaagcctacacgtagccttgtttgataaaaacacggaagtgactagagaatggaagataaaggaagaagctaggaagtccttgctatcaaaaccttatcctaatataggaccaattgaagtattcaaaaagaaaaacagtatcttatatgattagtttttgttggtggttttgttttcatttatttttgcaagagccactttttatttactttctctagggataagagataaaacttgaagtacttttttcaaatcttgtgtgcaaattagtattgttagcatctatttggcttattttagtatttttaagtctagtcacaaaccaaacaaaacttttgaaaatgagctatattttgttcaaagataattgatttgatcttatatttatttgtttttaggataatttttgatctttttgtaaactgctttgcttgttaatatctgtgaaaaataaatgagttcattttgttcactttccaattttcccgagtatcctagtcatcaaagataacagttcatcagaattacagtcagaaaatcctttttctactgaatagttagcagggaaaaataattctgatatttaactgtcataattctgtagtgctattatagtgaaaaactcagttctataagctagctgtgttgtcacagttttatcatagttcataattatttcatgtgcaatcctatttggaggccctgttagacttttaacaatcccatccatatctgtaattctctgatggcaagaatggatggagcatttctgagttaacagtgctggacagtatcgtactgggtgtcataaactctttatgaatggtaatattatgtaaattgaaatctggccctcaaactatattgcagctttcagcagtatgtttgaaggcctcttttgttaatgattctgtaatgtatgaattatgttcttgagtggttaaaaaagaatatgaaggcttgataattatttattgggtaaagtcaggaaattgtagtgaaagaactaatggttttgttttttggaataaaggcacctaagctattgctaattgaattgctgctagaattagaaattatgctttagaatagaattggtatttctgtgattctttttgcttcttggtattttctcttgtatctatgtatctagtattgaggcttgctctttcatgtggctttatcctctctttaatagctgttgtaaaattcctgagtaactggctgcttcaggatcagcttgcagagtcttgcttttaggttagatacaaacaaagtaaatcatagttggtgtaaatccagcaaaaaacagctggctttggaatggagaacactacaattcaaatttgaagtatattcagaagaaaactttggaattagctttacatttgtttgtaaatctaaacaaatatgcaaaattggtcaaaatgtaagtatatagcatttttaaagattaatggttccttttatgtgctgatttctttgtattctgttctctgcattcatcattcaggaataccaccaataaatgtatttatatatcccttaatcacgattt

SEQ ID NO: 315362 - DNA, 2033 bp, Homo sapiens
agaggactccctcaatgtggctgacttgacttccctccgggccccactggacatccccatcccagaccctccacccaaggatgatgagatggaaacagataagcaggagtttgtggaggatctgggcttctggagagtattgctgttgatcttcgtcattgctttgctgtctcttggcattgcttattatgtgagtggggtgctacccttcgtggaaaaccagcctgaactggtgcattaaaggagctcatggaagatgaggcaattaattgcctgtttcctggcttccaatgtttgttctcagtttctcagaatttttcttagcgcaaagcagtgagggcagtacatgttctttttgcatttttaattattgtaatccttttagataatgatgtgttcatttgaactaactacatactatgatcaagtatattgcatcctaacgctacctctgactcaacctgactttgtaggaaagcctacacgtagccttgtttgataaaaacacggaagtgactagagaatggaagataaaggaagaagctaggaagtccttgctatcaaaaccttatcctaatataggaccaattgaagtattcaaaaagaaaaacagtatcttatatgattagtttttgttggtggttttgttttcatttatttttgcaagagccactttttatttactttctctagggataagagataaaacttgaagtacttttttcaaatcttgtgtgcaaattagtattgttagcatctatttggcttattttagtatttttaagtctagtcacaaaccaaacaaaacttttgaaaatgagctatattttgttcaaagataattgatttgatcttatatttatttgtttttaggataatttttgatctttttgtaaactgctttgcttgttaatatctgtgaaaaataaatgagttcattttgttcactttccaattttcccgagtatcctagtcatcaaagataacagttcatcagaattacagtcagaaaatcctttttctactgaatagttagcagggaaaaataattctgatatttaactgtcataattctgtagtgctattatagtgaaaaactcagttctataagctagctgtgttgtcacagttttatcatagttcataattatttcatgtgcaatcctatttggaggccctgttagacttttaacaatcccatccatatctgtaattctctgatggcaagaatggatggagcatttctgagttaacagtgctggacagtatcgtactgggtgtcataaactctttatgaatggtaatattatgtaaattgaaatctggccctcaaactatattgcagctttcagcagtatgtttgaaggcctcttttgttaatgattctgtaatgtatgaattatgttcttgagtggttaaaaaagaatatgaaggcttgataattatttattgggtaaagtcaggaaattgtagtgaaagaactaatggttttgttttttggaataaaggcacctaagctattgctaattgaattgctgctagaattagaaattatgctttagaatagaattggtatttctgtgattctttttgcttcttggtattttctcttgtatctatgtatctagtattgaggcttgctctttcatgtggctttatcctctctttaatagctgttgtaaaattcctgagtaactggctgcttcaggatcagcttgcagagtcttgcttttaggttagatacaaacaaagtaaatcatagttggtgtaaatccagcaaaaaacagctggctttggaatggagaacactacaattcaaatttgaagtatattcagaagaaaactttggaattagctttacatttgtttgtaaatctaaacaaatatgcaaaattggtcaaaatgtaagtatatagcatttttaaagattaatggttccttttatgtgctgatttctttgtattctgttctctgcattcatcattcaggaataccaccaataaatgtatttatatatcccttaatcacgattt

SEQ ID NO: 315363 - DNA, 1979 bp, Homo sapiens
agaggactccctcaatgtggctgacttgacttccctccgggccccactggacatccccatcccagaccctccacccaaggatgatgagatggaaacagataagcaggagtttgtggaggatctgggcttctggagagtattgctgttgatcttcgtcattgctttgctgtctcttggcattgcttattatgtgagtggggtgctacccttcgtggttgcctgtttcctggcttccaatgtttgttctcagtttctcagaatttttcttagcgcaaagcagtgagggcagtacatgttctttttgcatttttaattattgtaatccttttagataatgatgtgttcatttgaactaactacatactatgatcaagtatattgcatcctaacgctacctctgactcaacctgactttgtaggaaagcctacacgtagccttgtttgataaaaacacggaagtgactagagaatggaagataaaggaagaagctaggaagtccttgctatcaaaaccttatcctaatataggaccaattgaagtattcaaaaagaaaaacagtatcttatatgattagtttttgttggtggttttgttttcatttatttttgcaagagccactttttatttactttctctagggataagagataaaacttgaagtacttttttcaaatcttgtgtgcaaattagtattgttagcatctatttggcttattttagtatttttaagtctagtcacaaaccaaacaaaacttttgaaaatgagctatattttgttcaaagataattgatttgatcttatatttatttgtttttaggataatttttgatctttttgtaaactgctttgcttgttaatatctgtgaaaaataaatgagttcattttgttcactttccaattttcccgagtatcctagtcatcaaagataacagttcatcagaattacagtcagaaaatcctttttctactgaatagttagcagggaaaaataattctgatatttaactgtcataattctgtagtgctattatagtgaaaaactcagttctataagctagctgtgttgtcacagttttatcatagttcataattatttcatgtgcaatcctatttggaggccctgttagacttttaacaatcccatccatatctgtaattctctgatggcaagaatggatggagcatttctgagttaacagtgctggacagtatcgtactgggtgtcataaactctttatgaatggtaatattatgtaaattgaaatctggccctcaaactatattgcagctttcagcagtatgtttgaaggcctcttttgttaatgattctgtaatgtatgaattatgttcttgagtggttaaaaaagaatatgaaggcttgataattatttattgggtaaagtcaggaaattgtagtgaaagaactaatggttttgttttttggaataaaggcacctaagctattgctaattgaattgctgctagaattagaaattatgctttagaatagaattggtatttctgtgattctttttgcttcttggtattttctcttgtatctatgtatctagtattgaggcttgctctttcatgtggctttatcctctctttaatagctgttgtaaaattcctgagtaactggctgcttcaggatcagcttgcagagtcttgcttttaggttagatacaaacaaagtaaatcatagttggtgtaaatccagcaaaaaacagctggctttggaatggagaacactacaattcaaatttgaagtatattcagaagaaaactttggaattagctttacatttgtttgtaaatctaaacaaatatgcaaaattggtcaaaatgtaagtatatagcatttttaaagattaatggttccttttatgtgctgatttctttgtattctgttctctgcattcatcattcaggaataccaccaataaatgtatttatatatcccttaatcacgattt

SEQ ID NO: 315364 - DNA, 1260 bp, Homo sapiens
acacccactgattcagcactttgctcttttaataacacatcgtccacagatctcaaagtaagggttattattttagcttccactcttccgcagacttgagtcatcgacctatttttattgaagaatgaaaggcgatgacaagtttaacatatacaaatgagttcattttgttcactttccaattttcccgagtatcctagtcatcaaagataacagttcatcagaattacagtcagaaaatcctttttctactgaatagttagcagggaaaaataattctgatatttaactgtcataattctgtagtgctattatagtgaaaaactcagttctataagctagctgtgttgtcacagttttatcatagttcataattatttcatgtgcaatcctatttggaggccctgttagacttttaacaatcccatccatatctgtaattctctgatggcaagaatggatggagcatttctgagttaacagtgctggacagtatcgtactgggtgtcataaactctttatgaatggtaatattatgtaaattgaaatctggccctcaaactatattgcagctttcagcagtatgtttgaaggcctcttttgttaatgattctgtaatgtatgaattatgttcttgagtggttaaaaaagaatatgaaggcttgataattatttattgggtaaagtcaggaaattgtagtgaaagaactaatggttttgttttttggaataaaggcacctaagctattgctaattgaattgctgctagaattagaaattatgctttagaatagaattggtatttctgtgattctttttgcttcttggtattttctcttgtatctatgtatctagtattgaggcttgctctttcatgtggctttatcctctctttaatagctgttgtaaaattcctgagtaactggctgcttcaggatcagcttgcagagtcttgcttttaggttagatacaaacaaagtaaatcatagttggtgtaaatccagcaaaaaacagctggctttggaatggagaacactacaattcaaatttgaagtatattcagaagaaaactttggaattagctttacatttgtttgtaaatctaaacaaatatgcaaaattggtcaaaatgtaagtatatagcatttttaaagattaatggttccttttatgtgctgatttctttgtattctgttctctgcattcatcattcaggaataccaccaataaatgtatttatatatcccttaatcacgattt

SEQ ID NO: 315365 - DNA, 1788 bp, Homo sapiens
  misc_feature (146)..(146): n is a, c, g, or t
agcgggtctggcccctcccctccgcccgtcaccgcctccttgaagctgccgctgtcgctgctgctcgttcgagtcgcaggtacttggcccggggcctgtgggcagcgcctgggctagagccacttgatatctcctgcaccgtccantgtagcactggaggtccagtaggcctggccggggccctgaggggcgagggtgcccgggcttcccacaccttccgcggcgactggagggagccgggccgaggaagcgaccgcgggtccgtgatggcttcttcgcggtctgtgtgttcacgagggccgggcagaggcctgcgagggttctcgtttgcgcttgcgggttagggctgtggtccggggaacccctgggcagcgcgggcagccctggctcgcggttaatcggggggtggagcgcggaagccacgccgcaggtccagctgctcggccggggcgagacggtgctttcgcggcgtgtgcttgcaggagcgcacagttcaggcgccgggacaagctgttggggtgtgagtgagctctccagaatggcacatggctccggggtgcccgggttaaaaggaaggatttgcacaccttccacttagggctcgggtaatcgcaaacttcctcccttaattggcttgcagtgctaaaaagcagatcgttctctctgaggttttcccaacagtacctcaagaaaataacatctgttttttgtaacgttccacggtattcggaattggctacagaacataataagtatttctacccatggcaaattccaccacaccgtcaaggctgagaatgggaagcttgtcatcaatggaaatcccatcaccatcttccaggagcaagatcctaccaaaatcaaatggggtgatgctgaagctgagtatgccgtggagtccactggcatcttcatgaccatagagaaggctggggctcacttaatgggggagccaaaagggtcatcatctctaccccctctgctgatgcccccatattcataatgggcatgatccctgagaagtctgaaaacagcctcaagatcatcagcaatgccttctgtaccaccaactgcttaatcccccggccaagcccatccatgacaactttggcattgtggaaggacttgtgaccacaatccatgctgccactcctgcccagaagactcgatggcctctgtgggaaactgtggcatatgtctgtggggctctccagaacatcatccctgcatctactggtgttgccaaggctgtgggcaaggccatccccgagctgaacaggaagctcactagcatggccttccgtgtccttctgcaaacgtgttggttgtggacctgacctgccatctggagaaacctgccaaatatgatgacatcaaaaaggtggtgaagcaggcgtcagagggcccctcaagggcatcttgggctacactgaacaccaggttgtttcctctgactttaacagtgacactcactcttccactttcgatgctggggctgccattgccctcagtgaccactttgtcaagctcatttcctcgtacaacagtgaatttggctacagcaacagggtggtggcccatatggcctccaaggagtaagactgctcgacaaccagccccagtgagagcacaagaggaagaaagagaccttcagcttctgggcagtccctgccatgctcagtcccccaccacactgggaatctcccctcttcacagtttccatgcagaccccacaaagagctctatcttgtcgtgtaccatcaataaagtcctctgtactcaaaaaaa

SEQ ID NO: 315366 - DNA, 814 bp, Homo sapiens
gtatttaatagaacagtgagttctttttctcaccacacttctattataacttaattttctatttactgtagatccttgccagcacattacagaatatttttgttgaaccttcttgagaattcagagaaactgctgagtgaccactgaacgaaaagatctaatcttaaggcttacgtgagtatttactactgtggacttcctcacaagatgtgaaaccttcagtgaactgctttaggacagattcagttctgtgatcaagatgaaaaataactatcattgggcttattaaatgtgggattaagtttagtagttgctcagggacacagagaaactgacaaaatacacacttgttctcacctgaaaaatagacacagagacttgtatttcttgctgagccaacactcagaagtatcctagtctgcaaaccacaagaattcttactgtgtctgaatcaaaaacaccaactagattttttaaattatctatttttaaaaatttaaccaaaacacattaccttttgaaaagcacttgatatgtggcatttcattttgaaaaaggtttatgatagcttttccatttttatgattcaatactgtgcaagcttgtccaacctgcagcccagaacagctttgaatgtagcccaacacaaattcataaacttttaaaaaacattctgagattttttttgcaattttttaaagcttatcagctatcattatgtattttatgtgtagcccaagacaattcttcttccattgtgacccagggaagccgaaatgttggacacccttgctgtaagggaaaatatttagat

SEQ ID NO: 315367 - DNA, 3362 bp, Homo sapiens
  misc_feature (146)..(146): n is a, c, g, or t
agcgggtctggcccctcccctccgcccgtcaccgcctccttgaagctgccgctgtcgctgctgctcgttcgagtcgcaggtacttggcccggggcctgtgggcagcgcctgggctagagccacttgatatctcctgcaccgtccantgtagcactggaggtccagtaggcctggccggggccctgaggggcgagggtgcccgggcttcccacaccttccgcggcgactggagggagccgggccgaggaagcgaccgcgggtccgtgatggcttcttcgcggtctgtgtgttcacgagggccgggcagaggcctgcgagggttctcgtttgcgcttgcgggttagggctgtggtccggggaacccctgggcagcgcgggcagccctggctcgcggttaatcggggggtggagcgcggaagccacgccgcaggtccagctgctcggccggggcgagacggtgctttcgcggcgtgtgcttgcaggagcgcacagttcaggcgccgggacaagctgttggggtgtgagtgagctctccagaatggcacatggctccggggtgcccgggttaaaaggaaggatttgcacaccttccacttagggctcgggtaatcgcaaacttcctcccttaattggcttgcagtgctaaaaagcagatcgttctctctgaggttttcccaacagtacctcaagaaaataacatctgttttttgtaacgttccacggtattcggaattggctacagaacataataagatccttgccagcacattacagaatatttttgttgaaccttcttgagaattcagagaaactgctgagtgaccactgaacgaaaagatctaatcttaaggcttacgcgtgttccatccaccacatcagaacaatgtcgtatgtttttgtaaatgattcttctcagactaacgtgcccttgctgcaagcctgtattgatggggactttaattattccaagcggcttttggaaagtggctttgacccaaatattcgtgacagcaggggcagaacaggccttcaccttgcagcagctcgagggaatgtagacatctgccagttactgcataaattcggtgccgatcttctggccacagattatcaaggaaacacagctcttcacctctgtggccatgtggatactatccaatttttggtttccaatggactcaaaattgatatttgcaatcatcaaggtgctacccctttagttctggcaaagcgcagaggagtaaataaagatgtcatccgattgctggaatctttggaagaacaggaggtgaaaggatttaacagaggaacccactcgaaactggagaccatgcaaacagctgagagtgaaagtgccatggaaagccattcactcctcaatcccaacctgcagcaaggtgaaggagtcctctccagcttccgaaccacgtggcaggagtttgtggaggatctgggcttctggagagtattgctgttgatcttcgtcattgctttgctgtctcttggcattgcttattatgtgagtggggtgctacccttcgtggaaaaccagcctgaactggtgcattaaaggagctcatggaagatgaggcaattaattgcctgtttcctggcttccaatgtttgttctcagtttctcagaatttttcttagcgcaaagcagtgagggcagtacatgttctttttgcatttttaattattgtaatccttttagataatgatgtgttcatttgaactaactacatactatgatcaagtatattgcatcctaacgctacctctgactcaacctgactttgtaggaaagcctacacgtagccttgtttgataaaaacacggaagtgactagagaatggaagataaaggaagaagctaggaagtccttgctatcaaaaccttatcctaatataggaccaattgaagtattcaaaaagaaaaacagtatcttatatgattagtttttgttggtggttttgttttcatttatttttgcaagagccactttttatttactttctctagggataagagataaaacttgaagtacttttttcaaatcttgtgtgcaaattagtattgttagcatctatttggcttattttagtatttttaagtctagtcacaaaccaaacaaaacttttgaaaatgagctatattttgttcaaagataattgatttgatcttatatttatttgtttttaggataatttttgatctttttgtaaactgctttgcttgttaatatctgtgaaaaataaatgagttcattttgttcactttccaattttcccgagtatcctagtcatcaaagataacagttcatcagaattacagtcagaaaatcctttttctactgaatagttagcagggaaaaataattctgatatttaactgtcataattctgtagtgctattatagtgaaaaactcagttctataagctagctgtgttgtcacagttttatcatagttcataattatttcatgtgcaatcctatttggaggccctgttagacttttaacaatcccatccatatctgtaattctctgatggcaagaatggatggagcatttctgagttaacagtgctggacagtatcgtactgggtgtcataaactctttatgaatggtaatattatgtaaattgaaatctggccctcaaactatattgcagctttcagcagtatgtttgaaggcctcttttgttaatgattctgtaatgtatgaattatgttcttgagtggttaaaaaagaatatgaaggcttgataattatttattgggtaaagtcaggaaattgtagtgaaagaactaatggttttgttttttggaataaaggcacctaagctattgctaattgaattgctgctagaattagaaattatgctttagaatagaattggtatttctgtgattctttttgcttcttggtattttctcttgtatctatgtatctagtattgaggcttgctctttcatgtggctttatcctctctttaatagctgttgtaaaattcctgagtaactggctgcttcaggatcagcttgcagagtcttgcttttaggttagatacaaacaaagtaaatcatagttggtgtaaatccagcaaaaaacagctggctttggaatggagaacactacaattcaaatttgaagtatattcagaagaaaactttggaattagctttacatttgtttgtaaatctaaacaaatatgcaaaattggtcaaaatgtaagtatatagcatttttaaagattaatggttccttttatgtgctgatttctttgtattctgttctctgcattcatcattcaggaataccaccaataaatgtatttatatatcccttaatcacgattt

SEQ ID NO: 315368 - DNA, 2585 bp, Homo sapiens
agcgggtctggcccctcccctccgcccgtcaccgcctccttgaagctgccgctgtcgctgctgctcgttcgagtcgcaggcgtgttccatccaccacatcagaacaatgtcgtatgtttttgtaaatgattcttctcagactaacgtgcccttgctgcaagcctgtattgatggggactttaattattccaagcggcttttggaaagtggctttgacccaaatattcgtgacagcaggggcagaacaggccttcaccttgcagcagctcgagggaatgtagacatctgccagttactgcataaattcggtgccgatcttctggccacagattatcaaggaaacacagctcttcacctctgtggccatgtggatactatccaatttttggtttccaatggactcaaaattgatatttgcaatcatcaaggtgctacccctttagttctggcaaagcgcagaggagtaaataaagatgtcatccgattgctggaatctttggaagaacaggaggtgaaaggatttaacagaggaacccactcgaaactggagaccatgcaaacagctgagagtgaaagtgccatggaaagccattcactcctcaatcccaacctgcagcaaggtgaaggagtcctctccagcttccgaaccacgtggcaggagtttgtggaggatctgggcttctggagagtattgctgttgatcttcgtcattgctttgctgtctcttggcattgcttattatgtgagtggggtgctacccttcgtggaaaaccagcctgaactggtgcattaaaggagctcatggaagatgaggcaattaattgcctgtttcctggcttccaatgtttgttctcagtttctcagaatttttcttagcgcaaagcagtgagggcagtacatgttctttttgcatttttaattattgtaatccttttagataatgatgtgttcatttgaactaactacatactatgatcaagtatattgcatcctaacgctacctctgactcaacctgactttgtaggaaagcctacacgtagccttgtttgataaaaacacggaagtgactagagaatggaagataaaggaagaagctaggaagtccttgctatcaaaaccttatcctaatataggaccaattgaagtattcaaaaagaaaaacagtatcttatatgattagtttttgttggtggttttgttttcatttatttttgcaagagccactttttatttactttctctagggataagagataaaacttgaagtacttttttcaaatcttgtgtgcaaattagtattgttagcatctatttggcttattttagtatttttaagtctagtcacaaaccaaacaaaacttttgaaaatgagctatattttgttcaaagataattgatttgatcttatatttatttgtttttaggataatttttgatctttttgtaaactgctttgcttgttaatatctgtgaaaaataaatgagttcattttgttcactttccaattttcccgagtatcctagtcatcaaagataacagttcatcagaattacagtcagaaaatcctttttctactgaatagttagcagggaaaaataattctgatatttaactgtcataattctgtagtgctattatagtgaaaaactcagttctataagctagctgtgttgtcacagttttatcatagttcataattatttcatgtgcaatcctatttggaggccctgttagacttttaacaatcccatccatatctgtaattctctgatggcaagaatggatggagcatttctgagttaacagtgctggacagtatcgtactgggtgtcataaactctttatgaatggtaatattatgtaaattgaaatctggccctcaaactatattgcagctttcagcagtatgtttgaaggcctcttttgttaatgattctgtaatgtatgaattatgttcttgagtggttaaaaaagaatatgaaggcttgataattatttattgggtaaagtcaggaaattgtagtgaaagaactaatggttttgttttttggaataaaggcacctaagctattgctaattgaattgctgctagaattagaaattatgctttagaatagaattggtatttctgtgattctttttgcttcttggtattttctcttgtatctatgtatctagtattgaggcttgctctttcatgtggctttatcctctctttaatagctgttgtaaaattcctgagtaactggctgcttcaggatcagcttgcagagtcttgcttttaggttagatacaaacaaagtaaatcatagttggtgtaaatccagcaaaaaacagctggctttggaatggagaacactacaattcaaatttgaagtatattcagaagaaaactttggaattagctttacatttgtttgtaaatctaaacaaatatgcaaaattggtcaaaatgtaagtatatagcatttttaaagattaatggttccttttatgtgctgatttctttgtattctgttctctgcattcatcattcaggaataccaccaataaatgtatttatatatcccttaatcacgattt

SEQ ID NO: 315369 - DNA, 1739 bp, Homo sapiens
agcgggtctggcccctcccctccgcccgtcaccgcctccttgaagctgccgctgtcgctgctgctcgttcgagtcgcagatccttgccagcacattacagaatatttttgttgaaccttcttgagaattcagagaaactgctgagtgaccactgaacgaaaagatctaatcttaaggcttacgcgtgttccatccaccacatcagaacaatgtcgtatgtttttgtaaatgattcttctcagactaacgtgcccttgctgcaagcctgtattgatggggactttaattattccaagcggcttttggaaagtggctttgacccaaatattcgtgacagcaggggcagaacaggccttcaccttgcagcagctcgagggaatgtagacatctgccagttactgcataaattcggtgccgatcttctggccacagattatcaaggaaacacagctcttcacctctgtggccatgtggatactatccaatttttggtttccaatggactcaaaattgatatttgcaatcatcaaggtgctacccctttagttctggcaaagcgcagaggagtaaataaagatgtcatccgattgctggaatctttggaagaacaggaggtgaaaggatttaacagaggaacccactcgaaactggagaccatgcaaacagctgagagtgaaagtgccatggaaagccattcactcctcaatcccaacctgcagcaaggtgaaggagtcctctccagcttccgaaccacgtggcaggagtttgtggaggatctgggcttctggagagtattgctgttgatcttcgtcattgctttgctgtctcttggcattgcttattatagaaggacactgaggcttggaagctttgcaaggcaagacagaagccgaatccaggccatctaatctctaggtcagtgtcctgtgctcctgagcctcagaaggcaagaaagaagggatacagacgtcagcgtccctgttgggtggggctgtttccgtcacgacttgtgtcatggagcatcatctcaaagctctgcagttaggaggcagagggacctgctaccacctgtcccctcctctccagtcctgccctgcaggcagcccgggcacctgctgtcttcctggcctcccagatcctcaagatggagctccaggaaccatcccctcctccgcccgggcaggatgccacttccacaaggcaaatcacatccatttgatcttgaacaaaaggctgccgtggtgtctgaaatgacaactcccaggcgggtgatgtcatgctgttttgtttgtctccatggactgtggggatccaatttcagttgtgaagaaaacggtctggggaaaaaagttacttcattcggaaaattccgagaagccataaatacagtttgcagctgaggaaagcactttcacactcagacaatggatttgggtggaagaaaagacttcccgcccctaaggctgagccccttcactcccacccatggccaccggcagcccgcttctgccagcagatagatgtgtgcatggctctggcaagatctcaagcaaccccccttccccaaggagactctccgtgacccagtggcaagttggcaggggatgtgttttccctggttctcatcctaaattgtctcctgcccagagtccatccctgaagtatcaggcacttccctctcgtaaatggttgacctgcatctctgagctgctgttaaagcaaatttaaaataacatttt

SEQ ID NO: 315370 - DNA, 10372 bp, Homo sapiens
  misc_feature (5)..(5): n is a, c, g, or t
  misc_feature (82)..(82): n is a, c, g, or t
ccttnttccaagggattgaccagcttatgaaggtattaaggcttaaccatgatggccaaattttagatcagacccatttggnacctctggaaagaaagagagagtagagaatcaatgtaattttgaattagactctgggctccagcccgccgaagccgcgccagaactgtactctccgagaggtcgttttcccgtccccgagagcaagtttatttacaaatgttggagtaataaagaaggcagaacaaaatgagctgggctttggaagaatggaaagaagggctgcctacaagagctcttcagaaaattcaagagcttgaaggacagcttgacaaactgaagaaggaaaagcagcaaaggcagtttcagcttgacagtctcgaggctgcgctgcagaagcaaaaacagaaggttgaaaatgaaaaaaccgagggtacaaacctgaaaagggagaatcaaagattgatggaaatatgtgaaagtctggagaaaactaagcagaagatttctcatgaacttcaagtcaaggagtcacaagtgaatttccaggaaggacaactgaattcaggcaaaaaacaaatagaaaaactggaacaggaacttaaaaggtgtaaatctgagcttgaaagaagccaacaagctgcgcagtctgcagatgtctctctgaatccatgcaatacaccacaaaaaatttttacaactccactaacaccaagtcaatattatagtggttccaagtatgaagatctaaaagaaaaatataataaagaggttgaagaacgaaaaagattagaggcagaggttaaagccttgcaggctaaaaaagcaagccagactcttccacaagccaccatgaatcaccgcgacattgcccggcatcaggcttcatcatctgtgttctcatggcagcaagagaagaccccaagtcatctttcatctaattctcaaagaactccaattaggagagatttctctgcatcttacttttctggggaacaagaggtgactccaagtcgatcaactttgcaaatagggaaaagagatgctaatagcagtttctttgacaattctagcagtcctcatcttttggatcaattaaaagcgcagaatcaagagctaagaaacaagattaatgagttggaactacgcctgcaaggacatgaaaaagaaatgaaaggccaagtgaataagtttcaagaactccaactccaactggagaaagcaaaagtggaattaattgaaaaagagaaagttttgaacaaatgtagggatgaactagtgagaacaacagcacaatacgaccaggcgtcaaccaagtatactgcattggaacaaaaactgaaaaaattgacggaagatttgagttgtcagcgacaaaatgcagaaagtgccagatgttctctggaacagaaaattaaggaaaaagaaaaggagtttcaagaggagctctcccgtcaacagcgttctttccaaacactggaccaggagtgcatccagatgaaggccagactcacccaggagttacagcaagccaagaatatgcacaacgtcctgcaggctgaactggataaactcacatcagtaaagcaacagctagaaaacaatttggaagagtttaagcaaaagttgtgcagagctgaacaggcgttccaggcgagtcagatcaaggagaatgagctgaggagaagcatggaggaaatgaagaaggaaaacaacctccttaagagtcactctgagcaaaaggccagagaagtctgccacctggaggcagaactcaagaacatcaaacagtgtttaaatcagagccagaattttgcagaagaaatgaaagcgaagaatacctctcaggaaaccatgttaagagatcttcaagaaaaaaataaatcagcaagaaaactccttgactttagaaaaactgaagcttgctgtggctgatctggaaaagcagcgagattgttctcaagaccttttgaagaaaagagaacatcacattgaacaacttaatgataagttaagcaagacagagaaagagtccaaagccttgctgagtgctttagagttaaaaaagaaagaatatgaagaattgaaagaagagaaaactctgttttcttgttggaaaagtgaaaacgaaaaacttttaactcagatggaatcagaaaaggaaaacttgcagagtaaaattaatcacttggaaacttgtctgaagacacagcaaataaaaagtcatgaatacaacgagagagtaagaacgctggagatggacagagaaaacctaagtgtcgagatcagaaaccttcacaacgtgttagacagtaagtcagtggaggtagagacccagaaactagcttatatggagctacagcagaaagctgagttctcagatcagaaacatcagaaggaaatagaaaatatgtgtttgaagacttctcagcttactgggcaagttgaagatctagaacacaagcttcagttactgtcaaatgaaataatggacaaagaccggtgttaccaagacttgcatgccgaatatgagagcctcagggatctgctaaaatccaaagatgcttctctggtgacaaatgaagatcatcagagaagtcttttggcttttgatcagcagcctgccatgcatcattcctttgcaaatataattggagaacaaggaagcatgccttcagagaggagtgaatgtcgtttagaagcagaccaaagtccgaaaaattctgccatcctacaaaatagagttgattcacttgaattttcattagagtctcaaaaacagatgaactcagacctgcaaaagcagtgtgaagagttggtgcaaatcaaaggagaaatagaagaaaatctcatgaaagcagaacagatgcatcaaagttttgtggctgaaacaagtcagcgcattagtaagttacaggaagacacttctgctcaccagaatgttgttgctgaaaccttaagtgcccttgagaacaaggaaaaagagctgcaacttttaaatgataaggtagaaactgagcaggcagagattcaagaattaaaaaagagcaaccatctacttgaagactctctaaaggagctacaacttttatccgaaaccctaagcttggagaagaaagaaatgagttccatcatttctctaaataaaagggaaattgaagagctgacccaagagaatgggactcttaaggaaattaatgcatccttaaatcaagagaagatgaacttaatccagaaaagtgagagttttgcaaactatatagatgaaagggagaaaagcatttcagagttatctgatcagtacaagcaagaaaaacttattttactacaaagatgtgaagaaaccggaaatgcatatgaggatcttagtcaaaaatacaaagcagcacaggaaaagaattctaaattagaatgcttgctaaatgaatgcactagtctttgtgaaaataggaaaaatgagttggaacagctaaaggaagcatttgcaaaggaacaccaagaattcttaacaaaattagcatttgctgaagaaagaaatcagaatctgatgctagagttggagacagtgcagcaagctctgagatctgagatgacagataaccaaaacaattctaagagcgaggctggtggtttaaagcaagaaatcatgactttaaaggaagaacaaaacaaaatgcaaaaggaagttaatgacttattacaagagaatgaacagctgatgaaggtaatgaagactaaacatgaatgtcaaaatctagaatcagaaccaattaggaactctgtgaaagaaagagagagtgagagaaatcaatgtaattttaaacctcagatggatcttgaagttaaagaaatttctctagatagttataatgcgcagttggtgcaattagaagctatgctaagaaataaggaattaaaacttcaggaaagtgagaaggagaaggagtgcctgcagcatgaattacagacaattagaggagatcttgaaaccagcaatttgcaagacatgcagtcacaagaaattagtggccttaaagactgtgaaatagatgcggaagaaaagtatatttcagggcctcatgagttgtcaacaagtcaaaacgacaatgcacaccttcagtgctctctgcaaacaacaatgaacaagctgaatgagctagagaaaatatgtgaaatactgcaggctgaaaagtatgaactcgtaactgagctgaatgattcaaggtcagaatgtatcacagcaactaggaaaatggcagaagaggtagggaaactactaaatgaagttaaaatattaaatgatgacagtggtcttctccatggtgagttagtggaagacataccaggaggtgaatttggtgaacaaccaaatgaacagcaccctgtgtctttggctccattggacgagagtaattcctacgagcacttgacattgtcagacaaagaagttcaaatgcactttgccgaattgcaagagaaattcttatctttacaaagtgaacacaaaattttacatgatcagcactgtcagatgagctctaaaatgtcagagctgcagacctatgttgactcattaaaggccgaaaatttggtcttgtcaacgaatctgagaaactttcaaggtgacttggtgaaggagatgcagctgggcttggaggaggggctcgttccatccctgtcatcctcttgtgtgcctgacagctctagtcttagcagtttgggagactcctccttttacagagctcttttagaacagacaggagatatgtctcttttgagtaatttagaaggggctgtttcagcaaaccagtgcagtgtagatgaagtattttgcagcagtctgcaggaggagaatctgaccaggaaagaaaccccttcggccccagcgaagggtgttgaagagcttgagtccctctgtgaggtgtaccggcagtccctcgagaagctagaagagaaaatggaaagtcaagggattatgaaaaataaggaaattcaagagctcgagcagttattaagttctgaaaggcaagagcttgactgccttaggaagcagtatttgtcagaaaatgaacagtggcaacagaagctgacaagcgtgactctggagatggagtccaagttggcggcagaaaagaaacagacggaacaactgtcacttgagctggaagtagcacgactccagctacaaggtctggacttaagttctcggtctttgcttggcatcgacacagaagatgctattcaaggccgaaatgagagctgtgacatatcaaaagaacatacttcagaaactacagaaagaacaccaaagcatgatgttcatcagatttgtgataaagatgctcagcaggacctcaatctagacattgagaaaataactgagactggtgcagtgaaacccacaggagagtgctctggggaacagtccccagataccaattatgagcctccaggggaagataaaacccagggctcttcagaatgcatttctgaattgtcattttctggtcctaatgctttggtacctatggatttcctggggaatcaggaagatatccataatcttcaactgcgggtaaaagagacatcaaatgagaatttgagattacttcatgtgatagaggaccgtgacagaaaagttgaaagtttgctaaatgaaatgaaagaattagactcaaaactccatttacaggaggtacaactaatgaccaaaattgaagcatgcatagaattggaaaaaatagttggggaacttaagaaagaaaactcagatttaagtgaaaaattggaatatttttcttgtgatcaccaggagttactccagagagtagaaacttctgaaggcctcaattctgatttagaaatgcatgcagataaatcatcacgtgaagatattggagataatgtggccaaggtgaatgacagctggaaggagagatttcttgatgtggaaaatgagctgagtaggatcagatcggagaaagctagcattgagcatgaagccctctacctggaggctgacttagaggtagttcaaacagagaagctatgtttagaaaaagacaatgaaaataagcagaaggttattgtctgccttgaagaagaactctcagtggtcacaagtgagagaaaccagcttcgtggagaattagatactatgtcaaaaaaaaccacggcactggatcagttgtctgaaaaaatgaaggagaaaacacaagagcttgagtctcatcaaagtgagtgtctccattgcattcaggtggcagaggcagaggtgaaggaaaagacggaactccttcagactttgtcctctgatgtgagtgagctgttaaaagacaaaactcatctccaggaaaagctgcagagtttggaaaaggactcacaggcactgtctttgacaaaatgtgagctggaaaaccaaattgcacaactgaataaagagaaagaattgcttgtcaaggaatctgaaagcctgcaggccagactgagtgaatcagattatgaaaagctgaatgtctccaaggccttggaggccgcactggtggagaaaggtgagttcgcattgaggctgagctcaacacaggaggaagtgcatcagctgagaagaggcatcgagaaactgagagttcgcattgaggccgatgaaaagaagcagctgcacatcgcagagaaactgaaagaacgcgagcgggagaatgattcacttaaggataaagttgagaaccttgaaagggaattgcagatgtcagaagaaaaccaggagctagtgattcttgatgccgagaattccaaagcagaagtagagactctaaaaacacaaatagaagagatggccagaagcctgaaagtttttgaattagaccttgtcacgttaaggtctgaaaaagaaaatctgacaaaacaaatacaagaaaaacaaggtcagttgtcagaactagacaagttactctcttcatttaaaagtctgttagaagaaaaggagcaagcagagatacagatcaaagaagaatctaaaactgcagtggagatgcttcagaatcagttaaaggagctaaatgaggcagtagcagccttgtgtggtgaccaagaaattatgaaggccacagaacagagtctagacccaccaatagaggaagagcatcagctgagaaatagcattgaaaagctgagagcccgcctagaagctgatgaaaagaagcagctctgtgtcttacaacaactgaaggaaagtgagcatcatgcagatttacttaagggtagagtggagaaccttgaaagagagctagagatagccaggacaaaccaagagcatgcagctcttgaggcagagaattccaaaggagaggtagagaccctaaaagcaaaaatagaagggatgacccaaagtctgagaggtctggaattagatgttgttactataaggtcagaaaaagaagatctgacaaatgaattacaaaaagagcaagagcgaatatctgaattagaaataataaattcatcatttgaaaatattttgcaagaaaaagagcaagagaaagtacagatgaaagaaaaatcaagcactgccatggagatgcttcaaacacaattaaaagagctcaatgagagagtggcagccctgcataatgaccaagaagcctgtaaggccaaagagcagaatcttagtagtcaagtagagtgtcttgaacttgagaaggctcagttgctacaaggccttgatgaggccaaaaataattatattgttttgcaatcttcagtgaatggcctcattcaagaagtagaagatggcaagcagaaactggagaagaaggatgaagaaatcagtagactgaaaaatcaaattcaagaccaagagcagcttgtctctaaactgtcccaggtggaaggagagcaccaactttggaaggagcaaaacttagaactgagaaatctgacagtggaattggagcagaagatccaagtgctacaatccaaaaatgcctctttgcaggacacattagaagtgctgcagagttcttacaagaatctagagaatgagcttgaattgacaaaaatggacaaaatgtcctttgttgaaaaagtaaacaaaatgactgcaaaggaaactgagctgcagagggaaatgcatgagatggcacagaaaacagcagagctgcaagaagaactcagtggagagaaaaataggctagctggagagttgcagttactgttggaagaaataaagagcagcaaagatcaattgaaggagctcacactagaaaatagtgaattgaagaagagcctagattgcatgcacaaagaccaggtggaaaaggaagggaaagtgagagaggaaatagctgaatatcagctacggcttcatgaagctgaaaagaaacaccaggctttgcttttggacacaaacaaacagtatgaagtagaaatccagacataccgagagaaattgacttctaaagaagaatgtctcagttcacagaagctggagatagaccttttaaagtctagtaaagaagagctcaataattcattgaaagctactactcagattttggaagaattgaagaaaaccaagatggacaatctaaaatatgtaaatcagttgaagaaggaaaatgaacgtgcccaggggaaaatgaagttgttgatcaaatcctgtaaacagctggaagaggaaaaggagatactgcagaaagaactctctcaacttcaagctgcacaggagaagcagaaaacaggtactgttatggataccaaggtcgatgaattaacaactgagatcaaagaactgaaagaaactcttgaagaaaaaaccaaggaggcagatgaatacttggataagtactgttccttgcttataagccatgaaaagttagagaaagctaaagagatgttagagacacaagtggcccatctgtgttcacagcaatctaaacaagattcccgagggtctcctttgctaggtccagttgttccaggaccatctccaatcccttctgttactgaaaagaggttatcatctggccaaaataaagcttcaggcaagaggcaaagatccagtggaatatgggagaatggtggaggaccaacacctgctaccccagagagcttttctaaaaaaagcaagaaagcagtcatgagtggtattcaccctgcagaagacacggaaggtactgagtttgagccagagggacttccagaagttgtaaagaaagggtttgctgacatcccgacaggaaagactagcccatatatcctgcgaagaacaaccatggcaactcggaccagcccccgcctggctgcacagaagttagcgctatccccactgagtctcggcaaagaaaatcttgcagagtcctccaaaccaacagctggtggcagcagatcacaaaaggtcaaagttgctcagcggagcccagtagattcaggcaccatcctccgagaacccaccacgaaatccgtcccagtcaataatcttcctgagagaagtccgactgacagccccagagagggcctgagggtcaagcgaggccgacttgtccccagccccaaagctggactggagtccaagggcagtgagaactgtaaggtccagtgaaggcactttgtgtgtcagtacccctgggaggtgccagtcattgaatagataaggctgtgcctacaggacttctctttagtcagggcatgctttattagtgaggagaaaacaattccttagaagtcttaaatatattgtactctttagatctcccatgtgtaggtattgaaaaagtttggaagcactgatcacctgttagcattgccattcctctactgcaatgtaaatagtataaagctatgtatataaagctttttggtaatatgttacaattaaaatgacaagcactatatcacaatctctgtttgtatgtgggttttacactaaaaaaatgcaaaacacattttattcttctaattaacagctcctaggaaaatgtagacttttgctttatgatattctatctgtagtatgaggcatggaatagttttgtatcgggaatttctcagagctgagtaaaatgaaggaaaagcatgttatgtgtttttaaggaaaatgtgcacacatatacatgtaggagtgtttatctttctcttacaatctgttttagacatctttgcttatgaaacctgtacatatgtgtgtgtgggtatgtgtttatttccagtgagggctgcaggcttcctagaggtgtgctataccatgcgtctgtcgttgtgcttttttctgtttttagaccaattttttacagttctttggtaagcattgtcgtatctggtgatggattaacatatagcctttgttttctaataaaatagtcgccttcgttttctgtaa

SEQ ID NO: 315371 - DNA, 10330 bp, Homo sapiens
cgaccgaactggagaatccgccccgggatgtggttcgtaggggtgtctgcgcccttctgctcgggttcaaactggtctcggattagtgtcccagaccctactcggtcacggactcacactttaggggatcattttcttcctccgtaaaagaattggagatgactagtttatttacaaatgttggagtaataaagaaggcagaacaaaatgagctgggctttggaagaatggaaagaagggctgcctacaagagctcttcagaaaattcaagagcttgaaggacagcttgacaaactgaagaaggaaaagcagcaaaggcagtttcagcttgacagtctcgaggctgcgctgcagaagcaaaaacagaaggttgaaaatgaaaaaaccgagggtacaaacctgaaaagggagaatcaaagattgatggaaatatgtgaaagtctggagaaaactaagcagaagatttctcatgaacttcaagtcaaggagtcacaagtgaatttccaggaaggacaactgaattcaggcaaaaaacaaatagaaaaactggaacaggaacttaaaaggtgtaaatctgagcttgaaagaagccaacaagctgcgcagtctgcagatgtctctctgaatccatgcaatacaccacaaaaaatttttacaactccactaacaccaagtcaatattatagtggttccaagtatgaagatctaaaagaaaaatataataaagaggttgaagaacgaaaaagattagaggcagaggttaaagccttgcaggctaaaaaagcaagccagactcttccacaagccaccatgaatcaccgcgacattgcccggcatcaggcttcatcatctgtgttctcatggcagcaagagaagaccccaagtcatctttcatctaattctcaaagaactccaattaggagagatttctctgcatcttacttttctggggaacaagaggtgactccaagtcgatcaactttgcaaatagggaaaagagatgctaatagcagtttctttgacaattctagcagtcctcatcttttggatcaattaaaagcgcagaatcaagagctaagaaacaagattaatgagttggaactacgcctgcaaggacatgaaaaagaaatgaaaggccaagtgaataagtttcaagaactccaactccaactggagaaagcaaaagtggaattaattgaaaaagagaaagttttgaacaaatgtagggatgaactagtgagaacaacagcacaatacgaccaggcgtcaaccaagtatactgcattggaacaaaaactgaaaaaattgacggaagatttgagttgtcagcgacaaaatgcagaaagtgccagatgttctctggaacagaaaattaaggaaaaagaaaaggagtttcaagaggagctctcccgtcaacagcgttctttccaaacactggaccaggagtgcatccagatgaaggccagactcacccaggagttacagcaagccaagaatatgcacaacgtcctgcaggctgaactggataaactcacatcagtaaagcaacagctagaaaacaatttggaagagtttaagcaaaagttgtgcagagctgaacaggcgttccaggcgagtcagatcaaggagaatgagctgaggagaagcatggaggaaatgaagaaggaaaacaacctccttaagagtcactctgagcaaaaggccagagaagtctgccacctggaggcagaactcaagaacatcaaacagtgtttaaatcagagccagaattttgcagaagaaatgaaagcgaagaatacctctcaggaaaccatgttaagagatcttcaagaaaaaaataaatcagcaagaaaactccttgactttagaaaaactgaagcttgctgtggctgatctggaaaagcagcgagattgttctcaagaccttttgaagaaaagagaacatcacattgaacaacttaatgataagttaagcaagacagagaaagagtccaaagccttgctgagtgctttagagttaaaaaagaaagaatatgaagaattgaaagaagagaaaactctgttttcttgttggaaaagtgaaaacgaaaaacttttaactcagatggaatcagaaaaggaaaacttgcagagtaaaattaatcacttggaaacttgtctgaagacacagcaaataaaaagtcatgaatacaacgagagagtaagaacgctggagatggacagagaaaacctaagtgtcgagatcagaaaccttcacaacgtgttagacagtaagtcagtggaggtagagacccagaaactagcttatatggagctacagcagaaagctgagttctcagatcagaaacatcagaaggaaatagaaaatatgtgtttgaagacttctcagcttactgggcaagttgaagatctagaacacaagcttcagttactgtcaaatgaaataatggacaaagaccggtgttaccaagacttgcatgccgaatatgagagcctcagggatctgctaaaatccaaagatgcttctctggtgacaaatgaagatcatcagagaagtcttttggcttttgatcagcagcctgccatgcatcattcctttgcaaatataattggagaacaaggaagcatgccttcagagaggagtgaatgtcgtttagaagcagaccaaagtccgaaaaattctgccatcctacaaaatagagttgattcacttgaattttcattagagtctcaaaaacagatgaactcagacctgcaaaagcagtgtgaagagttggtgcaaatcaaaggagaaatagaagaaaatctcatgaaagcagaacagatgcatcaaagttttgtggctgaaacaagtcagcgcattagtaagttacaggaagacacttctgctcaccagaatgttgttgctgaaaccttaagtgcccttgagaacaaggaaaaagagctgcaacttttaaatgataaggtagaaactgagcaggcagagattcaagaattaaaaaagagcaaccatctacttgaagactctctaaaggagctacaacttttatccgaaaccctaagcttggagaagaaagaaatgagttccatcatttctctaaataaaagggaaattgaagagctgacccaagagaatgggactcttaaggaaattaatgcatccttaaatcaagagaagatgaacttaatccagaaaagtgagagttttgcaaactatatagatgaaagggagaaaagcatttcagagttatctgatcagtacaagcaagaaaaacttattttactacaaagatgtgaagaaaccggaaatgcatatgaggatcttagtcaaaaatacaaagcagcacaggaaaagaattctaaattagaatgcttgctaaatgaatgcactagtctttgtgaaaataggaaaaatgagttggaacagctaaaggaagcatttgcaaaggaacaccaagaattcttaacaaaattagcatttgctgaagaaagaaatcagaatctgatgctagagttggagacagtgcagcaagctctgagatctgagatgacagataaccaaaacaattctaagagcgaggctggtggtttaaagcaagaaatcatgactttaaaggaagaacaaaacaaaatgcaaaaggaagttaatgacttattacaagagaatgaacagctgatgaaggtaatgaagactaaacatgaatgtcaaaatctagaatcagaaccaattaggaactctgtgaaagaaagagagagtgagagaaatcaatgtaattttaaacctcagatggatcttgaagttaaagaaatttctctagatagttataatgcgcagttggtgcaattagaagctatgctaagaaataaggaattaaaacttcaggaaagtgagaaggagaaggagtgcctgcagcatgaattacagacaattagaggagatcttgaaaccagcaatttgcaagacatgcagtcacaagaaattagtggccttaaagactgtgaaatagatgcggaagaaaagtatatttcagggcctcatgagttgtcaacaagtcaaaacgacaatgcacaccttcagtgctctctgcaaacaacaatgaacaagctgaatgagctagagaaaatatgtgaaatactgcaggctgaaaagtatgaactcgtaactgagctgaatgattcaaggtcagaatgtatcacagcaactaggaaaatggcagaagaggtagggaaactactaaatgaagttaaaatattaaatgatgacagtggtcttctccatggtgagttagtggaagacataccaggaggtgaatttggtgaacaaccaaatgaacagcaccctgtgtctttggctccattggacgagagtaattcctacgagcacttgacattgtcagacaaagaagttcaaatgcactttgccgaattgcaagagaaattcttatctttacaaagtgaacacaaaattttacatgatcagcactgtcagatgagctctaaaatgtcagagctgcagacctatgttgactcattaaaggccgaaaatttggtcttgtcaacgaatctgagaaactttcaaggtgacttggtgaaggagatgcagctgggcttggaggaggggctcgttccatccctgtcatcctcttgtgtgcctgacagctctagtcttagcagtttgggagactcctccttttacagagctcttttagaacagacaggagatatgtctcttttgagtaatttagaaggggctgtttcagcaaaccagtgcagtgtagatgaagtattttgcagcagtctgcaggaggagaatctgaccaggaaagaaaccccttcggccccagcgaagggtgttgaagagcttgagtccctctgtgaggtgtaccggcagtccctcgagaagctagaagagaaaatggaaagtcaagggattatgaaaaataaggaaattcaagagctcgagcagttattaagttctgaaaggcaagagcttgactgccttaggaagcagtatttgtcagaaaatgaacagtggcaacagaagctgacaagcgtgactctggagatggagtccaagttggcggcagaaaagaaacagacggaacaactgtcacttgagctggaagtagcacgactccagctacaaggtctggacttaagttctcggtctttgcttggcatcgacacagaagatgctattcaaggccgaaatgagagctgtgacatatcaaaagaacatacttcagaaactacagaaagaacaccaaagcatgatgttcatcagatttgtgataaagatgctcagcaggacctcaatctagacattgagaaaataactgagactggtgcagtgaaacccacaggagagtgctctggggaacagtccccagataccaattatgagcctccaggggaagataaaacccagggctcttcagaatgcatttctgaattgtcattttctggtcctaatgctttggtacctatggatttcctggggaatcaggaagatatccataatcttcaactgcgggtaaaagagacatcaaatgagaatttgagattacttcatgtgatagaggaccgtgacagaaaagttgaaagtttgctaaatgaaatgaaagaattagactcaaaactccatttacaggaggtacaactaatgaccaaaattgaagcatgcatagaattggaaaaaatagttggggaacttaagaaagaaaactcagatttaagtgaaaaattggaatatttttcttgtgatcaccaggagttactccagagagtagaaacttctgaaggcctcaattctgatttagaaatgcatgcagataaatcatcacgtgaagatattggagataatgtggccaaggtgaatgacagctggaaggagagatttcttgatgtggaaaatgagctgagtaggatcagatcggagaaagctagcattgagcatgaagccctctacctggaggctgacttagaggtagttcaaacagagaagctatgtttagaaaaagacaatgaaaataagcagaaggttattgtctgccttgaagaagaactctcagtggtcacaagtgagagaaaccagcttcgtggagaattagatactatgtcaaaaaaaaccacggcactggatcagttgtctgaaaaaatgaaggagaaaacacaagagcttgagtctcatcaaagtgagtgtctccattgcattcaggtggcagaggcagaggtgaaggaaaagacggaactccttcagactttgtcctctgatgtgagtgagctgttaaaagacaaaactcatctccaggaaaagctgcagagtttggaaaaggactcacaggcactgtctttgacaaaatgtgagctggaaaaccaaattgcacaactgaataaagagaaagaattgcttgtcaaggaatctgaaagcctgcaggccagactgagtgaatcagattatgaaaagctgaatgtctccaaggccttggaggccgcactggtggagaaaggtgagttcgcattgaggctgagctcaacacaggaggaagtgcatcagctgagaagaggcatcgagaaactgagagttcgcattgaggccgatgaaaagaagcagctgcacatcgcagagaaactgaaagaacgcgagcgggagaatgattcacttaaggataaagttgagaaccttgaaagggaattgcagatgtcagaagaaaaccaggagctagtgattcttgatgccgagaattccaaagcagaagtagagactctaaaaacacaaatagaagagatggccagaagcctgaaagtttttgaattagaccttgtcacgttaaggtctgaaaaagaaaatctgacaaaacaaatacaagaaaaacaaggtcagttgtcagaactagacaagttactctcttcatttaaaagtctgttagaagaaaaggagcaagcagagatacagatcaaagaagaatctaaaactgcagtggagatgcttcagaatcagttaaaggagctaaatgaggcagtagcagccttgtgtggtgaccaagaaattatgaaggccacagaacagagtctagacccaccaatagaggaagagcatcagctgagaaatagcattgaaaagctgagagcccgcctagaagctgatgaaaagaagcagctctgtgtcttacaacaactgaaggaaagtgagcatcatgcagatttacttaagggtagagtggagaaccttgaaagagagctagagatagccaggacaaaccaagagcatgcagctcttgaggcagagaattccaaaggagaggtagagaccctaaaagcaaaaatagaagggatgacccaaagtctgagaggtctggaattagatgttgttactataaggtcagaaaaagaagatctgacaaatgaattacaaaaagagcaagagcgaatatctgaattagaaataataaattcatcatttgaaaatattttgcaagaaaaagagcaagagaaagtacagatgaaagaaaaatcaagcactgccatggagatgcttcaaacacaattaaaagagctcaatgagagagtggcagccctgcataatgaccaagaagcctgtaaggccaaagagcagaatcttagtagtcaagtagagtgtcttgaacttgagaaggctcagttgctacaaggccttgatgaggccaaaaataattatattgttttgcaatcttcagtgaatggcctcattcaagaagtagaagatggcaagcagaaactggagaagaaggatgaagaaatcagtagactgaaaaatcaaattcaagaccaagagcagcttgtctctaaactgtcccaggtggaaggagagcaccaactttggaaggagcaaaacttagaactgagaaatctgacagtggaattggagcagaagatccaagtgctacaatccaaaaatgcctctttgcaggacacattagaagtgctgcagagttcttacaagaatctagagaatgagcttgaattgacaaaaatggacaaaatgtcctttgttgaaaaagtaaacaaaatgactgcaaaggaaactgagctgcagagggaaatgcatgagatggcacagaaaacagcagagctgcaagaagaactcagtggagagaaaaataggctagctggagagttgcagttactgttggaagaaataaagagcagcaaagatcaattgaaggagctcacactagaaaatagtgaattgaagaagagcctagattgcatgcacaaagaccaggtggaaaaggaagggaaagtgagagaggaaatagctgaatatcagctacggcttcatgaagctgaaaagaaacaccaggctttgcttttggacacaaacaaacagtatgaagtagaaatccagacataccgagagaaattgacttctaaagaagaatgtctcagttcacagaagctggagatagaccttttaaagtctagtaaagaagagctcaataattcattgaaagctactactcagattttggaagaattgaagaaaaccaagatggacaatctaaaatatgtaaatcagttgaagaaggaaaatgaacgtgcccaggggaaaatgaagttgttgatcaaatcctgtaaacagctggaagaggaaaaggagatactgcagaaagaactctctcaacttcaagctgcacaggagaagcagaaaacaggtactgttatggataccaaggtcgatgaattaacaactgagatcaaagaactgaaagaaactcttgaagaaaaaaccaaggaggcagatgaatacttggataagtactgttccttgcttataagccatgaaaagttagagaaagctaaagagatgttagagacacaagtggcccatctgtgttcacagcaatctaaacaagattcccgagggtctcctttgctaggtccagttgttccaggaccatctccaatcccttctgttactgaaaagaggttatcatctggccaaaataaagcttcaggcaagaggcaaagatccagtggaatatgggagaatggtggaggaccaacacctgctaccccagagagcttttctaaaaaaagcaagaaagcagtcatgagtggtattcaccctgcagaagacacggaaggtactgagtttgagccagagggacttccagaagttgtaaagaaagggtttgctgacatcccgacaggaaagactagcccatatatcctgcgaagaacaaccatggcaactcggaccagcccccgcctggctgcacagaagttagcgctatccccactgagtctcggcaaagaaaatcttgcagagtcctccaaaccaacagctggtggcagcagatcacaaaaggtcaaagttgctcagcggagcccagtagattcaggcaccatcctccgagaacccaccacgaaatccgtcccagtcaataatcttcctgagagaagtccgactgacagccccagagagggcctgagggtcaagcgaggccgacttgtccccagccccaaagctggactggagtccaagggcagtgagaactgtaaggtccagtgaaggcactttgtgtgtcagtacccctgggaggtgccagtcattgaatagataaggctgtgcctacaggacttctctttagtcagggcatgctttattagtgaggagaaaacaattccttagaagtcttaaatatattgtactctttagatctcccatgtgtaggtattgaaaaagtttggaagcactgatcacctgttagcattgccattcctctactgcaatgtaaatagtataaagctatgtatataaagctttttggtaatatgttacaattaaaatgacaagcactatatcacaatctctgtttgtatgtgggttttacactaaaaaaatgcaaaacacattttattcttctaattaacagctcctaggaaaatgtagacttttgctttatgatattctatctgtagtatgaggcatggaatagttttgtatcgggaatttctcagagctgagtaaaatgaaggaaaagcatgttatgtgtttttaaggaaaatgtgcacacatatacatgtaggagtgtttatctttctcttacaatctgttttagacatctttgcttatgaaacctgtacatatgtgtgtgtgggtatgtgtttatttccagtgagggctgcaggcttcctagaggtgtgctataccatgcgtctgtcgttgtgcttttttctgtttttagaccaattttttacagttctttggtaagcattgtcgtatctggtgatggattaacatatagcctttgttttctaataaaatagtcgccttcgttttctgtaa

SEQ ID NO: 315372 - DNA, 1893 bp, Homo sapiens
tacaatatatgaatcttatatcttataattatttttccatatgcttataaaaagaaattcaaggttttaaatggaattacttttattttgtagatggacaatctaaaatatgtaaatcagttgaagaaggaaaatgaacgtgcccaggggaaaatgaagttgttgatcaaatcctgtaaacagctggaagaggaaaaggagatactgcagaaagaactctctcaacttcaagctgcacaggagaagcagaaaacaggtactgttatggataccaaggtcgatgaattaacaactgagatcaaagaactgaaagaaactcttgaagaaaaaaccaaggaggcagatgaatacttggataagtactgttccttgcttataagccatgaaaagttagagaaagctaaagagatgttagagacacaagtggcccatctgtgttcacagcaatctaaacaagattcccgagggtctcctttgctaggtccagttgttccaggaccatctccaatcccttctgttactgaaaagaggttatcatctggccaaaataaagcttcaggcaagaggcaaagatccagtggaatatgggagaatggtggaggaccaacacctgctaccccagagagcttttctaaaaaaagcaagaaagcagtcatgagtggtattcaccctgcagaagacacggaaggtactgagtttgagccagagggacttccagaagttgtaaagaaagggtttgctgacatcccgacaggaaagactagcccatatatcctgcgaagaacaaccatggcaactcggaccagcccccgcctggctgcacagaagttagcgctatccccactgagtctcggcaaagaaaatcttgcagagtcctccaaaccaacagctggtggcagcagatcacaaaaggtcaaagttgctcagcggagcccagtagattcaggcaccatcctccgagaacccaccacgaaatccgtcccagtcaataatcttcctgagagaagtccgactgacagccccagagagggcctgagggtcaagcgaggccgacttgtccccagccccaaagctggactggagtccaagggcagtgagaactgtaaggtccagtgaaggcactttgtgtgtcagtacccctgggaggtgccagtcattgaatagataaggctgtgcctacaggacttctctttagtcagggcatgctttattagtgaggagaaaacaattccttagaagtcttaaatatattgtactctttagatctcccatgtgtaggtattgaaaaagtttggaagcactgatcacctgttagcattgccattcctctactgcaatgtaaatagtataaagctatgtatataaagctttttggtaatatgttacaattaaaatgacaagcactatatcacaatctctgtttgtatgtgggttttacactaaaaaaatgcaaaacacattttattcttctaattaacagctcctaggaaaatgtagacttttgctttatgatattctatctgtagtatgaggcatggaatagttttgtatcgggaatttctcagagctgagtaaaatgaaggaaaagcatgttatgtgtttttaaggaaaatgtgcacacatatacatgtaggagtgtttatctttctcttacaatctgttttagacatctttgcttatgaaacctgtacatatgtgtgtgtgggtatgtgtttatttccagtgagggctgcaggcttcctagaggtgtgctataccatgcgtctgtcgttgtgcttttttctgtttttagaccaattttttacagttctttggtaagcattgtcgtatctggtgatggattaacatatagcctttgttttctaataaaatagtcgccttcgttttctgtaa

SEQ ID NO: 315373 - DNA, 9817 bp, Homo sapiens
  misc_feature (9797)..(9797): n is a, c, g, or t
tgagaccagaagcgggcgaattgggcaccggtggcggctgcgggcagtttgaattagactctgggctccagcccgccgaagccgcgccagaactgtactctccgagaggtcgttttcccgtccccgagagcaagtttatttacaaatgttggagtaataaagaaggcagaacaaaatgagctgggctttggaagaatggaaagaagggctgcctacaagagctcttcagaaaattcaagagcttgaaggacagcttgacaaactgaagaaggaaaagcagcaaaggcagtttcagcttgacagtctcgaggctgcgctgcagaagcaaaaacagaaggttgaaaatgaaaaaaccgagggtacaaacctgaaaagggagaatcaaagattgatggaaatatgtgaaagtctggagaaaactaagcagaagatttctcatgaacttcaagtcaaggagtcacaagtgaatttccaggaaggacaactgaattcaggcaaaaaacaaatagaaaaactggaacaggaacttaaaaggtgtaaatctgagcttgaaagaagccaacaagctgcgcagtctgcagatgtctctctgaatccatgcaatacaccacaaaaaatttttacaactccactaacaccaagtcaatattatagtggttccaagtatgaagatctaaaagaaaaatataataaagaggttgaagaacgaaaaagattagaggcagaggttaaagccttgcaggctaaaaaagcaagccagactcttccacaagccaccatgaatcaccgcgacattgcccggcatcaggcttcatcatctgtgttctcatggcagcaagagaagaccccaagtcatctttcatctaattctcaaagaactccaattaggagagatttctctgcatcttacttttctggggaacaagaggtgactccaagtcgatcaactttgcaaatagggaaaagagatgctaatagcagtttctttgacaattctagcagtcctcatcttttggatcaattaaaagcgcagaatcaagagctaagaaacaagattaatgagttggaactacgcctgcaaggacatgaaaaagaaatgaaaggccaagtgaataagtttcaagaactccaactccaactggagaaagcaaaagtggaattaattgaaaaagagaaagttttgaacaaatgtagggatgaactagtgagaacaacagcacaatacgaccaggcgtcaaccaagtatactgcattggaacaaaaactgaaaaaattgacggaagatttgagttgtcagcgacaaaatgcagaaagtgccagatgttctctggaacagaaaattaaggaaaaagaaaaggagtttcaagaggagctctcccgtcaacagcgttctttccaaacactggaccaggagtgcatccagatgaaggccagactcacccaggagttacagcaagccaagaatatgcacaacgtcctgcaggctgaactggataaactcacatcagtaaagcaacagctagaaaacaatttggaagagtttaagcaaaagttgtgcagagctgaacaggcgttccaggcgagtcagatcaaggagaatgagctgaggagaagcatggaggaaatgaagaaggaaaacaacctccttaagagtcactctgagcaaaaggccagagaagtctgccacctggaggcagaactcaagaacatcaaacagtgtttaaatcagagccagaattttgcagaagaaatgaaagcgaagaatacctctcaggaaaccatgttaagagatcttcaagaaaaaaataaatcagcaagaaaactccttgactttagaaaaactgaagcttgctgtggctgatctggaaaagcagcgagattgttctcaagaccttttgaagaaaagagaacatcacattgaacaacttaatgataagttaagcaagacagagaaagagtccaaagccttgctgagtgctttagagttaaaaaagaaagaatatgaagaattgaaagaagagaaaactctgttttcttgttggaaaagtgaaaacgaaaaacttttaactcagatggaatcagaaaaggaaaacttgcagagtaaaattaatcacttggaaacttgtctgaagacacagcaaataaaaagtcatgaatacaacgagagagtaagaacgctggagatggacagagaaaacctaagtgtcgagatcagaaaccttcacaacgtgttagacagtaagtcagtggaggtagagacccagaaactagcttatatggagctacagcagaaagctgagttctcagatcagaaacatcagaaggaaatagaaaatatgtgtttgaagacttctcagcttactgggcaagttgaagatctagaacacaagcttcagttactgtcaaatgaaataatggacaaagaccggtgttaccaagacttgcatgccgaatatgagagcctcagggatctgctaaaatccaaagatgcttctctggtgacaaatgaagatcatcagagaagtcttttggcttttgatcagcagcctgccatgcatcattcctttgcaaatataattggagaacaaggaagcatgccttcagagaggagtgaatgtcgtttagaagcagaccaaagtccgaaaaattctgccatcctacaaaatagagttgattcacttgaattttcattagagtctcaaaaacagatgaactcagacctgcaaaagcagtgtgaagagttggtgcaaatcaaaggagaaatagaagaaaatctcatgaaagcagaacagatgcatcaaagttttgtggctgaaacaagtcagcgcattagtaagttacaggaagacacttctgctcaccagaatgttgttgctgaaaccttaagtgcccttgagaacaaggaaaaagagctgcaacttttaaatgataaggtagaaactgagcaggcagagattcaagaattaaaaaagagcaaccatctacttgaagactctctaaaggagctacaacttttatccgaaaccctaagcttggagaagaaagaaatgagttccatcatttctctaaataaaagggaaattgaagagctgacccaagagaatgggactcttaaggaaattaatgcatccttaaatcaagagaagatgaacttaatccagaaaagtgagagttttgcaaactatatagatgaaagggagaaaagcatttcagagttatctgatcagtacaagcaagaaaaacttattttactacaaagatgtgaagaaaccggaaatgcatatgaggatcttagtcaaaaatacaaagcagcacaggaaaagaattctaaattagaatgcttgctaaatgaatgcactagtctttgtgaaaataggaaaaatgagttggaacagctaaaggaagcatttgcaaaggaacaccaagaattcttaacaaaattagcatttgctgaagaaagaaatcagaatctgatgctagagttggagacagtgcagcaagctctgagatctgagatgacagataaccaaaacaattctaagagcgaggctggtggtttaaagcaagaaatcatgactttaaaggaagaacaaaacaaaatgcaaaaggaagttaatgacttattacaagagaatgaacagctgatgaaggtaatgaagactaaacatgaatgtcaaaatctagaatcagaaccaattaggaactctgtgaaagaaagagagagtgagagaaatcaatgtaattttaaacctcagatggatcttgaagttaaagaaatttctctagatagttataatgcgcagttggtgcaattagaagctatgctaagaaataaggaattaaaacttcaggaaagtgagaaggagaaggagtgcctgcagcatgaattacagacaattagaggagatcttgaaaccagcaatttgcaagacatgcagtcacaagaaattagtggccttaaagactgtgaaatagatgcggaagaaaagtatatttcagggcctcatgagttgtcaacaagtcaaaacgacaatgcacaccttcagtgctctctgcaaacaacaatgaacaagctgaatgagctagagaaaatatgtgaaatactgcaggctgaaaagtatgaactcgtaactgagctgaatgattcaaggtcagaatgtatcacagcaactaggaaaatggcagaagaggtagggaaactactaaatgaagttaaaatattaaatgatgacagtggtcttctccatggtgagttagtggaagacataccaggaggtgaatttggtgaacaaccaaatgaacagcaccctgtgtctttggctccattggacgagagtaattcctacgagcacttgacattgtcagacaaagaagttcaaatgcactttgccgaattgcaagagaaattcttatctttacaaagtgaacacaaaattttacatgatcagcactgtcagatgagctctaaaatgtcagagctgcagacctatgttgactcattaaaggccgaaaatttggtcttgtcaacgaatctgagaaactttcaaggtgacttggtgaaggagatgcagctgggcttggaggaggggctcgttccatccctgtcatcctcttgtgtgcctgacagctctagtcttagcagtttgggagactcctccttttacagagctcttttagaacagacaggagatatgtctcttttgagtaatttagaaggggctgtttcagcaaaccagtgcagtgtagatgaagtattttgcagcagtctgcaggaggagaatctgaccaggaaagaaaccccttcggccccagcgaagggtgttgaagagcttgagtccctctgtgaggtgtaccggcagtccctcgagaagctagaagagaaaatggaaagtcaagggattatgaaaaataaggaaattcaagagctcgagcagttattaagttctgaaaggcaagagcttgactgccttaggaagcagtatttgtcagaaaatgaacagtggcaacagaagctgacaagcgtgactctggagatggagtccaagttggcggcagaaaagaaacagacggaacaactgtcacttgagctggaagtagcacgactccagctacaaggtctggacttaagttctcggtctttgcttggcatcgacacagaagatgctattcaaggccgaaatgagagctgtgacatatcaaaagaacatacttcagaaactacagaaagaacaccaaagcatgatgttcatcagatttgtgataaagatgctcagcaggacctcaatctagacattgagaaaataactgagactggtgcagtgaaacccacaggagagtgctctggggaacagtccccagataccaattatgagcctccaggggaagataaaacccagggctcttcagaatgcatttctgaattgtcattttctggtcctaatgctttggtacctatggatttcctggggaatcaggaagatatccataatcttcaactgcgggtaaaagagacatcaaatgagaatttgagattacttcatgtgatagaggaccgtgacagaaaagttgaaagtttgctaaatgaaatgaaagaattagactcaaaactccatttacaggaggtacaactaatgaccaaaattgaagcatgcatagaattggaaaaaatagttggggaacttaagaaagaaaactcagatttaagtgaaaaattggaatatttttcttgtgatcaccaggagttactccagagagtagaaacttctgaaggcctcaattctgatttagaaatgcatgcagataaatcatcacgtgaagatattggagataatgtggccaaggtgaatgacagctggaaggagagatttcttgatgtggaaaatgagctgagtaggatcagatcggagaaagctagcattgagcatgaagccctctacctggaggctgacttagaggtagttcaaacagagaagctatgtttagaaaaagacaatgaaaataagcagaaggttattgtctgccttgaagaagaactctcagtggtcacaagtgagagaaaccagcttcgtggagaattagatactatgtcaaaaaaaaccacggcactggatcagttgtctgaaaaaatgaaggagaaaacacaagagcttgagtctcatcaaagtgagtgtctccattgcattcaggtggcagaggcagaggtgaaggaaaagacggaactccttcagactttgtcctctgatgtgagtgagctgttaaaagacaaaactcatctccaggaaaagctgcagagtttggaaaaggactcacaggcactgtctttgacaaaatgtgagctggaaaaccaaattgcacaactgaataaagagaaagaattgcttgtcaaggaatctgaaagcctgcaggccagactgagtgaatcagattatgaaaagctgaatgtctccaaggccttggaggccgcactggtggagaaaggtgagttcgcattgaggctgagctcaacacaggaggaagtgcatcagctgagaagaggcatcgagaaactgagagttcgcattgaggccgatgaaaagaagcagctgcacatcgcagagaaactgaaagaacgcgagcgggagaatgattcacttaaggataaagttgagaaccttgaaagggaattgcagatgtcagaagaaaaccaggagctagtgattcttgatgccgagaattccaaagcagaagtagagactctaaaaacacaaatagaagagatggccagaagcctgaaagtttttgaattagaccttgtcacgttaaggtctgaaaaagaaaatctgacaaaacaaatacaagaaaaacaaggtcagttgtcagaactagacaagttactctcttcatttaaaagtctgttagaagaaaaggagcaagcagagatacagatcaaagaagaatctaaaactgcagtggagatgcttcagaatcagttaaaggagctaaatgaggcagtagcagccttgtgtggtgaccaagaaattatgaaggccacagaacagagtctagacccaccaatagaggaagagcatcagctgagaaatagcattgaaaagctgagagcccgcctagaagctgatgaaaagaagcagctctgtgtcttacaacaactgaaggaaagtgagcatcatgcagatttacttaagggtagagtggagaaccttgaaagagagctagagatagccaggacaaaccaagagcatgcagctcttgaggcagagaattccaaaggagaggtagagaccctaaaagcaaaaatagaagggatgacccaaagtctgagaggtctggaattagatgttgttactataaggtcagaaaaagaagatctgacaaatgaattacaaaaagagcaagagcgaatatctgaattagaaataataaattcatcatttgaaaatattttgcaagaaaaagagcaagagaaagtacagatgaaagaaaaatcaagcactgccatggagatgcttcaaacacaattaaaagagctcaatgagagagtggcagccctgcataatgaccaagaagcctgtaaggccaaagagcagaatcttagtagtcaagtagagtgtcttgaacttgagaaggctcagttgctacaaggccttgatgaggccaaaaataattatattgttttgcaatcttcagtgaatggcctcattcaagaagtagaagatggcaagcagaaactggagaagaaggatgaagaaatcagtagactgaaaaatcaaattcaagaccaagagcagcttgtctctaaactgtcccaggtggaaggagagcaccaactttggaaggagcaaaacttagaactgagaaatctgacagtggaattggagcagaagatccaagtgctacaatccaaaaatgcctctttgcaggacacattagaagtgctgcagagttcttacaagaatctagagaatgagcttgaattgacaaaaatggacaaaatgtcctttgttgaaaaagtaaacaaaatgactgcaaaggaaactgagctgcagagggaaatgcatgagatggcacagaaaacagcagagctgcaagaagaactcagtggagagaaaaataggctagctggagagttgcagttactgttggaagaaataaagagcagcaaagatcaattgaaggagctcacactagaaaatagtgaattgaagaagagcctagattgcatgcacaaagaccaggtggaaaaggaagggaaagtgagagaggaaatagctgaatatcagctacggcttcatgaagctgaaaagaaacaccaggctttgcttttggacacaaacaaacagtatgaagtagaaatccagacataccgagagaaattgacttctaaagaagaatgtctcagttcacagaagctggagatagaccttttaaagtctagtaaagaagagctcaataattcattgaaagctactactcagattttggaagaattgaagaaaaccaagatggacaatctaaaatatgtaaatcagttgaagaaggaaaatgaacgtgcccaggggaaaatgaagttgttgatcaaatcctgtaaacagctggaagaggaaaaggagatactgcagaaagaactctctcaacttcaagctgcacaggagaagcagaaaacaggtactgttatggataccaaggtcgatgaattaacaactgagatcaaagaactgaaagaaactcttgaagaaaaaaccaaggaggcagatgaatacttggataagtactgttccttgcttataagccatgaaaagttagagaaagctaaagagatgttagagacacaagtggcccatctgtgttcacagcaatctaaacaagattcccgagggtctcctttgctaggtccagttgttccaggaccatctccaatcccttctgttactgaaaagaggttatcatctggccaaaataaagcttcaggcaagaggcaaagatccagtggaatatgggagaatggtggaggaccaacacctgctaccccagagagcttttctaaaaaaagcaagaaagcagtcatgagtggtattcaccctgcagaagacacggaaggtactgagtttgagccagagggacttccagaagttgtaaagaaagggtttgctgacatcccgacaggaaagactagcccatatatcctgcgaagaacaaccatggcaactcggaccagcccccgcctggctgcacagaagttagcgctatccccactgagtctcggcaaagaaaatcttgcagagtcctccaaaccaacagctggtggcagcagatcacaaaaggtcaaagttgctcagcggagcccagtagattcaggcaccatcctccgagaacccaccacgaaatccgtcccagtcaataatcttcctgagagaagtccgactgacagccccagagagggcctgagggtcaagcgaggccgacttgtccccagccccaaagctggactggagtccaagggcagtgagaactgtaaggtccagtgaaggcactttgtgtgtcagtacccctgggaggtgccagtcattgaatagataaggctgtgcctacaggacttctctttagtcagggcatgctttattagtgaggagaaaacaattccttagaagtcttaaatatattgtactctttagatctcccatgtgtaggggtgtataccaccaccactacttgggaggctgaggtgggaggattgcttgagtctgggagatcaaggctgcagtaagctgtgatggatcactgcactctagcctgggtgagangggaccctgtctccaaaaat

SEQ ID NO: 315374 - DNA, 9433 bp, Homo sapiens
  misc_feature (8659)..(8659): n is a, c, g, or t
  misc_feature (8733)..(8733): n is a, c, g, or t
  misc_feature (8948)..(8948): n is a, c, g, or t
tgagaccagaagcgggcgaattgggcaccggtggcggctgcgggcagtttgaattagactctgggctccagcccgccgaagccgcgccagaactgtactctccgagaggtcgttttcccgtccccgagagcaagtttatttacaaatgttggagtaataaagaaggcagaacaaaatgagctgggctttggaagaatggaaagaagggctgcctacaagagctcttcagaaaattcaagagcttgaaggacagcttgacaaactgaagaaggaaaagcagcaaaggcagtttcagcttgacagtctcgaggctgcgctgcagaagcaaaaacagaaggttgaaaatgaaaaaaccgagggtacaaacctgaaaagggagaatcaaagattgatggaaatatgtgaaagtctggagaaaactaagcagaagatttctcatgaacttcaagtcaaggagtcacaagtgaatttccaggaaggacaactgaattcaggcaaaaaacaaatagaaaaactggaacaggaacttaaaaggtgtaaatctgagcttgaaagaagccaacaagctgcgcagtctgcagatgtctctctgaatccatgcaatacaccacaaaaaatttttacaactccactaacaccaagtcaatattatagtggttccaagtatgaagatctaaaagaaaaatataataaagaggttgaagaacgaaaaagattagaggcagaggttaaagccttgcaggctaaaaaagcaagccagactcttccacaagccaccatgaatcaccgcgacattgcccggcatcaggcttcatcatctgtgttctcatggcagcaagagaagaccccaagtcatctttcatctaattctcaaagaactccaattaggagagatttctctgcatcttacttttctggggaacaagaggtgactccaagtcgatcaactttgcaaatagggaaaagagatgctaatagcagtttctttgacaattctagcagtcctcatcttttggatcaattaaaagcgcagaatcaagagctaagaaacaagattaatgagttggaactacgcctgcaaggacatgaaaaagaaatgaaaggccaagtgaataagtttcaagaactccaactccaactggagaaagcaaaagtggaattaattgaaaaagagaaagttttgaacaaatgtagggatgaactagtgagaacaacagcacaatacgaccaggcgtcaaccaagtatactgcattggaacaaaaactgaaaaaattgacggaagatttgagttgtcagcgacaaaatgcagaaagtgccagatgttctctggaacagaaaattaaggaaaaagaaaaggagtttcaagaggagctctcccgtcaacagcgttctttccaaacactggaccaggagtgcatccagatgaaggccagactcacccaggagttacagcaagccaagaatatgcacaacgtcctgcaggctgaactggataaactcacatcagtaaagcaacagctagaaaacaatttggaagagtttaagcaaaagttgtgcagagctgaacaggcgttccaggcgagtcagatcaaggagaatgagctgaggagaagcatggaggaaatgaagaaggaaaacaacctccttaagagtcactctgagcaaaaggccagagaagtctgccacctggaggcagaactcaagaacatcaaacagtgtttaaatcagagccagaattttgcagaagaaatgaaagcgaagaatacctctcaggaaaccatgttaagagatcttcaagaaaaaaataaatcagcaagaaaactccttgactttagaaaaactgaagcttgctgtggctgatctggaaaagcagcgagattgttctcaagaccttttgaagaaaagagaacatcacattgaacaacttaatgataagttaagcaagacagagaaagagtccaaagccttgctgagtgctttagagttaaaaaagaaagaatatgaagaattgaaagaagagaaaactctgttttcttgttggaaaagtgaaaacgaaaaacttttaactcagatggaatcagaaaaggaaaacttgcagagtaaaattaatcacttggaaacttgtctgaagacacagcaaataaaaagtcatgaatacaacgagagagtaagaacgctggagatggacagagaaaacctaagtgtcgagatcagaaaccttcacaacgtgttagacagtaagtcagtggaggtagagacccagaaactagcttatatggagctacagcagaaagctgagttctcagatcagaaacatcagaaggaaatagaaaatatgtgtttgaagacttctcagcttactgggcaagttgaagatctagaacacaagcttcagttactgtcaaatgaaataatggacaaagaccggtgttaccaagacttgcatgccgaatatgagagcctcagggatctgctaaaatccaaagatgcttctctggtgacaaatgaagatcatcagagaagtcttttggcttttgatcagcagcctgccatgcatcattcctttgcaaatataattggagaacaaggaagcatgccttcagagaggagtgaatgtcgtttagaagcagaccaaagtccgaaaaattctgccatcctacaaaatagagttgattcacttgaattttcattagagtctcaaaaacagatgaactcagacctgcaaaagcagtgtgaagagttggtgcaaatcaaaggagaaatagaagaaaatctcatgaaagcagaacagatgcatcaaagttttgtggctgaaacaagtcagcgcattagtaagttacaggaagacacttctgctcaccagaatgttgttgctgaaaccttaagtgcccttgagaacaaggaaaaagagctgcaacttttaaatgataaggtagaaactgagcaggcagagattcaagaattaaaaaagagcaaccatctacttgaagactctctaaaggagctacaacttttatccgaaaccctaagcttggagaagaaagaaatgagttccatcatttctctaaataaaagggaaattgaagagctgacccaagagaatgggactcttaaggaaattaatgcatccttaaatcaagagaagatgaacttaatccagaaaagtgagagttttgcaaactatatagatgaaagggagaaaagcatttcagagttatctgatcagtacaagcaagaaaaacttattttactacaaagatgtgaagaaaccggaaatgcatatgaggatcttagtcaaaaatacaaagcagcacaggaaaagaattctaaattagaatgcttgctaaatgaatgcactagtctttgtgaaaataggaaaaatgagttggaacagctaaaggaagcatttgcaaaggaacaccaagaattcttaacaaaattagcatttgctgaagaaagaaatcagaatctgatgctagagttggagacagtgcagcaagctctgagatctgagatgacagataaccaaaacaattctaagagcgaggctggtggtttaaagcaagaaatcatgactttaaaggaagaacaaaacaaaatgcaaaaggaagttaatgacttattacaagagaatgaacagctgatgaaggtaatgaagactaaacatgaatgtcaaaatctagaatcagaaccaattaggaactctgtgaaagaaagagagagtgagagaaatcaatgtaattttaaacctcagatggatcttgaagttaaagaaatttctctagatagttataatgcgcagttggtgcaattagaagctatgctaagaaataaggaattaaaacttcaggaaagtgagaaggagaaggagtgcctgcagcatgaattacagacaattagaggagatcttgaaaccagcaatttgcaagacatgcagtcacaagaaattagtggccttaaagactgtgaaatagatgcggaagaaaagtatatttcagggcctcatgagttgtcaacaagtcaaaacgacaatgcacaccttcagtgctctctgcaaacaacaatgaacaagctgaatgagctagagaaaatatgtgaaatactgcaggctgaaaagtatgaactcgtaactgagctgaatgattcaaggtcagaatgtatcacagcaactaggaaaatggcagaagaggtagggaaactactaaatgaagttaaaatattaaatgatgacagtggtcttctccatggtgagttagtggaagacataccaggaggtgaatttggtgaacaaccaaatgaacagcaccctgtgtctttggctccattggacgagagtaattcctacgagcacttgacattgtcagacaaagaagttcaaatgcactttgccgaattgcaagagaaattcttatctttacaaagtgaacacaaaattttacatgatcagcactgtcagatgagctctaaaatgtcagagctgcagacctatgttgactcattaaaggccgaaaatttggtcttgtcaacgaatctgagaaactttcaaggtgacttggtgaaggagatgcagctgggcttggaggaggggctcgttccatccctgtcatcctcttgtgtgcctgacagctctagtcttagcagtttgggagactcctccttttacagagctcttttagaacagacaggagatatgtctcttttgagtaatttagaaggggctgtttcagcaaaccagtgcagtgtagatgaagtattttgcagcagtctgcaggaggagaatctgaccaggaaagaaaccccttcggccccagcgaagggtgttgaagagcttgagtccctctgtgaggtgtaccggcagtccctcgagaagctagaagagaaaatggaaagtcaagggattatgaaaaataaggaaattcaagagctcgagcagttattaagttctgaaaggcaagagcttgactgccttaggaagcagtatttgtcagaaaatgaacagtggcaacagaagctgacaagcgtgactctggagatggagtccaagttggcggcagaaaagaaacagacggaacaactgtcacttgagctggaagtagcacgactccagctacaaggtctggacttaagttctcggtctttgcttggcatcgacacagaagatgctattcaaggccgaaatgagagctgtgacatatcaaaagaacatacttcagaaactacagaaagaacaccaaagcatgatgttcatcagatttgtgataaagatgctcagcaggacctcaatctagacattgagaaaataactgagactggtgcagtgaaacccacaggagagtgctctggggaacagtccccagataccaattatgagcctccaggggaagataaaacccagggctcttcagaatgcatttctgaattgtcattttctggtcctaatgctttggtacctatggatttcctggggaatcaggaagatatccataatcttcaactgcgggtaaaagagacatcaaatgagaatttgagattacttcatgtgatagaggaccgtgacagaaaagttgaaagtttgctaaatgaaatgaaagaattagactcaaaactccatttacaggaggtacaactaatgaccaaaattgaagcatgcatagaattggaaaaaatagttggggaacttaagaaagaaaactcagatttaagtgaaaaattggaatatttttcttgtgatcaccaggagttactccagagagtagaaacttctgaaggcctcaattctgatttagaaatgcatgcagataaatcatcacgtgaagatattggagataatgtggccaaggtgaatgacagctggaaggagagatttcttgatgtggaaaatgagctgagtaggatcagatcggagaaagctagcattgagcatgaagccctctacctggaggctgacttagaggtagttcaaacagagaagctatgtttagaaaaagacaatgaaaataagcagaaggttattgtctgccttgaagaagaactctcagtggtcacaagtgagagaaaccagcttcgtggagaattagatactatgtcaaaaaaaaccacggcactggatcagttgtctgaaaaaatgaaggagaaaacacaagagcttgagtctcatcaaagtgagtgtctccattgcattcaggtggcagaggcagaggtgaaggaaaagacggaactccttcagactttgtcctctgatgtgagtgagctgttaaaagacaaaactcatctccaggaaaagctgcagagtttggaaaaggactcacaggcactgtctttgacaaaatgtgagctggaaaaccaaattgcacaactgaataaagagaaagaattgcttgtcaaggaatctgaaagcctgcaggccagactgagtgaatcagattatgaaaagctgaatgtctccaaggccttggaggccgcactggtggagaaaggtgagttcgcattgaggctgagctcaacacaggaggaagtgcatcagctgagaagaggcatcgagaaactgagagttcgcattgaggccgatgaaaagaagcagctgcacatcgcagagaaactgaaagaacgcgagcgggagaatgattcacttaaggataaagttgagaaccttgaaagggaattgcagatgtcagaagaaaaccaggagctagtgattcttgatgccgagaattccaaagcagaagtagagactctaaaaacacaaatagaagagatggccagaagcctgaaagtttttgaattagaccttgtcacgttaaggtctgaaaaagaaaatctgacaaaacaaatacaagaaaaacaaggtcagttgtcagaactagacaagttactctcttcatttaaaagtctgttagaagaaaaggagcaagcagagatacagatcaaagaagaatctaaaactgcagtggagatgcttcagaatcagttaaaggagctaaatgaggcagtagcagccttgtgtggtgaccaagaaattatgaaggccacagaacagagtctagacccaccaatagaggaagagcatcagctgagaaatagcattgaaaagctgagagcccgcctagaagctgatgaaaagaagcagctctgtgtcttacaacaactgaaggaaagtgagcatcatgcagatttacttaagggtagagtggagaaccttgaaagagagctagagatagccaggacaaaccaagagcatgcagctcttgaggcagagaattccaaaggagaggtagagaccctaaaagcaaaaatagaagggatgacccaaagtctgagaggtctggaattagatgttgttactataaggtcagaaaaagaagatctgacaaatgaattacaaaaagagcaagagcgaatatctgaattagaaataataaattcatcatttgaaaatattttgcaagaaaaagagcaagagaaagtacagatgaaagaaaaatcaagcactgccatggagatgcttcaaacacaattaaaagagctcaatgagagagtggcagccctgcataatgaccaagaagcctgtaaggccaaagagcagaatcttagtagtcaagtagagtgtcttgaacttgagaaggctcagttgctacaaggccttgatgaggccaaaaataattatattgttttgcaatcttcagtgaatggcctcattcaagaagtagaagatggcaagcagaaactggagaagaaggatgaagaaatcagtagactgaaaaatcaaattcaagaccaagagcagcttgtctctaaactgtcccaggtggaaggagagcaccaactttggaaggagcaaaacttagaactgagaaatctgacagtggaattggagcagaagatccaagtgctacaatccaaaaatgcctctttgcaggacacattagaagtgctgcagagttcttacaagaatctagagaatgagcttgaattgacaaaaatggacaaaatgtcctttgttgaaaaagtaaacaaaatgactgcaaaggaaactgagctgcagagggaaatgcatgagatggcacagaaaacagcagagctgcaagaagaactcagtggagagaaaaataggctagctggagagttgcagttactgttggaagaaataaagagcagcaaagatcaattgaaggagctcacactagaaaatagtgaattgaagaagagcctagattgcatgcacaaagaccaggtggaaaaggaagggaaagtgagagaggaaatagctgaatatcagctacggcttcatgaagctgaaaagaaacaccaggctttgcttttggacacaaacaaacagtatgaagtagaaatccagacataccgagagaaattgacttctaaagaagaatgtctcagttcacagaagctggagatagaccttttaaagtctagtaaagaagagctcaataattcattgaaagctactactcagattttggaagaattgaagaaaaccaaggaacaatgaaggtgaaccctagtctcaggattgctagtctcaagatggtaccactgtaattctacctggaaaaggaggtgttttcattcctacagatatttttcataagataaatacccacagtgtatagtaatgaacctggataataaatatcttccagnaaatattttacttagaagacgattatattttttaaattttgagattaattgaatatatacaaacagaaaattangtacaaatttattatgtttatggctcttatacaactatcaaggtaaaggaaatttaccaattaaatacaaagtagtaaaattcaaaatcacaataattaataatgttctgctgctacaaaatgagatgttgggtttaataatagaaggaagtagcactgttgaaatagaattaaatgggtcttgaattcatttgtgattggaatcagaagtcgcnagttctgaaagggtaaggtttactgcaacattgctaataaataatttcaagatgaaatatacaaagatgagatccaagctctaacatttacttgcaacatgaatatggtactgtgttcttctccgtcccccatcctcattccccctcctcctcctgctgctgtttggtcttcctttggaaattcatgatgccatatcagatggttttagaattctgcactttaataatgtaatgcatatgccatatataatatcccagagggatctgctataatattgcataatcgaattcatatttctgcagcaaaatgtgtggatactctcacaaggcaggataaatagagactatatatactgggccaggtgtggtgactcatgcctagaatcccagcactttgggaggccagggcaggaggatcacttgagaccaggaatttgagaccagcctgggcaacatagtgagacctcatctcttaaaaaaaaaaa

SEQ ID NO: 315375 - DNA, 970 bp, Homo sapiens
  misc_feature (20)..(20): n is a, c, g, or t
  misc_feature (68)..(68): n is a, c, g, or t
  misc_feature (350)..(350): n is a, c, g, or t
  misc_feature (352)..(352): n is a, c, g, or t
  misc_feature (354)..(354): n is a, c, g, or t
aaattcccgatttttttttnaaaaagcaatgcatgagataatagcaaattccatattgcctactatcnaatgtacctaacaaaaagtggctttgttaggcatttggaaaataatttatttactgaagaactattacttttaattgttccttacccgactcgaaagagtcccataataccctgccttaggtacggaaaattagaccctggtgtggtgactcacatctgtagtcccagcacattttggggccaaggtgggaggatcacttgagccccaggagttccagacaagcctgggaaacatacggatactgcatctctacaaaaaatttacaggaaaaaattatctgngngntgggtgtataccaccaccactacttgggaggctgttagcattgccattcctctactgcaatgtaaatagtataaagctatgtatataaagctttttggtaatatgttacaattaaaatgacaagcactatatcacaatctctgtttgtatgtgggttttacactaaaaaaatgcaaaacacattttattcttctaattaacagctcctaggaaaatgtagacttttgctttatgatattctatctgtagtatgaggcatggaatagttttgtatcgggaatttctcagagctgagtaaaatgaaggaaaagcatgttatgtgtttttaaggaaaatgtgcacacatatacatgtaggagtgtttatctttctcttacaatctgttttagacatctttgcttatgaaacctgtacatatgtgtgtgtgggtatgtgtttatttccagtgagggctgcaggcttcctagaggtgtgctataccatgcgtctgtcgttgtgcttttttctgtttttagaccaattttttacagttctttggtaagcattgtcgtatctggtgatggattaacatatagcctttgttttctaataaaatagtcgccttcgttttctgtaa

SEQ ID NO: 315376 - DNA, 570 bp, Homo sapiens
ccatatatcctgcgaagaacaaccatggcaactcggaccagcccccgcctggctgcacagaagttagcgctatccccactgagtctcggcaaagaaaatcttgcagagtcctccaaaccaacagctggtggcagcagatcacaaaaggtaaactactgtcaacatccgtctactgtttgagatccagaaaattgcagtagtacctgggtgaggattggacactgcacccccgattcaggagcgctttcaaaaagtctgaccttcttggtgtggtgtaagtcagtcagtagtgagcaagtgaccgggtgagcattacagtatcagggtacatgatctcatccttcagtcaacaggccgcttatatgtagtttgatggaaaatggcattgttacatcaaaactcagtggatttctaagaaagtttcaggcgttactgatgaaggatttgaagaggtaattttccctttcgccactggtattagtcattgtttgtttcaaactttactctcacttatctgcccccagctgctaattctttattgtttttattaatcctttactttcttaaaaa

SEQ ID NO: 315377 - DNA, 2114 bp, Homo sapiens
  misc_feature (1340)..(1340): n is a, c, g, or t
  misc_feature (1414)..(1414): n is a, c, g, or t
  misc_feature (1629)..(1629): n is a, c, g, or t
ctggccacagtatgaggtgttttctaaggcttgacattaggtatttcctagtgcaaaatttactgatcccgcgtaggctccaacctagagccaggattccttaatggaacacaaactgatttactttgaatatactcaagcttcacagcaaacacttcctgtttctattactgtccaagtcttcttaccatgcctgaggcagacaatttaaggcttgattcctcaccctttcccttcatctgctgaaatcccatttagttttagtgcaccaggcatgcactggtatttcatcctatgcattccttccacagcctgacctataaagggctgacactgagtcctggcttgttcagatcagagagaattaacacttttatttctttgatttcaaaagcttctgaggtaacttttgagctcgtaaatgtcaataatttgttgtcaagacaattatattcttaacccagctgctacatatagggaacatagagactgacagaaagtcagtgaatttagaattaaaacagtaagtttatctgattgactatgcttctcaaaatgtaaatggatgatacaaattaatacaaccaattcattttatttggtttggttttggtttttgaatgggtttatgggtttaagagacattgctctctgttgtttatgtgtattcagtgtcagaaaggaaaagtaaacaaaatgactgcaaaggaaactgagctgcagagggaaatgcatgagatggcacagaaaacagcagagctgcaagaagaactcagtggagagaaaaataggctagctggagagttgcagttactgttggaagaaataaagagcagcaaagatcaattgaaggagctcacactagaaaatagtgaattgaagaagagcctagattgcatgcacaaagaccaggtggaaaaggaagggaaagtgagagaggaaatagctgaatatcagctacggcttcatgaagctgaaaagaaacaccaggctttgcttttggacacaaacaaacagtatgaagtagaaatccagacataccgagagaaattgacttctaaagaagaatgtctcagttcacagaagctggagatagaccttttaaagtctagtaaagaagagctcaataattcattgaaagctactactcagattttggaagaattgaagaaaaccaaggaacaatgaaggtgaaccctagtctcaggattgctagtctcaagatggtaccactgtaattctacctggaaaaggaggtgttttcattcctacagatatttttcataagataaatacccacagtgtatagtaatgaacctggataataaatatcttccagnaaatattttacttagaagacgattatattttttaaattttgagattaattgaatatatacaaacagaaaattangtacaaatttattatgtttatggctcttatacaactatcaaggtaaaggaaatttaccaattaaatacaaagtagtaaaattcaaaatcacaataattaataatgttctgctgctacaaaatgagatgttgggtttaataatagaaggaagtagcactgttgaaatagaattaaatgggtcttgaattcatttgtgattggaatcagaagtcgcnagttctgaaagggtaaggtttactgcaacattgctaataaataatttcaagatgaaatatacaaagatgagatccaagctctaacatttacttgcaacatgaatatggtactgtgttcttctccgtcccccatcctcattccccctcctcctcctgctgctgtttggtcttcctttggaaattcatgatgccatatcagatggttttagaattctgcactttaataatgtaatgcatatgccatatataatatcccagagggatctgctataatattgcataatcgaattcatatttctgcagcaaaatgtgtggatactctcacaaggcaggataaatagagactatatatactgggccaggtgtggtgactcatgcctagaatcccagcactttgggaggccagggcaggaggatcacttgagaccaggaatttgagaccagcctgggcaacatagtgagacctcatctcttaaaaaaaaaaa

SEQ ID NO: 315378 - DNA, 10298 bp, Homo sapiens
tgagaccagaagcgggcgaattgggcaccggtggcggctgcgggcagtttgaattagactctgggctccagcccgccgaagccgcgccagaactgtactctccgagaggtcgttttcccgtccccgagagcaagtttatttacaaatgttggagtaataaagaaggcagaacaaaatgagctgggctttggaagaatggaaagaagggctgcctacaagagctcttcagaaaattcaagagcttgaaggacagcttgacaaactgaagaaggaaaagcagcaaaggcagtttcagcttgacagtctcgaggctgcgctgcagaagcaaaaacagaaggttgaaaatgaaaaaaccgagggtacaaacctgaaaagggagaatcaaagattgatggaaatatgtgaaagtctggagaaaactaagcagaagatttctcatgaacttcaagtcaaggagtcacaagtgaatttccaggaaggacaactgaattcaggcaaaaaacaaatagaaaaactggaacaggaacttaaaaggtgtaaatctgagcttgaaagaagccaacaagctgcgcagtctgcagatgtctctctgaatccatgcaatacaccacaaaaaatttttacaactccactaacaccaagtcaatattatagtggttccaagtatgaagatctaaaagaaaaatataataaagaggttgaagaacgaaaaagattagaggcagaggttaaagccttgcaggctaaaaaagcaagccagactcttccacaagccaccatgaatcaccgcgacattgcccggcatcaggcttcatcatctgtgttctcatggcagcaagagaagaccccaagtcatctttcatctaattctcaaagaactccaattaggagagatttctctgcatcttacttttctggggaacaagaggtgactccaagtcgatcaactttgcaaatagggaaaagagatgctaatagcagtttctttgacaattctagcagtcctcatcttttggatcaattaaaagcgcagaatcaagagctaagaaacaagattaatgagttggaactacgcctgcaaggacatgaaaaagaaatgaaaggccaagtgaataagtttcaagaactccaactccaactggagaaagcaaaagtggaattaattgaaaaagagaaagttttgaacaaatgtagggatgaactagtgagaacaacagcacaatacgaccaggcgtcaaccaagtatactgcattggaacaaaaactgaaaaaattgacggaagatttgagttgtcagcgacaaaatgcagaaagtgccagatgttctctggaacagaaaattaaggaaaaagaaaaggagtttcaagaggagctctcccgtcaacagcgttctttccaaacactggaccaggagtgcatccagatgaaggccagactcacccaggagttacagcaagccaagaatatgcacaacgtcctgcaggctgaactggataaactcacatcagtaaagcaacagctagaaaacaatttggaagagtttaagcaaaagttgtgcagagctgaacaggcgttccaggcgagtcagatcaaggagaatgagctgaggagaagcatggaggaaatgaagaaggaaaacaacctccttaagagtcactctgagcaaaaggccagagaagtctgccacctggaggcagaactcaagaacatcaaacagtgtttaaatcagagccagaattttgcagaagaaatgaaagcgaagaatacctctcaggaaaccatgttaagagatcttcaagaaaaaaataaatcagcaagaaaactccttgactttagaaaaactgaagcttgctgtggctgatctggaaaagcagcgagattgttctcaagaccttttgaagaaaagagaacatcacattgaacaacttaatgataagttaagcaagacagagaaagagtccaaagccttgctgagtgctttagagttaaaaaagaaagaatatgaagaattgaaagaagagaaaactctgttttcttgttggaaaagtgaaaacgaaaaacttttaactcagatggaatcagaaaaggaaaacttgcagagtaaaattaatcacttggaaacttgtctgaagacacagcaaataaaaagtcatgaatacaacgagagagtaagaacgctggagatggacagagaaaacctaagtgtcgagatcagaaaccttcacaacgtgttagacagtaagtcagtggaggtagagacccagaaactagcttatatggagctacagcagaaagctgagttctcagatcagaaacatcagaaggaaatagaaaatatgtgtttgaagacttctcagcttactgggcaagttgaagatctagaacacaagcttcagttactgtcaaatgaaataatggacaaagaccggtgttaccaagacttgcatgccgaatatgagagcctcagggatctgctaaaatccaaagatgcttctctggtgacaaatgaagatcatcagagaagtcttttggcttttgatcagcagcctgccatgcatcattcctttgcaaatataattggagaacaaggaagcatgccttcagagaggagtgaatgtcgtttagaagcagaccaaagtccgaaaaattctgccatcctacaaaatagagttgattcacttgaattttcattagagtctcaaaaacagatgaactcagacctgcaaaagcagtgtgaagagttggtgcaaatcaaaggagaaatagaagaaaatctcatgaaagcagaacagatgcatcaaagttttgtggctgaaacaagtcagcgcattagtaagttacaggaagacacttctgctcaccagaatgttgttgctgaaaccttaagtgcccttgagaacaaggaaaaagagctgcaacttttaaatgataaggtagaaactgagcaggcagagattcaagaattaaaaaagagcaaccatctacttgaagactctctaaaggagctacaacttttatccgaaaccctaagcttggagaagaaagaaatgagttccatcatttctctaaataaaagggaaattgaagagctgacccaagagaatgggactcttaaggaaattaatgcatccttaaatcaagagaagatgaacttaatccagaaaagtgagagttttgcaaactatatagatgaaagggagaaaagcatttcagagttatctgatcagtacaagcaagaaaaacttattttactacaaagatgtgaagaaaccggaaatgcatatgaggatcttagtcaaaaatacaaagcagcacaggaaaagaattctaaattagaatgcttgctaaatgaatgcactagtctttgtgaaaataggaaaaatgagttggaacagctaaaggaagcatttgcaaaggaacaccaagaattcttaacaaaattagcatttgctgaagaaagaaatcagaatctgatgctagagttggagacagtgcagcaagctctgagatctgagatgacagataaccaaaacaattctaagagcgaggctggtggtttaaagcaagaaatcatgactttaaaggaagaacaaaacaaaatgcaaaaggaagttaatgacttattacaagagaatgaacagctgatgaaggtaatgaagactaaacatgaatgtcaaaatctagaatcagaaccaattaggaactctgtgaaagaaagagagagtgagagaaatcaatgtaattttaaacctcagatggatcttgaagttaaagaaatttctctagatagttataatgcgcagttggtgcaattagaagctatgctaagaaataaggaattaaaacttcaggaaagtgagaaggagaaggagtgcctgcagcatgaattacagacaattagaggagatcttgaaaccagcaatttgcaagacatgcagtcacaagaaattagtggccttaaagactgtgaaatagatgcggaagaaaagtatatttcagggcctcatgagttgtcaacaagtcaaaacgacaatgcacaccttcagtgctctctgcaaacaacaatgaacaagctgaatgagctagagaaaatatgtgaaatactgcaggctgaaaagtatgaactcgtaactgagctgaatgattcaaggtcagaatgtatcacagcaactaggaaaatggcagaagaggtagggaaactactaaatgaagttaaaatattaaatgatgacagtggtcttctccatggtgagttagtggaagacataccaggaggtgaatttggtgaacaaccaaatgaacagcaccctgtgtctttggctccattggacgagagtaattcctacgagcacttgacattgtcagacaaagaagttcaaatgcactttgccgaattgcaagagaaattcttatctttacaaagtgaacacaaaattttacatgatcagcactgtcagatgagctctaaaatgtcagagctgcagacctatgttgactcattaaaggccgaaaatttggtcttgtcaacgaatctgagaaactttcaaggtgacttggtgaaggagatgcagctgggcttggaggaggggctcgttccatccctgtcatcctcttgtgtgcctgacagctctagtcttagcagtttgggagactcctccttttacagagctcttttagaacagacaggagatatgtctcttttgagtaatttagaaggggctgtttcagcaaaccagtgcagtgtagatgaagtattttgcagcagtctgcaggaggagaatctgaccaggaaagaaaccccttcggccccagcgaagggtgttgaagagcttgagtccctctgtgaggtgtaccggcagtccctcgagaagctagaagagaaaatggaaagtcaagggattatgaaaaataaggaaattcaagagctcgagcagttattaagttctgaaaggcaagagcttgactgccttaggaagcagtatttgtcagaaaatgaacagtggcaacagaagctgacaagcgtgactctggagatggagtccaagttggcggcagaaaagaaacagacggaacaactgtcacttgagctggaagtagcacgactccagctacaaggtctggacttaagttctcggtctttgcttggcatcgacacagaagatgctattcaaggccgaaatgagagctgtgacatatcaaaagaacatacttcagaaactacagaaagaacaccaaagcatgatgttcatcagatttgtgataaagatgctcagcaggacctcaatctagacattgagaaaataactgagactggtgcagtgaaacccacaggagagtgctctggggaacagtccccagataccaattatgagcctccaggggaagataaaacccagggctcttcagaatgcatttctgaattgtcattttctggtcctaatgctttggtacctatggatttcctggggaatcaggaagatatccataatcttcaactgcgggtaaaagagacatcaaatgagaatttgagattacttcatgtgatagaggaccgtgacagaaaagttgaaagtttgctaaatgaaatgaaagaattagactcaaaactccatttacaggaggtacaactaatgaccaaaattgaagcatgcatagaattggaaaaaatagttggggaacttaagaaagaaaactcagatttaagtgaaaaattggaatatttttcttgtgatcaccaggagttactccagagagtagaaacttctgaaggcctcaattctgatttagaaatgcatgcagataaatcatcacgtgaagatattggagataatgtggccaaggtgaatgacagctggaaggagagatttcttgatgtggaaaatgagctgagtaggatcagatcggagaaagctagcattgagcatgaagccctctacctggaggctgacttagaggtagttcaaacagagaagctatgtttagaaaaagacaatgaaaataagcagaaggttattgtctgccttgaagaagaactctcagtggtcacaagtgagagaaaccagcttcgtggagaattagatactatgtcaaaaaaaaccacggcactggatcagttgtctgaaaaaatgaaggagaaaacacaagagcttgagtctcatcaaagtgagtgtctccattgcattcaggtggcagaggcagaggtgaaggaaaagacggaactccttcagactttgtcctctgatgtgagtgagctgttaaaagacaaaactcatctccaggaaaagctgcagagtttggaaaaggactcacaggcactgtctttgacaaaatgtgagctggaaaaccaaattgcacaactgaataaagagaaagaattgcttgtcaaggaatctgaaagcctgcaggccagactgagtgaatcagattatgaaaagctgaatgtctccaaggccttggaggccgcactggtggagaaaggtgagttcgcattgaggctgagctcaacacaggaggaagtgcatcagctgagaagaggcatcgagaaactgagagttcgcattgaggccgatgaaaagaagcagctgcacatcgcagagaaactgaaagaacgcgagcgggagaatgattcacttaaggataaagttgagaaccttgaaagggaattgcagatgtcagaagaaaaccaggagctagtgattcttgatgccgagaattccaaagcagaagtagagactctaaaaacacaaatagaagagatggccagaagcctgaaagtttttgaattagaccttgtcacgttaaggtctgaaaaagaaaatctgacaaaacaaatacaagaaaaacaaggtcagttgtcagaactagacaagttactctcttcatttaaaagtctgttagaagaaaaggagcaagcagagatacagatcaaagaagaatctaaaactgcagtggagatgcttcagaatcagttaaaggagctaaatgaggcagtagcagccttgtgtggtgaccaagaaattatgaaggccacagaacagagtctagacccaccaatagaggaagagcatcagctgagaaatagcattgaaaagctgagagcccgcctagaagctgatgaaaagaagcagctctgtgtcttacaacaactgaaggaaagtgagcatcatgcagatttacttaagggtagagtggagaaccttgaaagagagctagagatagccaggacaaaccaagagcatgcagctcttgaggcagagaattccaaaggagaggtagagaccctaaaagcaaaaatagaagggatgacccaaagtctgagaggtctggaattagatgttgttactataaggtcagaaaaagaagatctgacaaatgaattacaaaaagagcaagagcgaatatctgaattagaaataataaattcatcatttgaaaatattttgcaagaaaaagagcaagagaaagtacagatgaaagaaaaatcaagcactgccatggagatgcttcaaacacaattaaaagagctcaatgagagagtggcagccctgcataatgaccaagaagcctgtaaggccaaagagcagaatcttagtagtcaagtagagtgtcttgaacttgagaaggctcagttgctacaaggccttgatgaggccaaaaataattatattgttttgcaatcttcagtgaatggcctcattcaagaagtagaagatggcaagcagaaactggagaagaaggatgaagaaatcagtagactgaaaaatcaaattcaagaccaagagcagcttgtctctaaactgtcccaggtggaaggagagcaccaactttggaaggagcaaaacttagaactgagaaatctgacagtggaattggagcagaagatccaagtgctacaatccaaaaatgcctctttgcaggacacattagaagtgctgcagagttcttacaagaatctagagaatgagcttgaattgacaaaaatggacaaaatgtcctttgttgaaaaagtaaacaaaatgactgcaaaggaaactgagctgcagagggaaatgcatgagatggcacagaaaacagcagagctgcaagaagaactcagtggagagaaaaataggctagctggagagttgcagttactgttggaagaaataaagagcagcaaagatcaattgaaggagctcacactagaaaatagtgaattgaagaagagcctagattgcatgcacaaagaccaggtggaaaaggaagggaaagtgagagaggaaatagctgaatatcagctacggcttcatgaagctgaaaagaaacaccaggctttgcttttggacacaaacaaacagtatgaagtagaaatccagacataccgagagaaattgacttctaaagaagaatgtctcagttcacagaagctggagatagaccttttaaagtctagtaaagaagagctcaataattcattgaaagctactactcagattttggaagaattgaagaaaaccaagatggacaatctaaaatatgtaaatcagttgaagaaggaaaatgaacgtgcccaggggaaaatgaagttgttgatcaaatcctgtaaacagctggaagaggaaaaggagatactgcagaaagaactctctcaacttcaagctgcacaggagaagcagaaaacaggtactgttatggataccaaggtcgatgaattaacaactgagatcaaagaactgaaagaaactcttgaagaaaaaaccaaggaggcagatgaatacttggataagtactgttccttgcttataagccatgaaaagttagagaaagctaaagagatgttagagacacaagtggcccatctgtgttcacagcaatctaaacaagattcccgagggtctcctttgctaggtccagttgttccaggaccatctccaatcccttctgttactgaaaagaggttatcatctggccaaaataaagcttcaggcaagaggcaaagatccagtggaatatgggagaatggtggaggaccaacacctgctaccccagagagcttttctaaaaaaagcaagaaagcagtcatgagtggtattcaccctgcagaagacacggaaggtactgagtttgagccagagggacttccagaagttgtaaagaaagggtttgctgacatcccgacaggaaagactagcccatatatcctgcgaagaacaaccatggcaactcggaccagcccccgcctggctgcacagaagttagcgctatccccactgagtctcggcaaagaaaatcttgcagagtcctccaaaccaacagctggtggcagcagatcacaaaaggtcaaagttgctcagcggagcccagtagattcaggcaccatcctccgagaacccaccacgaaatccgtcccagtcaataatcttcctgagagaagtccgactgacagccccagagagggcctgagggtcaagcgaggccgacttgtccccagccccaaagctggactggagtccaagggcagtgagaactgtaaggtccagtgaaggcactttgtgtgtcagtacccctgggaggtgccagtcattgaatagataaggctgtgcctacaggacttctctttagtcagggcatgctttattagtgaggagaaaacaattccttagaagtcttaaatatattgtactctttagatctcccatgtgtaggtattgaaaaagtttggaagcactgatcacctgttagcattgccattcctctactgcaatgtaaatagtataaagctatgtatataaagctttttggtaatatgttacaattaaaatgacaagcactatatcacaatctctgtttgtatgtgggttttacactaaaaaaatgcaaaacacattttattcttctaattaacagctcctaggaaaatgtagacttttgctttatgatattctatctgtagtatgaggcatggaatagttttgtatcgggaatttctcagagctgagtaaaatgaaggaaaagcatgttatgtgtttttaaggaaaatgtgcacacatatacatgtaggagtgtttatctttctcttacaatctgttttagacatctttgcttatgaaacctgtacatatgtgtgtgtgggtatgtgtttatttccagtgagggctgcaggcttcctagaggtgtgctataccatgcgtctgtcgttgtgcttttttctgtttttagaccaattttttacagttctttggtaagcattgtcgtatctggtgatggattaacatatagcctttgttttctaataaaatagtcgccttcgttttctgtaa

SEQ ID NO: 315379 - DNA, 10620 bp, Homo sapiens
  misc_feature (10328)..(10328): n is a, c, g, or t
  misc_feature (10496)..(10496): n is a, c, g, or t
tgagaccagaagcgggcgaattgggcaccggtggcggctgcgggcagtttgaattagactctgggctccagcccgccgaagccgcgccagaactgtactctccgagaggtcgttttcccgtccccgagagcaagtttatttacaaatgttggagtaataaagaaggcagaacaaaatgagctgggctttggaagaatggaaagaagggctgcctacaagagctcttcagaaaattcaagagcttgaaggacagcttgacaaactgaagaaggaaaagcagcaaaggcagtttcagcttgacagtctcgaggctgcgctgcagaagcaaaaacagaaggttgaaaatgaaaaaaccgagggtacaaacctgaaaagggagaatcaaagattgatggaaatatgtgaaagtctggagaaaactaagcagaagatttctcatgaacttcaagtcaaggagtcacaagtgaatttccaggaaggacaactgaattcaggcaaaaaacaaatagaaaaactggaacaggaacttaaaaggtgtaaatctgagcttgaaagaagccaacaagctgcgcagtctgcagatgtctctctgaatccatgcaatacaccacaaaaaatttttacaactccactaacaccaagtcaatattatagtggttccaagtatgaagatctaaaagaaaaatataataaagaggttgaagaacgaaaaagattagaggcagaggttaaagccttgcaggctaaaaaagcaagccagactcttccacaagccaccatgaatcaccgcgacattgcccggcatcaggcttcatcatctgtgttctcatggcagcaagagaagaccccaagtcatctttcatctaattctcaaagaactccaattaggagagatttctctgcatcttacttttctggggaacaagaggtgactccaagtcgatcaactttgcaaatagggaaaagagatgctaatagcagtttctttgacaattctagcagtcctcatcttttggatcaattaaaagcgcagaatcaagagctaagaaacaagattaatgagttggaactacgcctgcaaggacatgaaaaagaaatgaaaggccaagtgaataagtttcaagaactccaactccaactggagaaagcaaaagtggaattaattgaaaaagagaaagttttgaacaaatgtagggatgaactagtgagaacaacagcacaatacgaccaggcgtcaaccaagtatactgcattggaacaaaaactgaaaaaattgacggaagatttgagttgtcagcgacaaaatgcagaaagtgccagatgttctctggaacagaaaattaaggaaaaagaaaaggagtttcaagaggagctctcccgtcaacagcgttctttccaaacactggaccaggagtgcatccagatgaaggccagactcacccaggagttacagcaagccaagaatatgcacaacgtcctgcaggctgaactggataaactcacatcagtaaagcaacagctagaaaacaatttggaagagtttaagcaaaagttgtgcagagctgaacaggcgttccaggcgagtcagatcaaggagaatgagctgaggagaagcatggaggaaatgaagaaggaaaacaacctccttaagagtcactctgagcaaaaggccagagaagtctgccacctggaggcagaactcaagaacatcaaacagtgtttaaatcagagccagaattttgcagaagaaatgaaagcgaagaatacctctcaggaaaccatgttaagagatcttcaagaaaaaaataaatcagcaagaaaactccttgactttagaaaaactgaagcttgctgtggctgatctggaaaagcagcgagattgttctcaagaccttttgaagaaaagagaacatcacattgaacaacttaatgataagttaagcaagacagagaaagagtccaaagccttgctgagtgctttagagttaaaaaagaaagaatatgaagaattgaaagaagagaaaactctgttttcttgttggaaaagtgaaaacgaaaaacttttaactcagatggaatcagaaaaggaaaacttgcagagtaaaattaatcacttggaaacttgtctgaagacacagcaaataaaaagtcatgaatacaacgagagagtaagaacgctggagatggacagagaaaacctaagtgtcgagatcagaaaccttcacaacgtgttagacagtaagtcagtggaggtagagacccagaaactagcttatatggagctacagcagaaagctgagttctcagatcagaaacatcagaaggaaatagaaaatatgtgtttgaagacttctcagcttactgggcaagttgaagatctagaacacaagcttcagttactgtcaaatgaaataatggacaaagaccggtgttaccaagacttgcatgccgaatatgagagcctcagggatctgctaaaatccaaagatgcttctctggtgacaaatgaagatcatcagagaagtcttttggcttttgatcagcagcctgccatgcatcattcctttgcaaatataattggagaacaaggaagcatgccttcagagaggagtgaatgtcgtttagaagcagaccaaagtccgaaaaattctgccatcctacaaaatagagttgattcacttgaattttcattagagtctcaaaaacagatgaactcagacctgcaaaagcagtgtgaagagttggtgcaaatcaaaggagaaatagaagaaaatctcatgaaagcagaacagatgcatcaaagttttgtggctgaaacaagtcagcgcattagtaagttacaggaagacacttctgctcaccagaatgttgttgctgaaaccttaagtgcccttgagaacaaggaaaaagagctgcaacttttaaatgataaggtagaaactgagcaggcagagattcaagaattaaaaaagagcaaccatctacttgaagactctctaaaggagctacaacttttatccgaaaccctaagcttggagaagaaagaaatgagttccatcatttctctaaataaaagggaaattgaagagctgacccaagagaatgggactcttaaggaaattaatgcatccttaaatcaagagaagatgaacttaatccagaaaagtgagagttttgcaaactatatagatgaaagggagaaaagcatttcagagttatctgatcagtacaagcaagaaaaacttattttactacaaagatgtgaagaaaccggaaatgcatatgaggatcttagtcaaaaatacaaagcagcacaggaaaagaattctaaattagaatgcttgctaaatgaatgcactagtctttgtgaaaataggaaaaatgagttggaacagctaaaggaagcatttgcaaaggaacaccaagaattcttaacaaaattagcatttgctgaagaaagaaatcagaatctgatgctagagttggagacagtgcagcaagctctgagatctgagatgacagataaccaaaacaattctaagagcgaggctggtggtttaaagcaagaaatcatgactttaaaggaagaacaaaacaaaatgcaaaaggaagttaatgacttattacaagagaatgaacagctgatgaaggtaatgaagactaaacatgaatgtcaaaatctagaatcagaaccaattaggaactctgtgaaagaaagagagagtgagagaaatcaatgtaattttaaacctcagatggatcttgaagttaaagaaatttctctagatagttataatgcgcagttggtgcaattagaagctatgctaagaaataaggaattaaaacttcaggaaagtgagaaggagaaggagtgcctgcagcatgaattacagacaattagaggagatcttgaaaccagcaatttgcaagacatgcagtcacaagaaattagtggccttaaagactgtgaaatagatgcggaagaaaagtatatttcagggcctcatgagttgtcaacaagtcaaaacgacaatgcacaccttcagtgctctctgcaaacaacaatgaacaagctgaatgagctagagaaaatatgtgaaatactgcaggctgaaaagtatgaactcgtaactgagctgaatgattcaaggtcagaatgtatcacagcaactaggaaaatggcagaagaggtagggaaactactaaatgaagttaaaatattaaatgatgacagtggtcttctccatggtgagttagtggaagacataccaggaggtgaatttggtgaacaaccaaatgaacagcaccctgtgtctttggctccattggacgagagtaattcctacgagcacttgacattgtcagacaaagaagttcaaatgcactttgccgaattgcaagagaaattcttatctttacaaagtgaacacaaaattttacatgatcagcactgtcagatgagctctaaaatgtcagagctgcagacctatgttgactcattaaaggccgaaaatttggtcttgtcaacgaatctgagaaactttcaaggtgacttggtgaaggagatgcagctgggcttggaggaggggctcgttccatccctgtcatcctcttgtgtgcctgacagctctagtcttagcagtttgggagactcctccttttacagagctcttttagaacagacaggagatatgtctcttttgagtaatttagaaggggctgtttcagcaaaccagtgcagtgtagatgaagtattttgcagcagtctgcaggaggagaatctgaccaggaaagaaaccccttcggccccagcgaagggtgttgaagagcttgagtccctctgtgaggtgtaccggcagtccctcgagaagctagaagagaaaatggaaagtcaagggattatgaaaaataaggaaattcaagagctcgagcagttattaagttctgaaaggcaagagcttgactgccttaggaagcagtatttgtcagaaaatgaacagtggcaacagaagctgacaagcgtgactctggagatggagtccaagttggcggcagaaaagaaacagacggaacaactgtcacttgagctggaagtagcacgactccagctacaaggtctggacttaagttctcggtctttgcttggcatcgacacagaagatgctattcaaggccgaaatgagagctgtgacatatcaaaagaacatacttcagaaactacagaaagaacaccaaagcatgatgttcatcagatttgtgataaagatgctcagcaggacctcaatctagacattgagaaaataactgagactggtgcagtgaaacccacaggagagtgctctggggaacagtccccagataccaattatgagcctccaggggaagataaaacccagggctcttcagaatgcatttctgaattgtcattttctggtcctaatgctttggtacctatggatttcctggggaatcaggaagatatccataatcttcaactgcgggtaaaagagacatcaaatgagaatttgagattacttcatgtgatagaggaccgtgacagaaaagttgaaagtttgctaaatgaaatgaaagaattagactcaaaactccatttacaggaggtacaactaatgaccaaaattgaagcatgcatagaattggaaaaaatagttggggaacttaagaaagaaaactcagatttaagtgaaaaattggaatatttttcttgtgatcaccaggagttactccagagagtagaaacttctgaaggcctcaattctgatttagaaatgcatgcagataaatcatcacgtgaagatattggagataatgtggccaaggtgaatgacagctggaaggagagatttcttgatgtggaaaatgagctgagtaggatcagatcggagaaagctagcattgagcatgaagccctctacctggaggctgacttagaggtagttcaaacagagaagctatgtttagaaaaagacaatgaaaataagcagaaggttattgtctgccttgaagaagaactctcagtggtcacaagtgagagaaaccagcttcgtggagaattagatactatgtcaaaaaaaaccacggcactggatcagttgtctgaaaaaatgaaggagaaaacacaagagcttgagtctcatcaaagtgagtgtctccattgcattcaggtggcagaggcagaggtgaaggaaaagacggaactccttcagactttgtcctctgatgtgagtgagctgttaaaagacaaaactcatctccaggaaaagctgcagagtttggaaaaggactcacaggcactgtctttgacaaaatgtgagctggaaaaccaaattgcacaactgaataaagagaaagaattgcttgtcaaggaatctgaaagcctgcaggccagactgagtgaatcagattatgaaaagctgaatgtctccaaggccttggaggccgcactggtggagaaaggtgagttcgcattgaggctgagctcaacacaggaggaagtgcatcagctgagaagaggcatcgagaaactgagagttcgcattgaggccgatgaaaagaagcagctgcacatcgcagagaaactgaaagaacgcgagcgggagaatgattcacttaaggataaagttgagaaccttgaaagggaattgcagatgtcagaagaaaaccaggagctagtgattcttgatgccgagaattccaaagcagaagtagagactctaaaaacacaaatagaagagatggccagaagcctgaaagtttttgaattagaccttgtcacgttaaggtctgaaaaagaaaatctgacaaaacaaatacaagaaaaacaaggtcagttgtcagaactagacaagttactctcttcatttaaaagtctgttagaagaaaaggagcaagcagagatacagatcaaagaagaatctaaaactgcagtggagatgcttcagaatcagttaaaggagctaaatgaggcagtagcagccttgtgtggtgaccaagaaattatgaaggccacagaacagagtctagacccaccaatagaggaagagcatcagctgagaaatagcattgaaaagctgagagcccgcctagaagctgatgaaaagaagcagctctgtgtcttacaacaactgaaggaaagtgagcatcatgcagatttacttaagggtagagtggagaaccttgaaagagagctagagatagccaggacaaaccaagagcatgcagctcttgaggcagagaattccaaaggagaggtagagaccctaaaagcaaaaatagaagggatgacccaaagtctgagaggtctggaattagatgttgttactataaggtcagaaaaagaagatctgacaaatgaattacaaaaagagcaagagcgaatatctgaattagaaataataaattcatcatttgaaaatattttgcaagaaaaagagcaagagaaagtacagatgaaagaaaaatcaagcactgccatggagatgcttcaaacacaattaaaagagctcaatgagagagtggcagccctgcataatgaccaagaagcctgtaaggccaaagagcagaatcttagtagtcaagtagagtgtcttgaacttgagaaggctcagttgctacaaggccttgatgaggccaaaaataattatattgttttgcaatcttcagtgaatggcctcattcaagaagtagaagatggcaagcagaaactggagaagaaggatgaagaaatcagtagactgaaaaatcaaattcaagaccaagagcagcttgtctctaaactgtcccaggtggaaggagagcaccaactttggaaggagcaaaacttagaactgagaaatctgacagtggaattggagcagaagatccaagtgctacaatccaaaaatgcctctttgcaggacacattagaagtgctgcagagttcttacaagaatctagagaatgagcttgaattgacaaaaatggacaaaatgtcctttgttgaaaaagtaaacaaaatgactgcaaaggaaactgagctgcagagggaaatgcatgagatggcacagaaaacagcagagctgcaagaagaactcagtggagagaaaaataggctagctggagagttgcagttactgttggaagaaataaagagcagcaaagatcaattgaaggagctcacactagaaaatagtgaattgaagaagagcctagattgcatgcacaaagaccaggtggaaaaggaagggaaagtgagagaggaaatagctgaatatcagctacggcttcatgaagctgaaaagaaacaccaggctttgcttttggacacaaacaaacagtatgaagtagaaatccagacataccgagagaaattgacttctaaagaagaatgtctcagttcacagaagctggagatagaccttttaaagtctagtaaagaagagctcaataattcattgaaagctactactcagattttggaagaattgaagaaaaccaagatggacaatctaaaatatgtaaatcagttgaagaaggaaaatgaacgtgcccaggggaaaatgaagttgttgatcaaatcctgtaaacagctggaagaggaaaaggagatactgcagaaagaactctctcaacttcaagctgcacaggagaagcagaaaacaggtactgttatggataccaaggtcgatgaattaacaactgagatcaaagaactgaaagaaactcttgaagaaaaaaccaaggaggcagatgaatacttggataagtactgttccttgcttataagccatgaaaagttagagaaagctaaagagatgttagagacacaagtggcccatctgtgttcacagcaatctaaacaagattcccgagggtctcctttgctaggtccagttgttccaggaccatctccaatcccttctgttactgaaaagaggttatcatctggccaaaataaagcttcaggcaagaggcaaagatccagtggaatatgggagaatggtggaggaccaacacctgctaccccagagagcttttctaaaaaaagcaagaaagcagtcatgagtggtattcaccctgcagaagacacggaaggtactgagtttgagccagagggacttccagaagttgtaaagaaagggtttgctgacatcccgacaggaaagactagcccatatatcctgcgaagaacaaccatggcaactcggaccagcccccgcctggctgcacagaagttagcgctatccccactgagtctcggcaaagaaaatcttgcagagtcctccaaaccaacagctggtggcagcagatcacaaaaggtcaaagttgctcagcggagcccagtagattcaggcaccatcctccgagaacccaccacgaaatccgtcccagtcaataatcttcctgagagaagtccgactgacagccccagagagggcctgagggtcaagcgaggccgacttgtccccagccccaaagctggactggagtccaagggcagtgagaactgtaaggtccagtgaaggcactttgtgtgtcagtacccctgggaggtgccagtcattgaatagataaggctgtgcctacaggacttctctttagtcagggcatgctttattagtgaggagaaaacaattccttagaagtcttaaatatattgtactctttagatctcccatgtgtaggtattgaaaaagtttggaagcactgatcacctgttagcattgccattcctctactgcaatgtaaatagtataaagctatgtatataaagctttttggtaatatgttacaattaaaatgacaagcactatatcacaatctctgtttgtatgtgggttttacactaaaaaaatgcaaaacacattttattcttctaattaacagctcctaggaaaatgtagacttttgctttatgatattctatctgtagtatgaggcatggaatagttttgtatcgggaatttctcagagctgagtaaaatgaaggaaaagcatgttatgtgtttttaaggaaaatgtgcacacatatacatgtaggagtgtttatctttctcttacaatctgttttagacatctttgcttatgaaacctgtacatatgtgtgtgtgggtatgtgtttatttccagtgagggctgcaggcttcctagaggtgtgctataccatgcgtctgtcgttgtgcttttttctgtttttagaccaattttttacagttctttggtaagcattgtcgtatctggtgatggattaacatatagcctttgttttctaataaaatagtcgccttcgttttctgtaaaaaaaaaaaaaaaaaaaaaaaaaaattttnggggggttgggttgaaaaagtttttaaaacatttggtggggggggggggccgggtttggggcacacgtggcgcaaaagtggtgtgccaaagagaagaagccgcggcgccagggactagggctgtcgggggtttttctccaccaatataaaaagaagcccgcggggggnagacccgaaggtgtttctgggaacaaattcccgagtagggggttcccggagggcacatcacggttgcttactcaacaggggtgcccaggggaagccgatataaaaatagcagggcgcggggggc

SEQ ID NO: 315380 - DNA, 10220 bp, Homo sapiens
tgagaccagaagcgggcgaattgggcaccggtggcggctgcgggcagtttgaattagactctgggctccagcccgccgaagccgcgccagaactgtactctccgagaggtcgttttcccgtccccgagagcaagtttatttacaaatgttggagtaataaagaaggcagaacaaaatgagctgggctttggaagaatggaaagaagggctgcctacaagagctcttcagaaaattcaagagcttgaaggacagcttgacaaactgaagaaggaaaagcagcaaaggcagtttcagcttgacagtctcgaggctgcgctgcagaagcaaaaacagaaggttgaaaatgaaaaaaccgagggtacaaacctgaaaagggagaatcaaagattgatggaaatatgtgaaagtctggagaaaactaagcagaagatttctcatgaacttcaagtcaaggagtcacaagtgaatttccaggaaggacaactgaattcaggcaaaaaacaaatagaaaaactggaacaggaacttaaaaggtgtaaatctgagcttgaaagaagccaacaagctgcgcagtctgcagatgtctctctgaatccatgcaatacaccacaaaaaatttttacaactccactaacaccaagtcaatattatagtggttccaagtatgaagatctaaaagaaaaatataataaagaggttgaagaacgaaaaagattagaggcagaggttaaagccttgcaggctaaaaaagcaagccagactcttccacaagccaccatgaatcaccgcgacattgcccggcatcaggcttcatcatctgtgttctcatggcagcaagagaagaccccaagtcatctttcatctaattctcaaagaactccaattaggagagatttctctgcatcttacttttctggggaacaagaggtgactccaagtcgatcaactttgcaaatagggaaaagagatgctaatagcagtttctttgacaattctagcagtcctcatcttttggatcaattaaaagcgcagaatcaagagctaagaaacaagattaatgagttggaactacgcctgcaaggacatgaaaaagaaatgaaaggccaagtgaataagtttcaagaactccaactccaactggagaaagcaaaagtggaattaattgaaaaagagaaagttttgaacaaatgtagggatgaactagtgagaacaacagcacaatacgaccaggcgtcaaccaagtatactgcattggaacaaaaactgaaaaaattgacggaagatttgagttgtcagcgacaaaatgcagaaagtgccagatgttctctggaacagaaaattaaggaaaaagaaaaggagtttcaagaggagctctcccgtcaacagcgttctttccaaacactggaccaggagtgcatccagatgaaggccagactcacccaggagttacagcaagccaagaatatgcacaacgtcctgcaggctgaactggataaactcacatcagtaaagcaacagctagaaaacaatttggaagagtttaagcaaaagttgtgcagagctgaacaggcgttccaggcgagtcagatcaaggagaatgagctgaggagaagcatggaggaaatgaagaaggaaaacaacctccttaagagtcactctgagcaaaaggccagagaagtctgccacctggaggcagaactcaagaacatcaaacagtgtttaaatcagagccagaattttgcagaagaaatgaaagcgaagaatacctctcaggaaaccatgttaagagatcttcaagaaaaaaataaatcagcaagaaaactccttgactttagaaaaactgaagcttgctgtggctgatctggaaaagcagcgagattgttctcaagaccttttgaagaaaagagaacatcacattgaacaacttaatgataagttaagcaagacagagaaagagtccaaagccttgctgagtgctttagagttaaaaaagaaagaatatgaagaattgaaagaagagaaaactctgttttcttgttggaaaagtgaaaacgaaaaacttttaactcagatggaatcagaaaaggaaaacttgcagagtaaaattaatcacttggaaacttgtctgaagacacagcaaataaaaagtcatgaatacaacgagagagtaagaacgctggagatggacagagaaaacctaagtgtcgagatcagaaaccttcacaacgtgttagacagtaagtcagtggaggtagagacccagaaactagcttatatggagctacagcagaaagctgagttctcagatcagaaacatcagaaggaaatagaaaatatgtgtttgaagacttctcagcttactgggcaagttgaagatctagaacacaagcttcagttactgtcaaatgaaataatggacaaagaccggtgttaccaagacttgcatgccgaatatgagagcctcagggatctgctaaaatccaaagatgcttctctggtgacaaatgaagatcatcagagaagtcttttggcttttgatcagcagcctgccatgcatcattcctttgcaaatataattggagaacaaggaagcatgccttcagagaggagtgaatgtcgtttagaagcagaccaaagtccgaaaaattctgccatcctacaaaatagagttgattcacttgaattttcattagagtctcaaaaacagatgaactcagacctgcaaaagcagtgtgaagagttggtgcaaatcaaaggagaaatagaagaaaatctcatgaaagcagaacagatgcatcaaagttttgtggctgaaacaagtcagcgcattagtaagttacaggaagacacttctgctcaccagaatgttgttgctgaaaccttaagtgcccttgagaacaaggaaaaagagctgcaacttttaaatgataaggtagaaactgagcaggcagagattcaagaattaaaaaagagcaaccatctacttgaagactctctaaaggagctacaacttttatccgaaaccctaagcttggagaagaaagaaatgagttccatcatttctctaaataaaagggaaattgaagagctgacccaagagaatgggactcttaaggaaattaatgcatccttaaatcaagagaagatgaacttaatccagaaaagtgagagttttgcaaactatatagatgaaagggagaaaagcatttcagagttatctgatcagtacaagcaagaaaaacttattttactacaaagatgtgaagaaaccggaaatgcatatgaggatcttagtcaaaaatacaaagcagcacaggaaaagaattctaaattagaatgcttgctaaatgaatgcactagtctttgtgaaaataggaaaaatgagttggaacagctaaaggaagcatttgcaaaggaacaccaagaattcttaacaaaattagcatttgctgaagaaagaaatcagaatctgatgctagagttggagacagtgcagcaagctctgagatctgagatgacagataaccaaaacaattctaagagcgaggctggtggtttaaagcaagaaatcatgactttaaaggaagaacaaaacaaaatgcaaaaggaagttaatgacttattacaagagaatgaacagctgatgaaggtaatgaagactaaacatgaatgtcaaaatctagaatcagaaccaattaggaactctgtgaaagaaagagagagtgagagaaatcaatgtaattttaaacctcagatggatcttgaagttaaagaaatttctctagatagttataatgcgcagttggtgcaattagaagctatgctaagaaataaggaattaaaacttcaggaaagtgagaaggagaaggagtgcctgcagcatgaattacagacaattagaggagatcttgaaaccagcaatttgcaagacatgcagtcacaagaaattagtggccttaaagactgtgaaatagatgcggaagaaaagtatatttcagggcctcatgagttgtcaacaagtcaaaacgacaatgcacaccttcagtgctctctgcaaacaacaatgaacaagctgaatgagctagagaaaatatgtgaaatactgcaggctgaaaagtatgaactcgtaactgagctgaatgattcaaggtcagaatgtatcacagcaactaggaaaatggcagaagaggtagggaaactactaaatgaagttaaaatattaaatgatgacagtggtcttctccatggtgagttagtggaagacataccaggaggtgaatttggtgaacaaccaaatgaacagcaccctgtgtctttggctccattggacgagagtaattcctacgagcacttgacattgtcagacaaagaagttcaaatgcactttgccgaattgcaagagaaattcttatctttacaaagtgaacacaaaattttacatgatcagcactgtcagatgagctctaaaatgtcagagctgcagacctatgttgactcattaaaggccgaaaatttggtcttgtcaacgaatctgagaaactttcaaggtgacttggtgaaggagatgcagctgggcttggaggaggggctcgttccatccctgtcatcctcttgtgtgcctgacagctctagtcttagcagtttgggagactcctccttttacagagctcttttagaacagacaggagatatgtctcttttgagtaatttagaaggggctgtttcagcaaaccagtgcagtgtagatgaagtattttgcagcagtctgcaggaggagaatctgaccaggaaagaaaccccttcggccccagcgaagggtgttgaagagcttgagtccctctgtgaggtgtaccggcagtccctcgagaagctagaagagaaaatggaaagtcaagggattatgaaaaataaggaaattcaagagctcgagcagttattaagttctgaaaggcaagagcttgactgccttaggaagcagtatttgtcagaaaatgaacagtggcaacagaagctgacaagcgtgactctggagatggagtccaagttggcggcagaaaagaaacagacggaacaactgtcacttgagctggaagtagcacgactccagctacaaggtctggacttaagttctcggtctttgcttggcatcgacacagaagatgctattcaaggccgaaatgagagctgtgacatatcaaaagaacatacttcagaaactacagaaagaacaccaaagcatgatgttcatcagatttgtgataaagatgctcagcaggacctcaatctagacattgagaaaataactgagactggtgcagtgaaacccacaggagagtgctctggggaacagtccccagataccaattatgagcctccaggggaagataaaacccagggctcttcagaatgcatttctgaattgtcattttctggtcctaatgctttggtacctatggatttcctggggaatcaggaagatatccataatcttcaactgcgggtaaaagagacatcaaatgagaatttgagattacttcatgtgatagaggaccgtgacagaaaagttgaaagtttgctaaatgaaatgaaagaattagactcaaaactccatttacaggaggtacaactaatgaccaaaattgaagcatgcatagaattggaaaaaatagttggggaacttaagaaagaaaactcagatttaagtgaaaaattggaatatttttcttgtgatcaccaggagttactccagagagtagaaacttctgaaggcctcaattctgatttagaaatgcatgcagataaatcatcacgtgaagatattggagataatgtggccaaggtgaatgacagctggaaggagagatttcttgatgtggaaaatgagctgagtaggatcagatcggagaaagctagcattgagcatgaagccctctacctggaggctgacttagaggtagttcaaacagagaagctatgtttagaaaaagacaatgaaaataagcagaaggttattgtctgccttgaagaagaactctcagtggtcacaagtgagagaaaccagcttcgtggagaattagatactatgtcaaaaaaaaccacggcactggatcagttgtctgaaaaaatgaaggagaaaacacaagagcttgagtctcatcaaagtgagtgtctccattgcattcaggtggcagaggcagaggtgaaggaaaagacggaactccttcagactttgtcctctgatgtgagtgagctgttaaaagacaaaactcatctccaggaaaagctgcagagtttggaaaaggactcacaggcactgtctttgacaaaatgtgagctggaaaaccaaattgcacaactgaataaagagaaagaattgcttgtcaaggaatctgaaagcctgcaggccagactgagtgaatcagattatgaaaagctgaatgtctccaaggccttggaggccgcactggtggagaaaggtgagttcgcattgaggctgagctcaacacaggaggaagtgcatcagctgagaagaggcatcgagaaactgagagttcgcattgaggccgatgaaaagaagcagctgcacatcgcagagaaactgaaagaacgcgagcgggagaatgattcacttaaggataaagttgagaaccttgaaagggaattgcagatgtcagaagaaaaccaggagctagtgattcttgatgccgagaattccaaagcagaagtagagactctaaaaacacaaatagaagagatggccagaagcctgaaagtttttgaattagaccttgtcacgttaaggtctgaaaaagaaaatctgacaaaacaaatacaagaaaaacaaggtcagttgtcagaactagacaagttactctcttcatttaaaagtctgttagaagaaaaggagcaagcagagatacagatcaaagaagaatctaaaactgcagtggagatgcttcagaatcagttaaaggagctaaatgaggcagtagcagccttgtgtggtgaccaagaaattatgaaggccacagaacagagtctagacccaccaatagaggaagagcatcagctgagaaatagcattgaaaagctgagagcccgcctagaagctgatgaaaagaagcagctctgtgtcttacaacaactgaaggaaagtgagcatcatgcagatttacttaagggtagagtggagaaccttgaaagagagctagagatagccaggacaaaccaagagcatgcagctcttgaggcagagaattccaaaggagaggtagagaccctaaaagcaaaaatagaagggatgacccaaagtctgagaggtctggaattagatgttgttactataaggtcagaaaaagaagatctgacaaatgaattacaaaaagagcaagagcgaatatctgaattagaaataataaattcatcatttgaaaatattttgcaagaaaaagagcaagagaaagtacagatgaaagaaaaatcaagcactgccatggagatgcttcaaacacaattaaaagagctcaatgagagagtggcagccctgcataatgaccaagaagcctgtaaggccaaagagcagaatcttagtagtcaagtagagtgtcttgaacttgagaaggctcagttgctacaaggccttgatgaggccaaaaataattatattgttttgcaatcttcagtgaatggcctcattcaagaagtagaagatggcaagcagaaactggagaagaaggatgaagaaatcagtagactgaaaaatcaaattcaagaccaagagcagcttgtctctaaactgtcccaggtggaaggagagcaccaactttggaaggagcaaaacttagaactgagaaatctgacagtggaattggagcagaagatccaagtgctacaatccaaaaatgcctctttgcaggacacattagaagtgctgcagagttcttacaagaatctagagaatgagcttgaattgacaaaaatggacaaaatgtcctttgttgaaaaagtaaacaaaatgactgcaaaggaaactgagctgcagagggaaatgcatgagatggcacagaaaacagcagagctgcaagaagaactcagtggagagaaaaataggctagctggagagttgcagttactgttggaagaaataaagagcagcaaagatcaattgaaggagctcacactagaaaatagtgaattgaagaagagcctagattgcatgcacaaagaccaggtggaaaaggaagggaaagtgagagaggaaatagctgaatatcagctacggcttcatgaagctgaaaagaaacaccaggctttgcttttggacacaaacaaacagtatgaagtagaaatccagacataccgagagaaattgacttctaaagaagaatgtctcagttcacagaagctggagatagaccttttaaagtctagtaaagaagagctcaataattcattgaaagctactactcagattttggaagaattgaagaaaaccaagatggacaatctaaaatatgtaaatcagttgaagaaggaaaatgaacgtgcccaggggaaaatgaagttgttgatcaaatcctgtaaacagctggaagaggaaaaggagatactgcagaaagaactctctcaacttcaagctgcacaggagaagcagaaaacaggtactgttatggataccaaggtcgatgaattaacaactgagatcaaagaactgaaagaaactcttgaagaaaaaaccaaggaggcagatgaatacttggataagtactgttccttgcttataagccatgaaaagttagagaaagctaaagagatgttagagacacaagtggcccatctgtgttcacagcaatctaaacaagattcccgagggtctcctttgctaggtccagttgttccaggaccatctccaatcccttctgttactgaaaagaggttatcatctggccaaaataaagcttcaggcaagaggcaaagatccagtggaatatgggagaatggtggaggaccaacacctgctaccccagagagcttttctaaaaaaagcaagaaagcagtcatgagtggtattcaccctgcagaagacacggaaggtactgagtttgagccagagggacttccagaagttgtaaagaaagggtttgctgacatcccgacaggaaagactagcccatatatcctgcgaagaacaaccatggcaactcggaccagcccccgcctggctgcacagaagttagcgctatccccactgagtctcggcaaagaaaatcttgcagagtcctccaaaccaacagctggtggcagcagatcacaaaaggtcaaagttgctcagcggagcccagtagattcaggcaccatcctccgagaacccaccacgaaatccgtccccagccccaaagctggactggagtccaagggcagtgagaactgtaaggtccagtgaaggcactttgtgtgtcagtacccctgggaggtgccagtcattgaatagataaggctgtgcctacaggacttctctttagtcagggcatgctttattagtgaggagaaaacaattccttagaagtcttaaatatattgtactctttagatctcccatgtgtaggtattgaaaaagtttggaagcactgatcacctgttagcattgccattcctctactgcaatgtaaatagtataaagctatgtatataaagctttttggtaatatgttacaattaaaatgacaagcactatatcacaatctctgtttgtatgtgggttttacactaaaaaaatgcaaaacacattttattcttctaattaacagctcctaggaaaatgtagacttttgctttatgatattctatctgtagtatgaggcatggaatagttttgtatcgggaatttctcagagctgagtaaaatgaaggaaaagcatgttatgtgtttttaaggaaaatgtgcacacatatacatgtaggagtgtttatctttctcttacaatctgttttagacatctttgcttatgaaacctgtacatatgtgtgtgtgggtatgtgtttatttccagtgagggctgcaggcttcctagaggtgtgctataccatgcgtctgtcgttgtgcttttttctgtttttagaccaattttttacagttctttggtaagcattgtcgtatctggtgatggattaacatatagcctttgttttctaataaaatagtcgccttcgttttctgtaa

SEQ ID NO: 315381 - DNA, 5302 bp, Homo sapiens
  misc_feature (5023)..(5023): n is a, c, g, or t
tgagaccagaagcgggcgaattgggcaccggtggcggctgcgggcagtttgaattagactctgggctccagcccgccgaagccgcgccagaactgtactctccgagaggtcgttttcccgtccccgagagcaagtttatttacaaatgttggagtaataaagaaggcagaacaaaatgagctgggctttggaagaatggaaagaagggctgcctacaagagctcttcagaaaattcaagagcttgaaggacagcttgacaaactgaagaaggaaaagcagcaaaggcagtttcagcttgacagtctcgaggctgcgctgcagaagcaaaaacagaaggttgaaaatgaaaaaaccgagggtacaaacctgaaaagggagaatcaaagattgatggaaatatgtgaaagtctggagaaaactaagcagaagatttctcatgaacttcaagtcaaggagtcacaagtgaatttccaggaaggacaactgaattcaggcaaaaaacaaatagaaaaactggaacaggaacttaaaaggtgtaaatctgagcttgaaagaagccaacaagctgcgcagtctgcagatgtctctctgaatccatgcaatacaccacaaaaaatttttacaactccactaacaccaagtcaatattatagtggttccaagtatgaagatctaaaagaaaaatataataaagaggttgaagaacgaaaaagattagaggcagaggttaaagccttgcaggctaaaaaagcaagccagactcttccacaagccaccatgaatcaccgcgacattgcccggcatcaggcttcatcatctgtgttctcatggcagcaagagaagaccccaagtcatctttcatctaattctcaaagaactccaattaggagagatttctctgcatcttacttttctggggaacaagaggtgactccaagtcgatcaactttgcaaatagggaaaagagatgctaatagcagtttctttgacaattctagcagtcctcatcttttggatcaattaaaagcgcagaatcaagagctaagaaacaagattaatgagttggaactacgcctgcaaggacatgaaaaagaaatgaaaggccaagtgaataagtttcaagaactccaactccaactggagaaagcaaaagtggaattaattgaaaaagagaaagttttgaacaaatgtagggatgaactagtgagaacaacagcacaatacgaccaggcgtcaaccaagtatactgcattggaacaaaaactgaaaaaattgacggaagatttgagttgtcagcgacaaaatgcagaaagtgccagatgttctctggaacagaaaattaaggaaaaagaaaaggagtttcaagaggagctctcccgtcaacagcgttctttccaaacactggaccaggagtgcatccagatgaaggccagactcacccaggagttacagcaagccaagaatatgcacaacgtcctgcaggctgaactggataaactcacatcagtaaagcaacagctagaaaacaatttggaagagtttaagcaaaagttgtgcagagctgaacaggcgttccaggcgagtcagatcaaggagaatgagctgaggagaagcatggaggaaatgaagaaggaaaacaacctccttaagagtcactctgagcaaaaggccagagaagtctgccacctggaggcagaactcaagaacatcaaacagtgtttaaatcagagccagaattttgcagaagaaatgaaagcgaagaatacctctcaggaaaccatgttaagagatcttcaagaaaaaaataaatcagcaagaaaactccttgactttagaaaaactgaagcttgctgtggctgatctggaaaagcagcgagattgttctcaagaccttttgaagaaaagagaacatcacattgaacaacttaatgataagttaagcaagacagagaaagagtccaaagccttgctgagtgctttagagttaaaaaagaaagaatatgaagaattgaaagaagagaaaactctgttttcttgttggaaaagtgaaaacgaaaaacttttaactcagatggaatcagaaaaggaaaacttgcagagtaaaattaatcacttggaaacttgtctgaagacacagcaaataaaaagtcatgaatacaacgagagagtaagaacgctggagatggacagagaaaacctaagtgtcgagatcagaaaccttcacaacgtgttagacagtaagtcagtggaggtagagacccagaaactagcttatatggagctacagcagaaagctgagttctcagatcagaaacatcagaaggaaatagaaaatatgtgtttgaagacttctcagcttactgggcaagttgaagatctagaacacaagcttcagttactgtcaaatgaaataatggacaaagaccggtgttaccaagacttgcatgccgaatatgagagcctcagggatctgctaaaatccaaagatgcttctctggtgacaaatgaagatcatcagagaagtcttttggcttttgatcagcagcctgccatgcatcattcctttgcaaatataattggagaacaaggaagcatgccttcagagaggagtgaatgtcgtttagaagcagaccaaagtccgaaaaattctgccatcctacaaaatagagttgattcacttgaattttcattagagtctcaaaaacagatgaactcagacctgcaaaagcagtgtgaagagttggtgcaaatcaaaggagaaatagaagaaaatctcatgaaagcagaacagatgcatcaaagttttgtggctgaaacaagtcagcgcattagtaagttacaggaagacacttctgctcaccagaatgttgttgctgaaaccttaagtgcccttgagaacaaggaaaaagagctgcaacttttaaatgataaggtagaaactgagcaggcagagattcaagaattaaaaaagagcaaccatctacttgaagactctctaaaggagctacaacttttatccgaaaccctaagcttggagaagaaagaaatgagttccatcatttctctaaataaaagggaaattgaagagctgacccaagagaatgggactcttaaggaaattaatgcatccttaaatcaagagaagatgaacttaatccagaaaagtgagagttttgcaaactatatagatgaaagggagaaaagcatttcagagttatctgatcagtacaagcaagaaaaacttattttactacaaagatgtgaagaaaccggaaatgcatatgaggatcttagtcaaaaatacaaagcagcacaggaaaagaattctaaattagaatgcttgctaaatgaatgcactagtctttgtgaaaataggaaaaatgagttggaacagctaaaggaagcatttgcaaaggaacaccaagaattcttaacaaaattagcatttgctgaagaaagaaatcagaatctgatgctagagttggagacagtgcagcaagctctgagatctgagatgacagataaccaaaacaattctaagagcgaggctggtggtttaaagcaagaaatcatgactttaaaggaagaacaaaacaaaatgcaaaaggaagttaatgacttattacaagagaatgaacagctgatgaaggtaatgaagactaaacatgaatgtcaaaatctagaatcagaaccaattaggaactctgtgaaagaaagagagagtgagagaaatcaatgtaattttaaacctcagatggatcttgaagttaaagaaatttctctagatagttataatgcgcagttggtgcaattagaagctatgctaagaaataaggaattaaaacttcaggaaagtgagaaggagaaggagtgcctgcagcatgaattacagacaattagaggagatcttgaaaccagcaatttgcaagacatgcagtcacaagaaattagtggccttaaagactgtgaaatagatgcggaagaaaagtatatttcagggcctcatgagttgtcaacaagtcaaaacgacaatgcacaccttcagtgctctctgcaaacaacaatgaacaagctgaatgagctagagaaaatatgtgaaatactgcaggctgaaaagtatgaactcgtaactgagctgaatgattcaaggtcagaatgtatcacagcaactaggaaaatggcagaagaggtagggaaactactaaatgaagttaaaatattaaatgatgacagtggtcttctccatggtgagttagtggaagacataccaggaggtgaatttggtgaacaaccaaatgaacagcaccctgtgtctttggctccattggacgagagtaattcctacgagcacttgacattgtcagacaaagaagttcaaatgcactttgccgaattgcaagagaaattcttatctttacaaagtgaacacaaaattttacatgatcagcactgtcagatgagctctaaaatgtcagagctgcagacctatgttgactcattaaaggccgaaaatttggtcttgtcaacgaatctgagaaactttcaaggtgacttggtgaaggagatgcagctgggcttggaggaggggctcgttccatccctgtcatcctcttgtgtgcctgacagctctagtcttagcagtttgggagactcctccttttacagagctcttttagaacagacaggagatatgtctcttttgagtaatttagaaggggctgtttcagcaaaccagtgcagtgtagatgaagtattttgcagcagtctgcaggaggagaatctgaccaggaaagaaaccccttcggccccagcgaagggtgttgaagagcttgagtccctctgtgaggtgtaccggcagtccctcgagaagctagaagagaaaatggaaagtcaagggattatgaaaaataaggaaattcaagagctcgagcagttattaagttctgaaaggcaagagcttgactgccttaggaagcagtatttgtcagaaaaaaaaaaaaaaaaaaaaaaaaaaaaattttnggggggttgggccccgggaaagtttttgaacccttgggttgagccgcggggcccaagagggtacggctaacaatgggcacatagaggtaccacaggaggacaccgggggcgacgcaacaagaagggcgtgagaattccacacccaaataagaaagacgccgggggggaaaacacaggagcgtctcgagaacaaaccccaaagagggaacaacgagaggcacaatcggggggctcacatcacagggaggtccacaggggagctcgaattcaatttacgcg

SEQ ID NO: 315382 - DNA, 457 bp, Homo sapiens
  misc_feature (457)..(457): n is a, c, g, or t
cgcggaggctgggaactggcggtctgacgcggcgaggtgaaaaatcaccttgggggcccaggttccccacgaacagctaattctcaggtacggaatgggctctggagggccgcgaggtgagcgtgcactgtcaggaaggtgcagcacgagtcttcgggcttcagggacaggggaatctgccccctacacccctgctcggccatttacctagaaccaaacagcagccaacctcgagactgattctgacagcaccaggagtaatgaagttctctaaattcgataaactattgaaatttcccttcttcctttcccataatgcccaaacgacgctgaatcggcagcagaatgcaggactttggcctataatcaatgcaaaattcattttgctaagctacgtaaaagctataaatatcactcccctacacagataataaaccttggtagcctaaaaaaaaan

SEQ ID NO: 315383 - DNA, 545 bp, Homo sapiens
gtttatctagacttcaatgttcacttaaagttttaatataatcctttcccaatgttattgaaaatgagagtattcattatgtactttttaaatgttatatttaaacattccaaaaggcctgaaaacaatttttattgacaagcaggttttatataagttactggcagtagattattctctagtcattgatattgaatttgtgatttataggcttaaaggcaaaactatactacaggaaacatttcaaccattaagtatgcagttttgagacgagacagaatattcctttagttcattcatttgtccctacactcgacaaatatttattgttgacttaatccagactaagtactgagaataggatgagcaaaactacacagctgctaccccgtagagcttataatctagtcaagggagacagacattaatcaaacaatcaataaagtaattgaaagttgtaaatgttaggaataagaggtatatggtcatatacgtcactattcaataaaaggagctgttcaagactaggatgtgtgtgtgtgtgt

SEQ ID NO: 315384 - DNA, 391 bp, Homo sapiens
cgcggaggctgggaactggcggtctgacgcggcgaggtgaaaaatcaccttgggggcccaggttccccacgaacagctaattctcagttctggcaggctggaaagtccagggtcaagatgctggcatttggtctgataagggccttcttgctatctccttacatgacagaagacagtcgaacaaagtgtacaattgctgagagatagaagcaatgcagccccagaagaggaagaaaaatgacaggaaatcccgatccacacttgaccaaaatcatcaaacaatctaggcaactggttttcactcgtatgatagttttttaagttgtcagcaattcttggcaaatacaagaatagaaaataacttcagtaaaactctgagctaaaaggctta

SEQ ID NO: 315385 - DNA, 742 bp, Homo sapiens
cgcggaggctgggaactggcggtctgacgcggcgaggtgaaaaatcaccttgggggcccaggttccccacgaacagctaattctcagttctggcaggctggaaagtccagggtcaagatgctggcatttggtctgataagggccttcttgctatctccttacatgacagaagacagtcgaacaaaggcaagttagccaaaccctgtgtgaagcctcttttataaggaccttaattccactgatgaaggagcagccctctggcctaatcaccttttaaagaccccacctcttaatactatcacattgacagcacccaaattttggagtgacacattcaaaccacagcagacaacaatggcttattagcttggtgcaaaagtaattgaggtttttgccattacttttaataagacagatgtagaagataagtttcaaaccaaagtcagacaggtagctgcaaatacatcaaaatgaaaattcaacaaagaaaggaattgttgcttattttattataatctcatcctcttagcctaaaacagtgcctggcactttgtagttgctcagtaaataattgttagataaatgaatgaagtttccctctataaattccagaaatatttgagaaaattttaaagataatttttgttattataaagcaatgttttactgtaaaagtgaagactatattgatataaatatataagcatagacacaaaatgattaaaattgatcataatcctac

SEQ ID NO: 315386 - DNA, 2038 bp, Homo sapiens
agcggagaccgcgagcgagagcgcccccgagcagcgcccgcgccctccgcgccttctccgccgggacctcgagcgaaagacgcccgcccgccgcccagccctcgcctccctgcccaccgggcacaccgcgccgccaccccgaccccgctgcgcacggcctgtccgctgcacaccagcttgttggcgtcttcgtcgccgcgctcgccccgggctactcctgcgcgccacaatgagctcccgcatcgccagggcgctcgccttagtcgtcacccttctccacttgaccaggctggcgctctccacctgccccgctgcctgccactgccccctggaggcgcccaagtgcgcgccgggagtcgggctggtccgggacggctgcggctgctgtaaggtctgcgccaagcagctcaacgaggactgcagcaaaacgcagccctgcgaccacaccaaggggctggaatgcaacttcggcgccagctccaccgctctgaaggggatctgcagagctcagtcagagggcagaccctgtgaatataactccagaatctaccaaaacggggaaagtttccagcccaactgtaaacatcagtgcacatgtattgatggcgccgtgggctgcattcctctgtgtccccaagaactatctctccccaacttgggctgtcccaaccctcggctggtcaaagttaccgggcagtgctgcgaggagtgggtctgtgacgaggatagtatcaaggaccccatggaggaccaggacggcctccttggcaaggagctgggattcgatgcctccgaggtggagttgacgagaaacaatgaattgattgcagttggaaaaggcagctcactgaagcggctccctgtttttggaatggagcctcgcatcctatacaaccctttacaaggccagaaatgtattgttcaaacaacttcatggtcccagtgctcaaagacctgtggaactggtatctccacacgagttaccaatgacaaccctgagtgccgccttgtgaaagaaacccggatttgtgaggtgcggccttgtggacagccagtgtacagcagcctgaaaaagggcaagaaatgcagcaagaccaagaaatcccccgaaccagtcaggtttacttacgctggatgtttgagtgtgaagaaataccggcccaagtactgcggttcctgcgtggacggccgatgctgcacgccccagctgaccaggactgtgaagatgcggttccgctgcgaagatggggagacattttccaagaacgtcatgatgatccagtcctgcaaatgcaactacaactgcccgcatgccaatgaagcagcgtttcccttctacaggctgttcaatgacattcacaaatttagggactaaatgctacctgggtttccagggcacacctagacaaacaagggagaagagtgtcagaatcagaatcatggagaaaatgggcgggggtggtgtgggtgatgggactcattgtagaaaggaagccttgctcattcttgaggagcattaaggtatttcgaaactgccaagggtgctggtgcggatggacactaatgcagccacgattggagaatactttgcttcatagtattggagcacatgttactgcttcattttggagcttgtggagttgatgactttctgttttctgtttgtaaattatttgctaagcatattttctctaggcttttttccttttggggttctacagtcgtaaaagagataataagattagttggacagtttaaagcttttattcgtcctttgacaaaagtaaatgggagggcattccatcccttcctgaagggggacactccatgagtgtctgtgagaggcagctatctgcactctaaactgcaaacagaaatcaggtgttttaagactgaatgttttatttatcaaaatgtagcttttggggagggaggggaaatgtaatactggaataatttgtaaatgattttaattttatattcagtgaaaagattttatttatggaattaaccatttaataaagaaatatttacctaa

SEQ ID NO: 315387 - DNA, 371 bp, Homo sapiens
  misc_feature (186)..(186): n is a, c, g, or t
ttatctagaggatcaccttcatgtcagtgctttcatgcaggtggccaggagtacccatgcacatgcagtgtggggtgtgggcatctcaggtggtgttctggtaaaatgttagaatagctgtatgaaggaaaccagtgggaggaaatgaagttttcgggatgaagggcctggacatgaatcatgtcnagggcattccatcccttcctgaagggggacactccatgagtgtctgtgagaggcagctatctgcactctaaactgcaaacagaaatcaggtgttttaagactgaatgttttatttatcaaaatgtagcttttggggagtgaaggcactcgacatgaagggatcctctagagtcgccagcagcatc

SEQ ID NO: 315388 - DNA, 498 bp, Homo sapiens
taccctgtgtttaaggatccggcgttgctgtgagctgtggtgtaggccagtggctatagctccgaggcatgaagggactcgacatgaatggggcattccatcccttcctgaagggggacactccatgagtgtctgtgagaggcagctatctgcactctaaactgcaaacagaaatcaggtgttttaagactgaatgttttatttatcaaaatgtagcttttggggagcatgaaaggtctcgatatgaattcatgtcgagtcccttcatccccctgacctcagccttctccaaggaacccccaccgcccgagcgcatctctggctgtctttccatcttgagctgggtcggcctctccactaaatccatccactggcatgacttcagccaaacttcatcggtgtttccagagtcagatctatggatgggcaacggggcggtaagacaagaagtacaggaacagtgatccaatgtcatggcatgaaagcactgtatatgaa

SEQ ID NO: 315389 - DNA, 1681 bp, Homo sapiens
gaattccgggtgcatggggtgtggcacacaccctaacctgtgcattcaccttggccacacagccagccccacatcctacaaacaccacaccaaggggctggaatgcaacttcggcgccagctccaccgctctgaaggggatctgcagagctcagtcagagggcagaccctgtgaatataactccagaatctaccaaaacggggaaagtttccagcccaactgtaaacatcagtgcacatgtattgatggcgccgtgggctgcattcctctgtgtccccaagaactatctctccccaacttgggctgtcccaaccctcggctggtcaaagttaccgggcagtgctgcgaggagtgggtctgtgacgaggatagtatcaaggaccccatggaggaccaggacggcctccttggcaaggagctgggattcgatgcctccgaggtggagttgacgagaaacaatgaattgattgcagttggaaaaggcagctcactgaagcggctccctgtttttggaatggagcctcgcatcctatacaaccctttacaaggccagaaatgtattgttcaaacaacttcatggtcccagtgctcaaagacctgtggaactggtatctccacacgagttaccaatgacaaccctgagtgccgccttgtgaaagaaacccggatttgtgaggtgcggccttgtggacagccagtgtacagcagcctgaaaaagggcaagaaatgcagcaagaccaagaaatcccccgaaccagtcaggtttacttacgctggatgtttgagtgtgaagaaataccggcccaagtactgcggttcctgcgtggacggccgatgctgcacgccccagctgaccaggactgtgaagatgcggttccgctgcgaagatggggagacattttccaagaacgtcatgatgatccagtcctgcaaatgcaactacaactgcccgcatgccaatgaagcagcgtttcccttctacaggctgttcaatgacattcacaaatttagggactaaatgctacctgggtttccagggcacacctagacaaacaagggagaagagtgtcagaatcagaatcatggagaaaatgggcgggggtggtgtgggtgatgggactcattgtagaaaggaagccttgctcattcttgaggagcattaaggtatttcgaaactgccaagggtgctggtgcggatggacactaatgcagccacgattggagaatactttgcttcatagtattggagcacatgttactgcttcattttggagcttgtggagttgatgactttctgttttctgtttgtaaattatttgctaagcatattttctctaggcttttttccttttggggttctacagtcgtaaaagagataataagattagttggacagtttaaagcttttattcgtcctttgacaaaagtaaatgggagggcattccatcccttcctgaagggggacactccatgagtgtctgtgagaggcagctatctgcactctaaactgcaaacagaaatcaggtgttttaagactgaatgttttatttatcaaaatgtagcttttggggagggaggggaaatgtaatactggaataatttgtaaatgattttaattttatattcagtgaaaagattttatttatggaattaaccatttaataaagaaatatttacctaa

SEQ ID NO: 315390 - DNA, 2354 bp, Homo sapiens
agcggagaccgcgagcgagagcgcccccgagcagcgcccgcgccctccgcgccttctccgccgggacctcgagcgaaagacgcccgcccgccgcccagccctcgcctccctgcccaccgggcacaccgcgccgccaccccgaccccgctgcgcacggcctgtccgctgcacaccagcttgttggcgtcttcgtcgccgcgctcgccccgggctactcctgcgcgccacaatgagctcccgcatcgccagggcgctcgccttagtcgtcacccttctccacttgaccaggctggtgagttggactctccttttgccacctattccccgtccgctctccagccccttcccctggtcccagattgcccacggcaggaaaagttaaaaagttcgcgatcgtttgcgggtagccgtttctttaagcactctccccctccccccgaagacgtgtcgggacctcttggtgggagcagccttccgaggtggccgggctggacgagatcagaggctccccgtcgatagggtcggagaccccgtccctcactgcggcagccgcggcgcccctcctgcgcaccgcgccgagtctcacgcgtatcttctcccccttccaggcgctctccacctgccccgctgcctgccactgccccctggaggcgcccaagtgcgcgccgggagtcgggctggtccgggacggctgcggctgctgtaaggtctgcgccaagcagctcaacgaggactgcagcaaaacgcagccctgcgaccacaccaaggggctggaatgcaacttcggcgccagctccaccgctctgaaggggatctgcagagctcagtcagagggcagaccctgtgaatataactccagaatctaccaaaacggggaaagtttccagcccaactgtaaacatcagtgcacatgtattgatggcgccgtgggctgcattcctctgtgtccccaagaactatctctccccaacttgggctgtcccaaccctcggctggtcaaagttaccgggcagtgctgcgaggagtgggtctgtgacgaggatagtatcaaggaccccatggaggaccaggacggcctccttggcaaggagctgggattcgatgcctccgaggtggagttgacgagaaacaatgaattgattgcagttggaaaaggcagctcactgaagcggctccctgtttttggaatggagcctcgcatcctatacaaccctttacaaggccagaaatgtattgttcaaacaacttcatggtcccagtgctcaaagacctgtggaactggtatctccacacgagttaccaatgacaaccctgagtgccgccttgtgaaagaaacccggatttgtgaggtgcggccttgtggacagccagtgtacagcagcctgaaaaagggcaagaaatgcagcaagaccaagaaatcccccgaaccagtcaggtttacttacgctggatgtttgagtgtgaagaaataccggcccaagtactgcggttcctgcgtggacggccgatgctgcacgccccagctgaccaggactgtgaagatgcggttccgctgcgaagatggggagacattttccaagaacgtcatgatgatccagtcctgcaaatgcaactacaactgcccgcatgccaatgaagcagcgtttcccttctacaggctgttcaatgacattcacaaatttagggactaaatgctacctgggtttccagggcacacctagacaaacaagggagaagagtgtcagaatcagaatcatggagaaaatgggcgggggtggtgtgggtgatgggactcattgtagaaaggaagccttgctcattcttgaggagcattaaggtatttcgaaactgccaagggtgctggtgcggatggacactaatgcagccacgattggagaatactttgcttcatagtattggagcacatgttactgcttcattttggagcttgtggagttgatgactttctgttttctgtttgtaaattatttgctaagcatattttctctaggcttttttccttttggggttctacagtcgtaaaagagataataagattagttggacagtttaaagcttttattcgtcctttgacaaaagtaaatgggagggcattccatcccttcctgaagggggacactccatgagtgtctgtgagaggcagctatctgcactctaaactgcaaacagaaatcaggtgttttaagactgaatgttttatttatcaaaatgtagcttttggggagggaggggaaatgtaatactggaataatttgtaaatgattttaattttatattcagtgaaaagattttatttatggaattaaccatttaataaagaaatatttacctaa

SEQ ID NO: 315391 - DNA, 2703 bp, Homo sapiens
agcggagaccgcgagcgagagcgcccccgagcagcgcccgcgccctccgcgccttctccgccgggacctcgagcgaaagacgcccgcccgccgcccagccctcgcctccctgcccaccgggcacaccgcgccgccaccccgaccccgctgcgcacggcctgtccgctgcacaccagcttgttggcgtcttcgtcgccgcgctcgccccgggctactcctgcgcgccacaatgagctcccgcatcgccagggcgctcgccttagtcgtcacccttctccacttgaccaggctggtgagttggactctccttttgccacctattccccgtccgctctccagccccttcccctggtcccagattgcccacggcaggaaaagttaaaaagttcgcgatcgtttgcgggtagccgtttctttaagcactctccccctccccccgaagacgtgtcgggacctcttggtgggagcagccttccgaggtggccgggctggacgagatcagaggctccccgtcgatagggtcggagaccccgtccctcactgcggcagccgcggcgcccctcctgcgcaccgcgccgagtctcacgcgtatcttctcccccttccaggcgctctccacctgccccgctgcctgccactgccccctggaggcgcccaagtgcgcgccgggagtcgggctggtccgggacggctgcggctgctgtaaggtctgcgccaagcagctcaacgaggactgcagcaaaacgcagccctgcgaccacaccaaggggctggaatgcaacttcggcgccagctccaccgctctgaaggggatctgcagaggtaagatgcttgtggtttggcccctttaaaaaaaatactagtccccatagtccagaagtttagtaattctgagaccatgtatggtgatgctttgttgttggtagcttggcagaaaggcacatgatttcagcagtctggaatgcaattcagtgtgtctgggcccaacgaaagcgcatacggaaaagtgattcctgactaacttattgttctggtctggagtctccggggaattgtagggaactttaccataaattgaatttaacagcagaaaatatgtatgagtttcaggcggtggtttggaatcttaactttatccccttctacctttctcttttggtgatctttgcagctcagtcagagggcagaccctgtgaatataactccagaatctaccaaaacggggaaagtttccagcccaactgtaaacatcagtgcacatgtattgatggcgccgtgggctgcattcctctgtgtccccaagaactatctctccccaacttgggctgtcccaaccctcggctggtcaaagttaccgggcagtgctgcgaggagtgggtctgtgacgaggatagtatcaaggaccccatggaggaccaggacggcctccttggcaaggagctgggattcgatgcctccgaggtggagttgacgagaaacaatgaattgattgcagttggaaaaggcagctcactgaagcggctccctgtttttggaatggagcctcgcatcctatacaaccctttacaaggccagaaatgtattgttcaaacaacttcatggtcccagtgctcaaagacctgtggaactggtatctccacacgagttaccaatgacaaccctgagtgccgccttgtgaaagaaacccggatttgtgaggtgcggccttgtggacagccagtgtacagcagcctgaaaaagggcaagaaatgcagcaagaccaagaaatcccccgaaccagtcaggtttacttacgctggatgtttgagtgtgaagaaataccggcccaagtactgcggttcctgcgtggacggccgatgctgcacgccccagctgaccaggactgtgaagatgcggttccgctgcgaagatggggagacattttccaagaacgtcatgatgatccagtcctgcaaatgcaactacaactgcccgcatgccaatgaagcagcgtttcccttctacaggctgttcaatgacattcacaaatttagggactaaatgctacctgggtttccagggcacacctagacaaacaagggagaagagtgtcagaatcagaatcatggagaaaatgggcgggggtggtgtgggtgatgggactcattgtagaaaggaagccttgctcattcttgaggagcattaaggtatttcgaaactgccaagggtgctggtgcggatggacactaatgcagccacgattggagaatactttgcttcatagtattggagcacatgttactgcttcattttggagcttgtggagttgatgactttctgttttctgtttgtaaattatttgctaagcatattttctctaggcttttttccttttggggttctacagtcgtaaaagagataataagattagttggacagtttaaagcttttattcgtcctttgacaaaagtaaatgggagggcattccatcccttcctgaagggggacactccatgagtgtctgtgagaggcagctatctgcactctaaactgcaaacagaaatcaggtgttttaagactgaatgttttatttatcaaaatgtagcttttggggagggaggggaaatgtaatactggaataatttgtaaatgattttaattttatattcagtgaaaagattttatttatggaattaaccatttaataaagaaatatttacctaa

SEQ ID NO: 315392 - DNA, 2352 bp, Homo sapiens
agcggagaccgcgagcgagagcgcccccgagcagcgcccgcgccctccgcgccttctccgccgggacctcgagcgaaagacgcccgcccgccgcccagccctcgcctccctgcccaccgggcacaccgcgccgccaccccgaccccgctgcgcacggcctgtccgctgcacaccagcttgttggcgtcttcgtcgccgcgctcgccccgggctactcctgcgcgccacaatgagctcccgcatcgccagggcgctcgccttagtcgtcacccttctccacttgaccaggctggcgctctccacctgccccgctgcctgccactgccccctggaggcgcccaagtgcgcgccgggagtcgggctggtccgggacggctgcggctgctgtaaggtctgcgccaagcagctcaacgaggactgcagcaaaacgcagccctgcgaccacaccaaggggctggaatgcaacttcggcgccagctccaccgctctgaaggggatctgcagagctcagtcagagggcagaccctgtgaatataactccagaatctaccaaaacggggaaagtttccagcccaactgtaaacatcagtgcacatgtattgatggcgccgtgggctgcattcctctgtgtccccaagaactatctctccccaacttgggctgtcccaaccctcggctggtcaaagttaccgggcagtgctgcgaggagtgggtctgtgacgaggatagtatcaaggaccccatggaggaccaggacggcctccttggcaaggagctgggattcgatgcctccgaggtggagttgacgagaaacaatgaattgattgcagttggaaaaggcagctcactgaagcggctccctgtttttggaatggagcctcgcatcctatacaaccctttacaaggccagaaatgtattgttcaaacaacttcatggtcccagtgctcaaagacctgtggaactggtatctccacacgagttaccaatgacaaccctgagtgccgccttgtgaaagaaacccggatttgtgaggtgcggccttgtggacagccagtgtacagcagcctgaaaaagggcaagaaatgcagcaagaccaagaaatcccccgaaccagtcaggtttacttacgctggatgtttgagtgtgaagaaataccggcccaagtactgcggttcctgcgtggacggccgatgctgcacgccccagctgaccaggactgtgaagatgcggttccgctgcgaagatggggagacattttccaagaacgtcatgatgatccagtcctgcaaatgcaactacaactgcccgcatgccaatgaagcagcgtttcccttctacaggctgttcaatgacattcacaaatttagggactaaatgctacctgggtttccagggcacacctagacaaacaagggagaagagtgtcagaatcagaatcatggagaaaatgggcgggggtggtgtgggtgatgggactcattgtagaaaggaagccttgctcattcttgaggagcattaaggtatttcgaaactgccaagggtgctggtgcggatggacactaatgcagccacgattggagaatactttgcttcatagtattggagcacatgttactgcttcattttggagcttgtggagttgatgactttctgttttctgtttgtaaattatttgctaagcatattttctctaggcttttttccttttggggttctacagtcgtaaaagagataataagattagttggacagtttaaagcttttattcgtcctttgacaaaagtaaatgggagggcattccatcccttcctgaagggggacactccatgagtgtctgtgagaggcagctatctgcactctaaactgcaaacagaaatcaggtgttttaagactgaatgttttatttatcaaaatgtagcttttggggagggaggggaaatgtaatactggaataatttgtaaatgattttaattttatattcagtgaaaagattttatttatggaattaaccatttaataaagaaatatttacctaatatctgagtgtatgccattcggtatttttagaggtgctccaaagtcattaggaacaacctagctcacgtactcaattattcaaacaggacttattgggatacagcagtgaattaagctattaaaataagataatgattgcttttataccttcagtagagaaaagtctttgcatataaagtaatgtttaaaaaacatgtattgaacacgacattgtatgaagcacaataaagattctgaagctaaatttgtgatttaagaaaacagcgcttcatgttcatcagaatataaagcctaagggtctccatcactctgt

SEQ ID NO: 315393 - DNA, 2168 bp, Homo sapiens
agcggagaccgcgagcgagagcgcccccgagcagcgcccgcgccctccgcgccttctccgccgggacctcgagcgaaagacgcccgcccgccgcccagccctcgcctccctgcccaccgggcacaccgcgccgccaccccgaccccgctgcgcacggcctgtccgctgcacaccagcttgttggcgtcttcgtcgccgcgctcgccccgggctactcctgcgcgccacaatgagctcccgcatcgccagggcgctcgccttagtcgtcacccttctccacttgaccaggctggcgctctccacctgccccgctgcctgccactgccccctggaggcgcccaagtgcgcgccgggagtcgggctggtccgggacggctgcggctgctgtaaggtctgcgccaagcagctcaacgaggactgcagcaaaacgcagccctgcgaccacaccaaggggctggaatgcaacttcggcgccagctccaccgctctgaaggggatctgcagagctcagtcagagggcagaccctgtgaatataactccagaatctaccaaaacggggaaagtttccagcccaactgtaaacatcagtgcacatgtattgatggcgccgtgggctgcattcctctgtgtccccaagaactatctctccccaacttgggctgtcccaaccctcggctggtcaaagttaccgggcagtgctgcgaggagtgggtctgtgacgaggatagtatcaaggaccccatggaggaccaggacggcctccttggcaaggagctgggattcgatgcctccgaggtggagttgacgagaaacaatgaattgattgcagttggaaaaggcagctcactgaagcggctccctggtaagtggagactgagcacttcagacactgtactgagatgcatttctggtctaaatctttgtagaaatgagtgcttgagcctgtttgtgtcggtatgcctctgagaagtcttccctcttatatgtctctatttttggaatggagcctcgcatcctatacaaccctttacaaggccagaaatgtattgttcaaacaacttcatggtcccagtgctcaaagacctgtggaactggtatctccacacgagttaccaatgacaaccctgagtgccgccttgtgaaagaaacccggatttgtgaggtgcggccttgtggacagccagtgtacagcagcctgaaaaagggcaagaaatgcagcaagaccaagaaatcccccgaaccagtcaggtttacttacgctggatgtttgagtgtgaagaaataccggcccaagtactgcggttcctgcgtggacggccgatgctgcacgccccagctgaccaggactgtgaagatgcggttccgctgcgaagatggggagacattttccaagaacgtcatgatgatccagtcctgcaaatgcaactacaactgcccgcatgccaatgaagcagcgtttcccttctacaggctgttcaatgacattcacaaatttagggactaaatgctacctgggtttccagggcacacctagacaaacaagggagaagagtgtcagaatcagaatcatggagaaaatgggcgggggtggtgtgggtgatgggactcattgtagaaaggaagccttgctcattcttgaggagcattaaggtatttcgaaactgccaagggtgctggtgcggatggacactaatgcagccacgattggagaatactttgcttcatagtattggagcacatgttactgcttcattttggagcttgtggagttgatgactttctgttttctgtttgtaaattatttgctaagcatattttctctaggcttttttccttttggggttctacagtcgtaaaagagataataagattagttggacagtttaaagcttttattcgtcctttgacaaaagtaaatgggagggcattccatcccttcctgaagggggacactccatgagtgtctgtgagaggcagctatctgcactctaaactgcaaacagaaatcaggtgttttaagactgaatgttttatttatcaaaatgtagcttttggggagggaggggaaatgtaatactggaataatttgtaaatgattttaattttatattcagtgaaaagattttatttatggaattaaccatttaataaagaaatatttacctaa

SEQ ID NO: 315394 - DNA, 2153 bp, Homo sapiens
agcggagaccgcgagcgagagcgcccccgagcagcgcccgcgccctccgcgccttctccgccgggacctcgagcgaaagacgcccgcccgccgcccagccctcgcctccctgcccaccgggcacaccgcgccgccaccccgaccccgctgcgcacggcctgtccgctgcacaccagcttgttggcgtcttcgtcgccgcgctcgccccgggctactcctgcgcgccacaatgagctcccgcatcgccagggcgctcgccttagtcgtcacccttctccacttgaccaggctggcgctctccacctgccccgctgcctgccactgccccctggaggcgcccaagtgcgcgccgggagtcgggctggtccgggacggctgcggctgctgtaaggtctgcgccaagcagctcaacgaggactgcagcaaaacgcagccctgcgaccacaccaaggggctggaatgcaacttcggcgccagctccaccgctctgaaggggatctgcagagctcagtcagagggcagaccctgtgaatataactccagaatctaccaaaacggggaaagtttccagcccaactgtaaacatcagtgcacatgtattgatggcgccgtgggctgcattcctctgtgtccccaagaactatctctccccaacttgggctgtcccaaccctcggctggtcaaagttaccgggcagtgctgcgaggagtgggtctgtgacgaggatagtatcaaggaccccatggaggaccaggacggcctccttggcaaggagctgggattcgatgcctccgaggtggagttgacgagaaacaatgaattgattgcagttggaaaaggcagctcactgaagcggctccctgtttttggaatggagcctcgcatcctatacaaccctttacaaggccagaaatgtattgttcaaacaacttcatggtcccagtgctcaaagacctgtggaactggtatctccacacgagttaccaatgacaaccctgagtgccgccttgtgaaagaaacccggatttgtgaggtgcggccttgtggacagccagtgtacagcagcctgaaagtaagttccttcagggacgtgtagactgttgcctggcaggtgggtgggatgtgaacatctttttgaagaaagagaaatatcacccctaactttccttctctcctttctcttacagaagggcaagaaatgcagcaagaccaagaaatcccccgaaccagtcaggtttacttacgctggatgtttgagtgtgaagaaataccggcccaagtactgcggttcctgcgtggacggccgatgctgcacgccccagctgaccaggactgtgaagatgcggttccgctgcgaagatggggagacattttccaagaacgtcatgatgatccagtcctgcaaatgcaactacaactgcccgcatgccaatgaagcagcgtttcccttctacaggctgttcaatgacattcacaaatttagggactaaatgctacctgggtttccagggcacacctagacaaacaagggagaagagtgtcagaatcagaatcatggagaaaatgggcgggggtggtgtgggtgatgggactcattgtagaaaggaagccttgctcattcttgaggagcattaaggtatttcgaaactgccaagggtgctggtgcggatggacactaatgcagccacgattggagaatactttgcttcatagtattggagcacatgttactgcttcattttggagcttgtggagttgatgactttctgttttctgtttgtaaattatttgctaagcatattttctctaggcttttttccttttggggttctacagtcgtaaaagagataataagattagttggacagtttaaagcttttattcgtcctttgacaaaagtaaatgggagggcattccatcccttcctgaagggggacactccatgagtgtctgtgagaggcagctatctgcactctaaactgcaaacagaaatcaggtgttttaagactgaatgttttatttatcaaaatgtagcttttggggagggaggggaaatgtaatactggaataatttgtaaatgattttaattttatattcagtgaaaagattttatttatggaattaaccatttaataaagaaatatttacctaa

SEQ ID NO: 315395 - DNA, 1936 bp, Homo sapiens
agcggagaccgcgagcgagagcgcccccgagcagcgcccgcgccctccgcgccttctccgccgggacctcgagcgaaagacgcccgcccgccgcccagccctcgcctccctgcccaccgggcacaccgcgccgccaccccgaccccgctgcgcacggcctgtccgctgcacaccagcttgttggcgtcttcgtcgccgcgctcgccccgggctactcctgcgcgccacaatgagctcccgcatcgccagggcgctcgccttagtcgtcacccttctccacttgaccaggctggcgctctccacctgccccgctgcctgccactgccccctggaggcgcccaagtgcgcgccgggagtcgggctggtccgggacggctgcggctgctgtaaggtctgcgccaagcagctcaacgaggactgcagcaaaacgcagccctgcgaccacaccaaggggctggaatgcaacttcggcgccagctccaccgctctgaaggggatctgcagagctcagtcagagggcagaccctgtgaatataactccagaatctaccaaaacggggaaagtttccagcccaactgtaaacatcagtgcacatgtattgatggcgccgtgggctgcattcctctgtgtccccaagaactatctctccccaacttgggctgtcccaaccctcggctggtcaaagttaccgggcagtgctgcgaggagtgggtctaattgattgcagttggaaaaggcagctcactgaagcggctccctgtttttggaatggagcctcgcatcctatacaaccctttacaaggccagaaatgtattgttcaaacaacttcatggtcccagtgctcaaagacctgtggaactggtatctccacacgagttaccaatgacaaccctgagtgccgccttgtgaaagaaacccggatttgtgaggtgcggccttgtggacagccagtgtacagcagcctgaaaaagggcaagaaatgcagcaagaccaagaaatcccccgaaccagtcaggtttacttacgctggatgtttgagtgtgaagaaataccggcccaagtactgcggttcctgcgtggacggccgatgctgcacgccccagctgaccaggactgtgaagatgcggttccgctgcgaagatggggagacattttccaagaacgtcatgatgatccagtcctgcaaatgcaactacaactgcccgcatgccaatgaagcagcgtttcccttctacaggctgttcaatgacattcacaaatttagggactaaatgctacctgggtttccagggcacacctagacaaacaagggagaagagtgtcagaatcagaatcatggagaaaatgggcgggggtggtgtgggtgatgggactcattgtagaaaggaagccttgctcattcttgaggagcattaaggtatttcgaaactgccaagggtgctggtgcggatggacactaatgcagccacgattggagaatactttgcttcatagtattggagcacatgttactgcttcattttggagcttgtggagttgatgactttctgttttctgtttgtaaattatttgctaagcatattttctctaggcttttttccttttggggttctacagtcgtaaaagagataataagattagttggacagtttaaagcttttattcgtcctttgacaaaagtaaatgggagggcattccatcccttcctgaagggggacactccatgagtgtctgtgagaggcagctatctgcactctaaactgcaaacagaaatcaggtgttttaagactgaatgttttatttatcaaaatgtagcttttggggagggaggggaaatgtaatactggaataatttgtaaatgattttaattttatattcagtgaaaagattttatttatggaattaaccatttaataaagaaatatttacctaa

SEQ ID NO: 315396 - DNA, 2283 bp, Homo sapiens
agcggagaccgcgagcgagagcgcccccgagcagcgcccgcgccctccgcgccttctccgccgggacctcgagcgaaagacgcccgcccgccgcccagccctcgcctccctgcccaccgggcacaccgcgccgccaccccgaccccgctgcgcacggcctgtccgctgcacaccagcttgttggcgtcttcgtcgccgcgctcgccccgggctactcctgcgcgccacaatgagctcccgcatcgccagggcgctcgccttagtcgtcacccttctccacttgaccaggctggcgctctccacctgccccgctgcctgccactgccccctggaggcgcccaagtgcgcgccgggagtcgggctggtccgggacggctgcggctgctgtaaggtctgcgccaagcagctcaacgaggactgcagcaaaacgcagccctgcgaccacaccaaggggctggaatgcaacttcggcgccagctccaccgctctgaaggggatctgcagagctcagtcagagggcagaccctgtgaatataactccagaatctaccaaaacggggaaagtttccagcccaactgtaaacatcagtgcacatgtattgatggcgccgtgggctgcattcctctgtgtccccaagaactatctctccccaacttgggctgtcccaaccctcggctggtcaaagttaccgggcagtgctgcgaggagtgggtctgtgacgaggatagtatcaaggaccccatggaggaccaggacggcctccttggcaaggagctgggattcgatgcctccgaggtggagttgacgagaaacaatgaattgattgcagttggaaaaggcagctcactgaagcggctccctggtaagtggagactgagcacttcagacactgtactgagatgcatttctggtctaaatctttgtagaaatgagtgcttgagcctgtttgtgtcggtatgcctctgagaagtcttccctcttatatgtctctatttttggaatggagcctcgcatcctatacaaccctttacaaggccagaaatgtattgttcaaacaacttcatggtcccagtgctcaaagacctgtggaactggtatctccacacgagttaccaatgacaaccctgagtgccgccttgtgaaagaaacccggatttgtgaggtgcggccttgtggacagccagtgtacagcagcctgaaagtaagttccttcagggacgtgtagactgttgcctggcaggtgggtgggatgtgaacatctttttgaagaaagagaaatatcacccctaactttccttctctcctttctcttacagaagggcaagaaatgcagcaagaccaagaaatcccccgaaccagtcaggtttacttacgctggatgtttgagtgtgaagaaataccggcccaagtactgcggttcctgcgtggacggccgatgctgcacgccccagctgaccaggactgtgaagatgcggttccgctgcgaagatggggagacattttccaagaacgtcatgatgatccagtcctgcaaatgcaactacaactgcccgcatgccaatgaagcagcgtttcccttctacaggctgttcaatgacattcacaaatttagggactaaatgctacctgggtttccagggcacacctagacaaacaagggagaagagtgtcagaatcagaatcatggagaaaatgggcgggggtggtgtgggtgatgggactcattgtagaaaggaagccttgctcattcttgaggagcattaaggtatttcgaaactgccaagggtgctggtgcggatggacactaatgcagccacgattggagaatactttgcttcatagtattggagcacatgttactgcttcattttggagcttgtggagttgatgactttctgttttctgtttgtaaattatttgctaagcatattttctctaggcttttttccttttggggttctacagtcgtaaaagagataataagattagttggacagtttaaagcttttattcgtcctttgacaaaagtaaatgggagggcattccatcccttcctgaagggggacactccatgagtgtctgtgagaggcagctatctgcactctaaactgcaaacagaaatcaggtgttttaagactgaatgttttatttatcaaaatgtagcttttggggagggaggggaaatgtaatactggaataatttgtaaatgattttaattttatattcagtgaaaagattttatttatggaattaaccatttaataaagaaatatttacctaa

SEQ ID NO: 315397 - DNA, 1958 bp, Homo sapiens
agcggagaccgcgagcgagagcgcccccgagcagcgcccgcgccctccgcgccttctccgccgggacctcgagcgaaagacgcccgcccgccgcccagccctcgcctccctgcccaccgggcacaccgcgccgccaccccgaccccgctgcgcacggcctgtccgctgcacaccagcttgttggcgtcttcgtcgccgcgctcgccccgggctactcctgcgcgccacaatgagctcccgcatcgccagggcgctcgccttagtcgtcacccttctccacttgaccaggctggcgctctccacctgccccgctgcctgccactgccccctggaggcgcccaagtgcgcgccgggagtcgggctggtccgggacggctgcggctgctgtaaggtctgcgccaagcagctcaacgaggactgcagcaaaacgcagccctgcgaccacaccaaggggctggaatgcaacttcggcgccagctccaccgctctgaaggggatctgcagagctcagtcagagggcagaccctgtgaatataactccagaatctaccaaaacggggaaagtttccagcccaactgtaaacatcagtgcacatgtattgatggcgccgtgggctgcattcctctgtgtccccaagaactatctctccccaacttgggctgtcccaaccctcggctggtcaaagttaccgggcagtgctgcgaggagtgggtctgtgacgaggatagtatcaaggaccccatggaggaccaggacggcctccttggcaaggagctgggattcgatgcctccgaggtggagttgacgagaaacaatgaattgattgcagttggaaaaggcagctcactgaagcggctccctgtttttggaatggagcctcgcatcctatacaaccctttacaaggccagaaatgtattgttcaaacaacttcatggtcccagtgctcaaagacctgtggaactggtatctccacacgagttaccaatgacaaccctgagtgccgccttgtgaaagaaacccggatttgtgaggtgcggccttgtggacagccagtgtacagcagcctgaaaaagggcaagaaatgcagcaagaccaagaaatcccccgaaccagtcaggtttacttacgctggatgtttgagtgtgaagaaataccggcccaagtactgcggttcctgcgtggacggccgatgctgcacgccccagctgaccaggactgtgaagatgcggttccgctgcgaagatggggagacattttccaagaacgtcatgatgatccagtcctgcaaatgcaactacaactgcccgcatgccaatgaagcagcgtttcccttctacaggctgttcaatgacattcacaaatttagggactaaatgctacctgggtttccagggcacacctagacaaacaagggagaagagtgtcagaatcagaatcatggagaaaatgggcgggggtggtgtgggtgatgggactcattgtagaaaggaagccttgctcattcttgaggagcattaaggtatttcgaaactgccaagggtgctggtgcggatggacactaatgcagccacgattggagaatactttgcttcatagtattggagcacatgttactgcttcattttggagcttgtggagttgatgactttctgttttctgtttgtaaattatttgctaagcatattttctctaggcttttttccttttggggttctacagtcgtaaaagagataataagattagttggacagtttaaagcttttattcgtcctttgacaaaagtaaatgggagggcattccatcccttcctgaagggggacactccatgagtgtctgtgagaggcagctatctgcactctaaactgcaaacagaaatcaggtgttttaagactgaatgttttatttatcaaaatgtagcttttggggagacgcgtcaaaatcggtaactctaggtca

SEQ ID NO: 315398 - DNA, 1763 bp, Homo sapiens
agcggagaccgcgagcgagagcgcccccgagcagcgcccgcgccctccgcgccttctccgccgggacctcgagcgaaagacgcccgcccgccgcccagccctcgcctccctgcccaccgggcacaccgcgccgccaccccgaccccgctgcgcacggcctgtccgctgcacaccagcttgttggcgtcttcgtcgccgcgctcgccccgggctactcctgcgcgccacaatgagctcccgcatcgccagggcgctcgccttagtcgtcacccttctccacttgaccaggctggcgctctccacctgccccgctgcctgccactgccccctggaggcgcccaagtgcgcgccgggagtcgggctggtccgggacggctgcggctgctgtaaggtctgcgccaagcagctcaacgaggactgcagcaaaacgcagccctgcgaccacaccaaggggctggaatgcaacttcggcgccagctccaccgctctgaaggggatctgcagagctcagtcagagggcagaccctgtgaatataactccagaatctaccaaaacggggaaagtttccagcccaactgtaaacatcatttttggaatggagcctcgcatcctatacaaccctttacaaggccagaaatgtattgttcaaacaacttcatggtcccagtgctcaaagacctgtggaactggtatctccacacgagttaccaatgacaaccctgagtgccgccttgtgaaagaaacccggatttgtgaggtgcggccttgtggacagccagtgtacagcagcctgaaaaagggcaagaaatgcagcaagaccaagaaatcccccgaaccagtcaggtttacttacgctggatgtttgagtgtgaagaaataccggcccaagtactgcggttcctgcgtggacggccgatgctgcacgccccagctgaccaggactgtgaagatgcggttccgctgcgaagatggggagacattttccaagaacgtcatgatgatccagtcctgcaaatgcaactacaactgcccgcatgccaatgaagcagcgtttcccttctacaggctgttcaatgacattcacaaatttagggactaaatgctacctgggtttccagggcacacctagacaaacaagggagaagagtgtcagaatcagaatcatggagaaaatgggcgggggtggtgtgggtgatgggactcattgtagaaaggaagccttgctcattcttgaggagcattaaggtatttcgaaactgccaagggtgctggtgcggatggacactaatgcagccacgattggagaatactttgcttcatagtattggagcacatgttactgcttcattttggagcttgtggagttgatgactttctgttttctgtttgtaaattatttgctaagcatattttctctaggcttttttccttttggggttctacagtcgtaaaagagataataagattagttggacagtttaaagcttttattcgtcctttgacaaaagtaaatgggagggcattccatcccttcctgaagggggacactccatgagtgtctgtgagaggcagctatctgcactctaaactgcaaacagaaatcaggtgttttaagactgaatgttttatttatcaaaatgtagcttttggggagggaggggaaatgtaatactggaataatttgtaaatgattttaattttatattcagtgaaaagattttatttatggaattaaccatttaataaagaaatatttacctaa

SEQ ID NO: 315399 - DNA, 2174 bp, Homo sapiens
agcggagaccgcgagcgagagcgcccccgagcagcgcccgcgccctccgcgccttctccgccgggacctcgagcgaaagacgcccgcccgccgcccagccctcgcctccctgcccaccgggcacaccgcgccgccaccccgaccccgctgcgcacggcctgtccgctgcacaccagcttgttggcgtcttcgtcgccgcgctcgccccgggctactcctgcgcgccacaatgagctcccgcatcgccagggcgctcgccttagtcgtcacccttctccacttgaccaggctggcgctctccacctgccccgctgcctgccactgccccctggaggcgcccaagtgcgcgccgggagtcgggctggtccgggacggctgcggctgctgtaaggtctgcgccaagcagctcaacgaggactgcagcaaaacgcagccctgcgaccacaccaaggggctggaatgcaacttcggcgccagctccaccgctctgaaggggatctgcagagctcagtcagagggcagaccctgtgaatataactccagaatctaccaaaacggggaaagtttccagcccaactgtaaacatcagtgcacatgtattgatggcgccgtgggctgcattcctctgtgtccccaagaactatctctccccaacttgggctgtcccaaccctcggctggtcaaagttaccgggcagtgctgcgaggagtgggtctgtgacgaggatagtatcaaggaccccatggaggaccaggacggcctccttggcaaggagctgggattcgatgcctccgaggtggagttgacgagaaacaatgaaatgagtgcttgagcctgtttgtgtcggtatgcctctgagaagtcttccctcttatatgtctctatttttggaatggagcctcgcatcctatacaaccctttacaaggccagaaatgtattgttcaaacaacttcatggtcccagtgctcaaagacctgtggaactggtatctccacacgagttaccaatgacaaccctgagtgccgccttgtgaaagaaacccggatttgtgaggtgcggccttgtggacagccagtgtacagcagcctgaaagtaagttccttcagggacgtgtagactgttgcctggcaggtgggtgggatgtgaacatctttttgaagaaagagaaatatcacccctaactttccttctctcctttctcttacagaagggcaagaaatgcagcaagaccaagaaatcccccgaaccagtcaggtttacttacgctggatgtttgagtgtgaagaaataccggcccaagtactgcggttcctgcgtggacggccgatgctgcacgccccagctgaccaggactgtgaagatgcggttccgctgcgaagatggggagacattttccaagaacgtcatgatgatccagtcctgcaaatgcaactacaactgcccgcatgccaatgaagcagcgtttcccttctacaggctgttcaatgacattcacaaatttagggactaaatgctacctgggtttccagggcacacctagacaaacaagggagaagagtgtcagaatcagaatcatggagaaaatgggcgggggtggtgtgggtgatgggactcattgtagaaaggaagccttgctcattcttgaggagcattaaggtatttcgaaactgccaagggtgctggtgcggatggacactaatgcagccacgattggagaatactttgcttcatagtattggagcacatgttactgcttcattttggagcttgtggagttgatgactttctgttttctgtttgtaaattatttgctaagcatattttctctaggcttttttccttttggggttctacagtcgtaaaagagataataagattagttggacagtttaaagcttttattcgtcctttgacaaaagtaaatgggagggcattccatcccttcctgaagggggacactccatgagtgtctgtgagaggcagctatctgcactctaaactgcaaacagaaatcaggtgttttaagactgaatgttttatttatcaaaatgtagcttttggggagggaggggaaatgtaatactggaataatttgtaaatgattttaattttatattcagtgaaaagattttatttatggaattaaccatttaataaagaaatatttacctaa

SEQ ID NO: 315400 - DNA, 1457 bp, Homo sapiens
agcggagaccgcgagcgagagcgcccccgagcagcgcccgcgccctccgcgccttctccgccgggacctcgagcgaaagacgcccgcccgccgcccagccctcgcctccctgcccaccgggcacaccgcgccgccaccccgaccccgctgcgcacggcctgtccgctgcacaccagcttgttggcgtcttcgtcgccgcgctcgccccgggctactcctgcgcgccacaatgagctcccgcatcgccagggcgctcgccttagtcgtcacccttctccacttgaccaggctggcgctctccacctgccccgctgcctgccactgccccctggaggcgcccaagtgcgcgccgggagtcgggctggtccgggacggctgcggctgctgtaaggtctgcgccaagcagctcaacgaggactgcagcaaaacgcagccctgcgaccacaccaaggggctggaatgcaacttcggcgccagctccaccgctctgaaggggatctgcagagctcagtcagagggcagaccctgtgaatataactccagaatctaccaaaacggggaaagtttccagcccaactgtaaacatcagtgcacatgtattgatggcgccgtgggctgcattcctctgtgtccccaagaactatctctccccaacttgggctgtcccaaccctcggctggtcaaagttaccgggcagtgctgcgaggagtgggtctgtgacgaggatagtatcaaggaccccatggaggaccaggacggcctccttggcaaggagctgggattcgatgcctccgaggtggagttgacgagaaacaatgaattgattgcagttggaaaaggcagctcactgaagcggctccctgtttttggaatggagcctcgcatcctatacaaccctttacaaggccagaaatgtattgttcaaacaacttcatggtcccagtgctcaaagacctgtggaactggtatctccacacgagttaccaatgacaaccctgagtgccgccttgtgaaagaaacccggatttgtgaggtgcggccttgtggacagccagtgtacagcagcctgaaaaagggcaagaaatgcagcaagaccaagaaatcccccgaaccagtcaggtttacttacgctggatgtttgagtgtgaagaaataccggcccaagtactgcggttcctgcgtggacggccgatgctgcacgccccatatctaacaacgtaaaaataaaatgacagtttgaacatttcaaaaacccacccattcctccccacaatcatcgccttacacgctaatcctactattccccttttatactaatatcttattaaaaaaaaaagaagcggcaccaaaaacaaaaaaaccgggggtttttggggggggcgaaaaggagaagggggccggttcattgttccccgcccctttgaaaggggacacgggccccaagggggtaagaaacg

SEQ ID NO: 315401 - DNA, 592 bp, Homo sapiens
cgtgtgactcttgaggatccccttcatgtcgaggggcattccatcccttcctgaagggggacactccatgagtgtctgtgagaggcagctatctgcactctaaactgcaaacagaaatcaggtgttttaagactgaatgttttatttatcaaaatgtagcttttggggagggaggggaaatgtaatactggaataatttgtaaatgattttaattttatattcagtgaaaagattttatttatggaattaaccatttaataaagaaatatttacctaatatctgagtgtatgccattcggtatttttagaggtgctccaaagtcattaggaacaacctagctcacgtactcaattattcaaacaggacttattgggatacagcagtgaattaagctattaaaataagataatgattgcttttataccttcagtagagaaaagtctttgcatataaagtaatgtttaaaaaacatgtattgaacacgacattgtatgaagcacaataaagattctgaagctaaatttgtgatttaagaaaacagcgcttcatgttcatcagaatataaagcctaagggtctccatcactctgt

SEQ ID NO: 315402 - DNA, 746 bp, Homo sapiens
  misc_feature (186)..(186): n is a, c, g, or t
ttatctagaggatcaccttcatgtcagtgctttcatgcaggtggccaggagtacccatgcacatgcagtgtggggtgtgggcatctcaggtggtgttctggtaaaatgttagaatagctgtatgaaggaaaccagtgggaggaaatgaagttttcgggatgaagggcctggacatgaatcatgtcnagggcattccatcccttcctgaagggggacactccatgagtgtctgtgagaggcagctatctgcactctaaactgcaaacagaaatcaggtgttttaagactgaatgttttatttatcaaaatgtagcttttggggagggaggggaaatgtaatactggaataatttgtaaatgattttaattttatattcagtgaaaagattttatttatggaattaaccatttaataaagaaatatttacctaatatctgagtgtatgccattcggtatttttagaggtgctccaaagtcattaggaacaacctagctcacgtactcaattattcaaacaggacttattgggatacagcagtgaattaagctattaaaataagataatgattgcttttataccttcagtagagaaaagtctttgcatataaagtaatgtttaaaaaacatgtattgaacacgacattgtatgaagcacaataaagattctgaagctaaatttgtgatttaagaaaacagcgcttcatgttcatcagaatataaagcctaagggtctccatcactctgt

SEQ ID NO: 315403 - DNA, 2481 bp, Homo sapiens
agcggagaccgcgagcgagagcgcccccgagcagcgcccgcgccctccgcgccttctccgccgggacctcgagcgaaagacgcccgcccgccgcccagccctcgcctccctgcccaccgggcacaccgcgccgccaccccgaccccgctgcgcacggcctgtccgctgcacaccagcttgttggcgtcttcgtcgccgcgctcgccccgggctactcctgcgcgccacaatgagctcccgcatcgccagggcgctcgccttagtcgtcacccttctccacttgaccaggctggcgctctccacctgccccgctgcctgccactgccccctggaggcgcccaagtgcgcgccgggagtcgggctggtccgggacggctgcggctgctgtaaggtctgcgccaagcagctcaacgaggactgcagcaaaacgcagccctgcgaccacaccaaggggctggaatgcaacttcggcgccagctccaccgctctgaaggggatctgcagagctcagtcagagggcagaccctgtgaatataactccagaatctaccaaaacggggaaagtttccagcccaactgtaaacatcagtgcacatgtattgatggcgccgtgggctgcattcctctgtgtccccaagaactatctctccccaacttgggctgtcccaaccctcggctggtcaaagttaccgggcagtgctgcgaggagtgggtctgtgacgaggatagtatcaaggaccccatggaggaccaggacggcctccttggcaaggagctgggattcgatgcctccgaggtggagttgacgagaaacaatgaattgattgcagttggaaaaggcagctcactgaagcggctccctgtttttggaatggagcctcgcatcctatacaaccctttacaaggccagaaatgtattgttcaaacaacttcatggtcccagtgctcaaagacctgtggaactggtatctccacacgagttaccaatgacaaccctgagtgccgccttgtgaaagaaacccggatttgtgaggtgcggccttgtggacagccagtgtacagcagcctgaaaaagggcaagaaatgcagcaagaccaagaaatcccccgaaccagtcaggtttacttacgctggatgtttgagtgtgaagaaataccggcccaagtactgcggttcctgcgtggacggccgatgctgcacgccccagctgaccaggactgtgaagatgcggttccgctgcgaagatggggagacattttccaagaacgtcatgatgatccagtcctgcaaatgcaactacaactgcccgcatgccaatgaagcagcgtttcccttctacaggctgttcaatgacattcacaaatttagggactaaatgctacctgggtttccagggcacacctagacaaacaagggagaagagtgtcagaatcagaatcatggagaaaatgggcgggggtggtgtgggtgatgggactcattgtagaaaggaagccttgctcattcttgaggagcattaaggtatttcgaaactgccaagggtgctggtgcggatggacactaatgcagccacgattggagaatactttgcttcatagtattggagcacatgttactgcttcattttggagcttgtggagttgatgactttctgttttctgtttgtaaattatttgctaagcatattttctctaggcttttttccttttggggttctacagtcgtaaaagagataataagattagttggacagtttaaagcttttattcgtcctttgacaaaagtaaatgggagggcattccatcccttcctgaagggggacactccatgagtgtctgtgagaggcagctatctgcactctaaactgcaaacagaaatcaggtgttttaagactgaatgttttatttatcaaaatgtagcttttggggagggaggggaaatgtaatactggaataatttgtaaatgattttaattttatattcagtgaaaagattttatttatggaattaaccatttaataaagaaatatttacctaaaaaaaaaaaaaaaaaaaaaaaaaaaaaaaaaaaaaaaaaaagagagagagaagaaaaaaaaaaaaaaaaaaaaaaagaaagaaaaaaaaaaaaaaaaaaaaaaggggaggggcggggaaaaggggcccccaaatgggaagcacaaaaaacaagagcagacataggtactggtaaaacaaacgagcacagaaaaagggagaaatcgaacaagcagggaacctctggaaggaccccaaaacagcgggaggggggcaaacaaaagagggaagaagaaaacaacagaggaaagagagaaaagcaaaccactccaaggagggaagaagagaacaaaacgacaaacggactaaaccaggagcggacaaaaaaaaaccaagacagagagaggcggacaacaaacaacaatccgaggccaaaagaggcagaagaaaaaaagaagaaaatta

SEQ ID NO: 315404 - DNA, 1570 bp, Homo sapiens
  misc_feature (31)..(31): n is a, c, g, or t
ggactcccggcagaatacactcaaagggatntgcagagctcagtcagagggcagaccctgtgaatataactccagaatctaccaaaacggggaaagtttccagcccaactgtaaacatcagtgcacatgtattgatggcgccgtgggctgcattcctctgtgtccccaagaactatctctccccaacttgggctgtcccaaccctcggctggtcaaagttaccgggcagtgctgcgaggagtgggtctgtgacgaggatagtatcaaggaccccatggaggaccaggacggcctccttggcaaggagctgggattcgatgcctccgaggtggagttgacgagaaacaatgaattgattgcagttggaaaaggcagctcactgaagcggctccctgtttttggaatggagcctcgcatcctatacaaccctttacaaggccagaaatgtattgttcaaacaacttcatggtcccagtgctcaaagacctgtggaactggtatctccacacgagttaccaatgacaaccctgagtgccgccttgtgaaagaaacccggatttgtgaggtgcggccttgtggacagccagtgtacagcagcctgaaaaagggcaagaaatgcagcaagaccaagaaatcccccgaaccagtcaggtttacttacgctggatgtttgagtgtgaagaaataccggcccaagtactgcggttcctgcgtggacggccgatgctgcacgccccagctgaccaggactgtgaagatgcggttccgctgcgaagatggggagacattttccaagaacgtcatgatgatccagtcctgcaaatgcaactacaactgcccgcatgccaatgaagcagcgtttcccttctacaggctgttcaatgacattcacaaatttagggactaaatgctacctgggtttccagggcacacctagacaaacaagggagaagagtgtcagaatcagaatcatggagaaaatgggcgggggtggtgtgggtgatgggactcattgtagaaaggaagccttgctcattcttgaggagcattaaggtatttcgaaactgccaagggtgctggtgcggatggacactaatgcagccacgattggagaatactttgcttcatagtattggagcacatgttactgcttcattttggagcttgtggagttgatgactttctgttttctgtttgtaaattatttgctaagcatattttctctaggcttttttccttttggggttctacagtcgtaaaagagataataagattagttggacagtttaaagcttttattcgtcctttgacaaaagtaaatgggagggcattccatcccttcctgaagggggacactccatgagtgtctgtgagaggcagctatctgcactctaaactgcaaacagaaatcaggtgttttaagactgaatgttttatttatcaaaatgtagcttttggggagggaggggaaatgtaatactggaataatttgtaaatgattttaattttatattcagtgaaaagattttatttatggaattaaccatttaataaagaaatatttacctaa

SEQ ID NO: 315405 - DNA, 2281 bp, Homo sapiens
agcggagaccgcgagcgagagcgcccccgagcagcgcccgcgccctccgcgccttctccgccgggacctcgagcgaaagacgcccgcccgccgcccagccctcgcctccctgcccaccgggcacaccgcgccgccaccccgaccccgctgcgcacggcctgtccgctgcacaccagcttgttggcgtcttcgtcgccgcgctcgccccgggctactcctgcgcgccacaatgagctcccgcatcgccagggcgctcgccttagtcgtcacccttctccacttgaccaggctggcgctctccacctgccccgctgcctgccactgccccctggaggcgcccaagtgcgcgccgggagtcgggctggtccgggacggctgcggctgctgtaaggtctgcgccaagcagctcaacgaggactgcagcaaaacgcagccctgcgaccacaccaaggggctggaatgcaacttcggcgccagctccaccgctctgaaggggatctgcagagctcagtcagagggcagaccctgtgaatataactccagaatctaccaaaacggggaaagtttccagcccaactgtaaacatcagtgcacatgtattgatggcgccgtgggctgcattcctctgtgtccccaagaactatctctccccaacttgggctgtcccaaccctcggctggtcaaagttaccgggcagtgctgcgaggagtgggtctgtgacgaggatagtatcaaggaccccatggaggaccaggacggcctccttggcaaggagctgggattcgatgcctccgaggtggagttgacgagaaacaatgaattgattgcagttggaaaaggcagctcactgaagcggctccctgtttttggaatggagcctcgcatcctatacaaccctttacaaggccagaaatgtattgttcaaacaacttcatggtcccagtgctcaaagacctgtggaactggtatctccacacgagttaccaatgacaaccctgagtgccgccttgtgaaagaaacccggatttgtgaggtgcggccttgtggacagccagtgtacagcagcctgaaaaagggcaagaaatgcagcaagaccaagaaatcccccgaaccagtcaggtttacttacgctggatgtttgagtgtgaagaaataccggcccaagtactgcggttcctgcgtggacggccgatgctgcacgccccagctgaccaggactgtgaagatgcggttccgctgcgaagatggggagacattttccaagaacgtcatgatgatccagtcctgcaaatgcaactacaactgcccgcatgccaatgaagcagcgtttcccttctacaggctgttcaatgacattcacaaatttagggactaaatgctacctgggtttccagggcacacctagacaaacaagggagaagagtgtcagaatcagaatcatggagaaaatgggcgggggtggtgtgggtgatgggactcattgtagaaaggaagccttgctcattcttgaggagcattaaggtatttcgaaactgccaagggtgctggtgcggatggacactaatgcagccacgattggagaatactttgcttcatagtattggagcacatgttactgcttcattttggagcttgtggagttgatgactttctgttttctgtttgtaaattatttgctaagcatattttctctaggcttttttccttttggggttctacagtcgtaaaagagataataagattagttggacagtttaaagcttttattcgtcctttgacaaaagtaaatgggagggcattccatcccttcctgaagggggacactccatgagtgtctgtgagaggcagctatctgcactctaaactgcaaacagaaatcaggtgttttaagactgaatgttttatttatcaaaatgtagcttttggggagggaggggaaatgtaatactggaataatttgtaaatgattttaattttatattcagtgaaaagattttatttatggaattaaccatttaataaagaaatatttacctaatatctgagtgtatgccattcggtatttttagaggtgctccaaagtcattaggaacaacctagctcacgtactcaattattcaaacaggacttattgggatacagcagtgaattaagctattaaaataagataatgattgcttttataccttcagtagagaaaagtctttgcatataaagtaatgtttaaaaaacatgtattgaacacgacattgtatgaagcacaataaagattctgaagcta

SEQ ID NO: 315406 - DNA, 1470 bp, Homo sapiens
gctggactgtctgtatgtgtcacgggacagtgtatcgagtggtgcagtgcgctgtcttggtcggatgttcgctaagactgccccaacttgggctgtcccaaccctcggctggtcaaagttaccgggcagtgctgcgaggagtgggtctgtgacgaggatagtatcaaggaccccatggaggaccaggacggcctccttggcaaggagctgggattcgatgcctccgaggtggagttgacgagaaacaatgaattgattgcagttggaaaaggcagctcactgaagcggctccctgtttttggaatggagcctcgcatcctatacaaccctttacaaggccagaaatgtattgttcaaacaacttcatggtcccagtgctcaaagacctgtggaactggtatctccacacgagttaccaatgacaaccctgagtgccgccttgtgaaagaaacccggatttgtgaggtgcggccttgtggacagccagtgtacagcagcctgaaaaagggcaagaaatgcagcaagaccaagaaatcccccgaaccagtcaggtttacttacgctggatgtttgagtgtgaagaaataccggcccaagtactgcggttcctgcgtggacggccgatgctgcacgccccagctgaccaggactgtgaagatgcggttccgctgcgaagatggggagacattttccaagaacgtcatgatgatccagtcctgcaaatgcaactacaactgcccgcatgccaatgaagcagcgtttcccttctacaggctgttcaatgacattcacaaatttagggactaaatgctacctgggtttccagggcacacctagacaaacaagggagaagagtgtcagaatcagaatcatggagaaaatgggcgggggtggtgtgggtgatgggactcattgtagaaaggaagccttgctcattcttgaggagcattaaggtatttcgaaactgccaagggtgctggtgcggatggacactaatgcagccacgattggagaatactttgcttcatagtattggagcacatgttactgcttcattttggagcttgtggagttgatgactttctgttttctgtttgtaaattatttgctaagcatattttctctaggcttttttccttttggggttctacagtcgtaaaagagataataagattagttggacagtttaaagcttttattcgtcctttgacaaaagtaaatgggagggcattccatcccttcctgaagggggacactccatgagtgtctgtgagaggcagctatctgcactctaaactgcaaacagaaatcaggtgttttaagactgaatgttttatttatcaaaatgtagcttttggggagggaggggaaatgtaatactggaataatttgtaaatgattttaattttatattcagtgaaaagattttatttatggaattaaccatttaataaagaaatatttacctaa

SEQ ID NO: 315407 - DNA, 1985 bp, Homo sapiens
agcggagaccgcgagcgagagcgcccccgagcagcgcccgcgccctccgcgccttctccgccgggacctcgagcgaaagacgcccgcccgccgcccagccctcgcctccctgcccaccgggcacaccgcgccgccaccccgaccccgctgcgcacggcctgtccgctgcacaccagcttgttggcgtcttcgtcgccgcgctcgccccgggctactcctgcgcgccacaatgagctcccgcatcgccagggcgctcgccttagtcgtcacccttctccacttgaccaggctggcgctctccacctgccccgctgcctgccactgccccctggaggcgcccaagtgcgcgccgggagtcgggctggtccgggacggctgcggctgctgtaaggtctgcgccaagcagctcaacgaggactgcagcaaaacgcagccctgcgaccacaccaaggggctggaatgcaacttcggcgccagctccaccgctctgaaggggatctgcagagctcagtcagagggcagaccctgtgaatataactccagaatctaccaaaacggggaaagtttccagcccaactgtaaacatcagtgcacatgtattgatggcgccgtgggctgcattcctctgtgtccccaagaactatctctccccaacttgggctgtcccaaccctcggctggtcaaagttaccgggcagtgctgcgaggagtgggtctgtgacgaggatagtatcaaggaccccatggaggaccaggacggcctccttggcaaggagctgggattcgatgcctccgaggtggagttgacgagaaacaatgaattgattgcagttggaaaaggcagctcactgaagcggctccctgtttttggaatggagcctcgcatcctatacaaccctttacaaggccagaaatgtattgttcaaacaacttcatggtcccagtgctcaaagacctgtggaactggtatctccacacgagttaccaatgacaaccctgagtgccgccttgtgaaagaaacccggatttgtgaggtgcggccttgtggacagccagtgtacagcagcctgaaattacgctggatgtttgagtgtgaagaaataccggcccaagtactgcggttcctgcgtggacggccgatgctgcacgccccagctgaccaggactgtgaagatgcggttccgctgcgaagatggggagacattttccaagaacgtcatgatgatccagtcctgcaaatgcaactacaactgcccgcatgccaatgaagcagcgtttcccttctacaggctgttcaatgacattcacaaatttagggactaaatgctacctgggtttccagggcacacctagacaaacaagggagaagagtgtcagaatcagaatcatggagaaaatgggcgggggtggtgtgggtgatgggactcattgtagaaaggaagccttgctcattcttgaggagcattaaggtatttcgaaactgccaagggtgctggtgcggatggacactaatgcagccacgattggagaatactttgcttcatagtattggagcacatgttactgcttcattttggagcttgtggagttgatgactttctgttttctgtttgtaaattatttgctaagcatattttctctaggcttttttccttttggggttctacagtcgtaaaagagataataagattagttggacagtttaaagcttttattcgtcctttgacaaaagtaaatgggagggcattccatcccttcctgaagggggacactccatgagtgtctgtgagaggcagctatctgcactctaaactgcaaacagaaatcaggtgttttaagactgaatgttttatttatcaaaatgtagcttttggggagggaggggaaatgtaatactggaataatttgtaaatgattttaattttatattcagtgaaaagattttatttatggaattaaccatttaataaagaaatatttacctaa

SEQ ID NO: 315408 - DNA, 1968 bp, Homo sapiens
agcggagaccgcgagcgagagcgcccccgagcagcgcccgcgccctccgcgccttctccgccgggacctcgagcgaaagacgcccgcccgccgcccagccctcgcctccctgcccaccgggcacaccgcgccgccaccccgaccccgctgcgcacggcctgtccgctgcacaccagcttgttggcgtcttcgtcgccgcgctcgccccgggctactcctgcgcgccacaatgagctcccgcatcgccagggcgctcgccttagtcgtcacccttctccacttgaccaggctggcgctctccacctgccccgctgcctgccactgccccctggaggcgcccaagtgcgcgccgggagtcgggctggtccgggacggctgcggctgctgtaaggtctgcgccaagcagctcaacgaggactgcagcaaaacgcagccctgcgaccacaccaaggggctggaatgcaacttcggcgccagctccaccgctctgaaggggatctgcagagctcagtcagagggcagaccctgtgaatataactccagaatctaccaaaacggggaaagtttccagcccaactgtaaacatcagtgcacatgtattgatggcgccgtgggctgcattcctctgtgtccccaagaactatctctccccaacttgggctgtcccaaccctcggctggtcaaagttaccgggcagtgctgcgaggagtgggtctgtgacgaggatagtatcaaggaccccatggaggaccaggacggcctccttggcaaggagctgggattcgatgcctccgaggtggagttgacgagaaacaatgatacaaccctttacaaggccagaaatgtattgttcaaacaacttcatggtcccagtgctcaaagacctgtggaactggtatctccacacgagttaccaatgacaaccctgagtgccgccttgtgaaagaaacccggatttgtgaggtgcggccttgtggacagccagtgtacagcagcctgaaaaagggcaagaaatgcagcaagaccaagaaatcccccgaaccagtcaggtttacttacgctggatgtttgagtgtgaagaaataccggcccaagtactgcggttcctgcgtggacggccgatgctgcacgccccagctgaccaggactgtgaagatgcggttccgctgcgaagatggggagacattttccaagaacgtcatgatgatccagtcctgcaaatgcaactacaactgcccgcatgccaatgaagcagcgtttcccttctacaggctgttcaatgacattcacaaatttagggactaaatgctacctgggtttccagggcacacctagacaaacaagggagaagagtgtcagaatcagaatcatggagaaaatgggcgggggtggtgtgggtgatgggactcattgtagaaaggaagccttgctcattcttgaggagcattaaggtatttcgaaactgccaagggtgctggtgcggatggacactaatgcagccacgattggagaatactttgcttcatagtattggagcacatgttactgcttcattttggagcttgtggagttgatgactttctgttttctgtttgtaaattatttgctaagcatattttctctaggcttttttccttttggggttctacagtcgtaaaagagataataagattagttggacagtttaaagcttttattcgtcctttgacaaaagtaaatgggagggcattccatcccttcctgaagggggacactccatgagtgtctgtgagaggcagctatctgcactctaaactgcaaacagaaatcaggtgttttaagactgaatgttttatttatcaaaatgtagcttttggggagggaggggaaatgtaatactggaataatttgtaaatgattttaattttatattcagtgaaaagattttatttatggaattaaccatttaataaagaaatatttacctaa

SEQ ID NO: 315409 - DNA, 1977 bp, Homo sapiens
agcggagaccgcgagcgagagcgcccccgagcagcgcccgcgccctccgcgccttctccgccgggacctcgagcgaaagacgcccgcccgccgcccagccctcgcctccctgcccaccgggcacaccgcgccgccaccccgaccccgctgcgcacggcctgtccgctgcacaccagcttgttggcgtcttcgtcgccgcgctcgccccgggctactcctgcgcgccacaatgagctcccgcatcgccagggcgctcgccttagtcgtcacccttctccacttgaccaggctggcgctctccacctgccccgctgcctgccactgccccctggaggcgcccaagtgcgcgccgggagtcgggctggtccgggacggctgcggctgctgtaaggtctgcgccaagcagctcaacgaggactgcagcaaaacgcagccctgcgaccacaccaaggggctggaatgcaacttcggcgccagctccaccgctctgaaggggatctgcagagctcagtcagagggcagaccctgtgaatataactccagaatctaccaaaacggggaaagtttccagcccaactgtaaacatcagtgcacatgtattgatggcgccgtgggctgcattcctctgtgtccccaagaactatctctccccaacttgggctgtcccaaccctcggctggtcaaagttaccgggcagtgctgcgaggagtgggtctgtgacgaggatagtatcaaggaccccatggaggaccaggacggcctccttggcaaggagctgggattcgatgcctccgaggtggagttgacgagaaacaatgaattgattgcagttggaaaaggcagctcactgaagcggctccctgtttttggaatggagcctcgcatcctatacaaccctttacaaggccagaaatgtattgttcaaacaacttcatggtcccagtgctcaaagacctgtggaactggtatctccacacgagttaccaatgacaaccctgagtgccgccttgtgaaagaaacccggatttgtgaggtgcggccttgtggacagccagtgtacagcagcctgaaaaagggcaagaaatgcagcaagaccaagaaatcccccgaaccagtcaggtttacttacgctggatgtttgagtgtgaagaaataccggcccaagtactgcggttcctgcgtggacggccgatgctgcacgccccagctgaccaggactgtgaagatgcggttccgctgcgaagatggggagacattttccaagaacgtcatgatgatccagtcctgcaaatgcaactacaactgcccgcatgccaatgaagcagcgtttcccttctacaggctgttcaatgacattcacaaatttagggactaaatgctacctgggtttccagggcacacctagacaaacaagggagaagagtgtcagaatcagaatcatggagaaaatgggcgggggtggtgtgggtgatgggactcattgtagaaaggaagccttgctcattcttgaggagcattaaggtatttcgaaactgccaagggtgctggtgcggatggacactaatgcagccacgattggagaatactttgcttcatagtattggagcacatgttactgcttcattttggagcttgtggagttgatgactttctgttttctgtttgtaaattatttgctaagcatattttctctaggcttttttccttttggggttctacagtcgtaaaagagataataagattagttggacagtttaaagcttttattcgtcctttgacaaaagtaaatgggagggcattccatcccttcctgaagggggacactccatgagtgtctgtgagaggcagctatctgcactctaaactgcaaacagaaatcaggtgttttaagactgaatgttttatttatcaaaatgtagcttttggggagtgaaggcactcgacatgaagggatcctctagagtcgccagcagcatc

SEQ ID NO: 315410 - DNA, 2313 bp, Homo sapiens
agcggagaccgcgagcgagagcgcccccgagcagcgcccgcgccctccgcgccttctccgccgggacctcgagcgaaagacgcccgcccgccgcccagccctcgcctccctgcccaccgggcacaccgcgccgccaccccgaccccgctgcgcacggcctgtccgctgcacaccagcttgttggcgtcttcgtcgccgcgctcgccccgggctactcctgcgcgccacaatgagctcccgcatcgccagggcgctcgccttagtcgtcacccttctccacttgaccaggctggcgctctccacctgccccgctgcctgccactgccccctggaggcgcccaagtgcgcgccgggagtcgggctggtccgggacggctgcggctgctgtaaggtctgcgccaagcagctcaacgaggactgcagcaaaacgcagccctgcgaccacaccaaggggctggaatgcaacttcggcgccagctccaccgctctgaaggggatctgcagagctcagtcagagggcagaccctgtgaatataactccagaatctaccaaaacggggaaagtttccagcccaactgtaaacatcagtgcacatgtattgatggcgccgtgggctgcattcctctgtgtccccaagaactatctctccccaacttgggctgtcccaaccctcggctggtcaaagttaccgggcagtgctgcgaggagtgggtctgtgacgaggatagtatcaaggaccccatggaggaccaggacggcctccttggcaaggagctgggattcgatgcctccgaggtggagttgacgagaaacaatgaattgattgcagttggaaaaggcagctcactgaagcggctccctgtttttggaatggagcctcgcatcctatacaaccctttacaaggccagaaatgtattgttcaaacaacttcatggtcccagtgctcaaagacctgtggaactggtatctccacacgagttaccaatgacaaccctgagtgccgccttgtgaaagaaacccggatttgtgaggtgcggccttgtggacagccagtgtacagcagcctgaaaaagggcaagaaatgcagcaagaccaagaaatcccccgaaccagtcaggtttacttacgctggatgtttgagtgtgaagaaataccggcccaagtactgcggttcctgcgtggacggccgatgctgcacgccccagctgaccaggactgtgaagatgcggttccgctgcgaagatggggagacattttccaagaacgtcatgatgatccagtcctgcaaatgcaactacaactgcccgcatgccaatgaagcagcgtttcccttctacaggctgttcaatgacattcacaaatttagggactaaatgctacctgggtttccagggcacacctagacaaacaagggagaagagtgtcagaatcagaatcatggagaaaatgggcgggggtggtgtgggtgatgggactcattgtagaaaggaagccttgctcattcttgaggagcattaaggtatttcgaaactgccaagggtgctggtgcggatggacactaatgcagccacgattggagaatactttgcttcatagtattggagcacatgttactgcttcattttggagcttgtggagttgatgactttctgttttctgtttgtaaattatttgctaagcatattttctctaggcttttttccttttggggttctacagtcgtaaaagagataataagattagttggacagtttaaagcttttattcgtcctttgacaaaagtaaatgggatgtctgtgagaggcagctatctgcactctaaactgcaaacagaaatcaggtgttttaagactgaatgttttatttatcaaaatgtagcttttggggagggaggggaaatgtaatactggaataatttgtaaatgattttaattttatattcagtgaaaagattttatttatggaattaaccatttaataaagaaatatttacctaatatctgagtgtatgccattcggtatttttagaggtgctccaaagtcattaggaacaacctagctcacgtactcaattattcaaacaggacttattgggatacagcagtgaattaagctattaaaataagataatgattgcttttataccttcagtagagaaaagtctttgcatataaagtaatgtttaaaaaacatgtattgaacacgacattgtatgaagcacaataaagattctgaagctaaatttgtgatttaagaaaacagcgcttcatgttcatcagaatataaagcctaagggtctccatcactctgt

SEQ ID NO: 315411 - DNA, 1932 bp, Homo sapiens
ggcacttagctacgactgcacgtgcgcgcacagctgcccgccggaagaaccgagcttggctgtgtttatctcgttggggactaaggcgtcggttggcgcgcaacgggttctaggctgcaggcagctcgaggacccgcggccccgccccggctcggcctggcagatagcagaggcagcaggccgtgccgggggggcatgttgctgtaaccagtggcccaggggatgttacggtggacagtgcacctggagggcgggccccgcagggtgaaccatgctgcagtggctgtcgggcatcgggtatactccttcgggggttactgctctggtgaagactatgagacactgcgtcagatagatgtgcacattttcaatgcagtgtccttgcgttggacaaagctgcccccggtgaagtctgccatccgtgggcaagctcctgtggtaccctacatgcgctatggacactcaaccgtcctcatcgacgacacagtcctcctttggggcgggcggaatgacaccgaaggggcctgcaatgtgctctatgcctttgacgtcaatacgcacaagtggttcacaccccgagtgtcagggacagttcctggggcccgggatggacattcagcctgtgtcctaggcaagatcatgtacatttttgggggctacgagcagcaggcggactgtttttccaatgacattcacaagctagataccagcaccatgacatggactcttatctgtacaaagggcagccctgcacgctggagggacttccactcagccacaatgctgggaagtcacatgtatgtctttgggggccgtgccgaccgctttgggccattccattccaacaatgagatttactgcaaccgcattcgagtctttgacaccagaactgaggcttggctggactgtcccccgactccagtgctgcctgaggggcgccggagccactcggcctttggctacaatggggagctgtacatctttggtggttataatgcaaggctgaaccggcacttccatgacctctggaagtttaatcctgtgtcctttacctggaaaaagattgaaccgaaggggaaggggccatgtccccgccggcgccagtgctgctgtattgttggtgacaagattgtcctctttgggggtaccagtccatctcctgaggaaggcctgggagatgaatttgaccttatagatcattctgacttacacattttggactttagccctagtctgaagactctgtgcaaactggccgtgattcagtataacctagaccagtcctgtttgcctcatgatatcaggtgggagctgaatgccatgaccaccaacagcaatatcagtcgccccatcgtctcctcccatgggtaggaggaagtttctgccacctcccctcctgagcctgctgtcatcttcactgcccctgcccatctgtcacccacctgctcctttgacccctggacttggtatacctccatgtggagttgttgggcgagaggtgttctctgtgctgtgaattcagtggggagctgtagcggggtgggggctaggttcctccccccttgggccgagggccccttccccttggtgctctgtccccatccacctcctttcagctgctcctgggcctcagctctgcccagggccagccaggttctgctgggaagggaagggaatggggagaagggagaagcaagcagtgtctgagcctcaggagcttccccctccccctttgcctatcccctcccctctgcttgagccttgagccttgactgggagctgaaaggagttgcagctgttggcatgagacctccttctccccgtcttggggaggtggggaccagcagataaatcccacccttccttgagctgtcgctgtactctgaagttcagccagctcagattttataaaaattaattaaaatctcaaaa

SEQ ID NO: 315412 - DNA, 955 bp, Homo sapiens
  misc_feature (17)..(17): n is a, c, g, or t
  misc_feature (19)..(19): n is a, c, g, or t
  misc_feature (24)..(24): n is a, c, g, or t
  misc_feature (39)..(43): n is a, c, g, or t
  misc_feature (49)..(49): n is a, c, g, or t
  misc_feature (52)..(52): n is a, c, g, or t
cctaaggaaacactttnanaggcnacagaggggaatttnnnnntaagtnaanatggaagaagttagtgggtttaacagatatgaacaactgagtttcctttgggggagaggcaatgaaaagagccggagtactttagggatcactttggagaggatattgtagtgggggaaaggaaggtaaaaacttaggaagcagagtagtacctttaaagtcgtcagtactttatataccatcaactgggctatggacaacagaagctgtgcctggaaataactcacactgaaggttaacttgaatataaatttagaacagatcttaaatacaaatgatgatgttcattataaactgttattcttcaaagactcatttaactgaagtaacattgtatttgcataccagagcactggtgtttttcaaaatgagtttaggataagaaaattcacttgaaaagctggagtatgtatgtattttgcgccatcatggattttatcataagcagtgttcaagaaaacaaattacttggggaggtggggaccagcagataaatcccacccttccttgagctgtcgctgtactctgaagttcagccagctcagattttataaaaattaattaaaatctcaaaaaaaaaaaaaaaaaaacaacaaaaaaaacaaaaaaaaaaaaaaaaaaaaaaaaaaataaagagaaccacaacagaaaaagcacaaaaaaaaaaaagaaagaggagggagatcataaaaaacaccgaggggaagcacggaggagtgagcagaaattgagcaaacgagacggcgcgcacagagggagcggaagcacaaagagagagagagcgactacgaaaaacacaagacgagagagaaaaacaagagagaagggagtaaggggagagaacaacacgagggggagaaacaaagaggaaaaaaagaaagaaaaaagagcgcggagaacaaa

SEQ ID NO: 315413 - DNA, 742 bp, Homo sapiens
ctgcccctgcccatctgtcacccacctgctccgtttgacccctggacttggtatacctccatgtggagttgttgggcgagaggtgttctctgtgctgtgaattcagtggggagctgtagcggggtgggggctaggttcctccccccttgggccatgtccccgccggcgccagtgctgctgtattgttggtgacaagattgtcctctttgggggtaccagtccatctcctgaggaaggcctgggagatgaatttgaccttatagatcattctgacttacacattttggactttagccctagtctgaagactctgtgcaaactggccgtgattcagtataacctagaccagtcctgtttgcctcatgatatcaggtgggagctgaatgccatgaccaccaacagcaatatcagtcgccccatcgtctcctcccatgggtaggaggaagtttctgccacctcccctcctgagcctgcaatgtgctctatgcctttgacgtcaatacgcaacaagtggttcacaccccgagtgtcagggacatgttcctggggcccgggatggacattcagcctgtgtcctagggcaagatcatgtacatttttgggggctacgagcagcaggcggactgtttttccaatgacattcaacaagctaaataccagacatgaactggctctattcggtcaagggcagccgggccgctggggggttccctccggcccaagtgggagtccatgtgttctg

SEQ ID NO: 315414 - DNA, 1985 bp, Homo sapiens
ggcacttagctacgactgcacgtgcgcgcacagctgcccgccggaagaaccgagcttggctgtgtttatctcgttggggactaaggcgtcggttggcgcgcaacgggttctaggctgcaggcagctcgaggacccgcggccccgccccggctcggcctggcagatagcagaggcagcaggccgtgccgggggggcatgttgctgtaaccagtggcccaggggatgttacggtggacagtgcacctggagggcgggccccgcagggtgaaccatgctgcagtggctgtcgggcatcgggtatactccttcgggggttactgctctggtgaagactatgagacactgcgtcagatagatgtgcacattttcaatgcagtgtccttgcgttggacaaagctgcccccggtgaagtctgccatccgtgggcaagctcctgtggtaccctacatgcgctatggacactcaaccgtcctcatcgacgacacagtcctcctttggggcgggcggaatgacaccgaaggggcctgcaatgtgctctatgcctttgacgtcaatacgcacaagtggttcacaccccgagtgtcagggacagttcctggggcccgggatggacattcagcctgtgtcctaggcaagatcatgtacatttttgggggctacgagcagcaggcggactgtttttccaatgacattcacaagctagataccagcaccatgacatggactcttatctgtacaaagggcagccctgcacgctggagggacttccactcagccacaatgctgggaagtcacatgtatgtctttgggggccgtgccgaccgctttgggccattccattccaacaatgagatttactgcaaccgcattcgagtctttgacaccagaactgaggcttggctggactgtcccccgactccagtgctgcctgaggggcgccggagccactcggcctttggctacaatggggagctgtacatctttggtggttataatgcaaggctgaaccggcacttccatgacctctggaagtttaatcctgtgtcctttacctggaaaaagattgaaccgaaggggaaggggccatgtccccgccggcgccagtgctgctgtattgttggtgacaagattgtcctctttgggggtaccagtccatctcctgaggaaggcctgggagatgaatttgaccttatagatcattctgacttacacattttggactttagccctagtctgaagactctgtgcaaactggccgtgattcagtataacctagaccagtcctgtttgcctcatgatatcaggtgggagctgaatgccatgaccaccaacagcaatatcagtcgccccatcgtctcctcccatgggtaggaggaagtttctgccacctcccctcctgagcctgctgtcatcttcactgcccctgcccatctgtcacccacctgctcctttgacccctggacttggtatacctccatgtggagttgttgggcgagaggtgttctctgtgctgtgaattcagtggggagctgtagcggggtgggggctaggttcctccccccttgggccgagggccccttccccttggtgctctgtccccatccacctcctttcagctgctcctgggcctcagctctgcccagggccagccaggttctgctgggaagggaagggaatggggagaagggagaagcaagcagtgtctgagcctcaggagcttccccctccccctttgcctatcccctcccctctgcttgagccttgagccttgactgggagctgaaaggagttgcagctgttggcatgagacctccttctccccgtcttggggaggtggggaccagcagataaatcccacccttccttgagctgtcgctgtactctgaagttcagccagctcagattttataaaaattaattaaaatctcaaaaaaaaaacacagacaagaaacttcagggcacacaaaaaacgggtggggaaaagg

SEQ ID NO: 315415 - DNA, 1560 bp, Homo sapiens
ggcacttagctacgactgcacgtgcgcgcacagctgcccgccggaagaaccgagcttggctgtgtttatctcgttggggactaaggcgtcggttggcgcgcaacgggttctaggctgcaggcagctcgaggacccgcggccccgccccggctcggcctggcagatagcagaggcagcaggccgtgccgggggggcatgttgctgtaaccagtggcccaggggatgttacggtggacagtgcacctggagggcgggccccgcagggtgaaccatgctgcagtggctgtcgggcatcgggtatactccttcgggggttactgctctggtgaagactatgagacactgcgtcagatagatgtgcacattttcaatgcagtgtccttgcgttggacaaagctgcccccggtgaagtctgccatccgtgggcaagctcctgtggtaccctacatgcgctatggacactcaaccgtcctcatcgacgacacagtcctcctttggggcgggcggaatgacaccgaaggggcctgcaatgtgctctatgcctttgacgtcaatacgcacaagtggttcacaccccgagtgtcagggacagttcctggggcccgggatggacattcagcctgtgtcctaggcaagatcatgtacatttttgggggctacgagcagcaggcggactgtttttccaatgacattcacaagctagataccagcaccatgacatggactcttatctgtacaaagggcagccctgcacgctggagggacttccactcagccacaatgctgggaagtcacatgtatgtctttgggggccgtgccgaccgctttgggccattccattccaacaatgagatttactgcaaccgcattcgagtctttgacaccagaactgaggcttggctggactgtcccccgactccagtgctgcctgaggggcgccggagccactcggcctttggctacaatggggagctgtacatctttggtggttataatgcaaggctgaaccggcacttccatgacctctggaagtttaatcctgtgtcctttacctggaaaaagattgaaccgaaggggaaggggccatgtccccgccggcgccagtgctgctgtattgttggtgacaagattgtcctctttgggggtaccagtccatctcctgaggaaggcctgggagatgaatttgaccttatagatcattctgacttacacattttggactttagccctagtctgaagactctgtgcaaactggccgtgattcagtataacctagaccagtcctgtttgcctcatgatatcaggtgggagctgaatgccatgaccaccaacagcaatatcagtcgccccatctccccctttgcctatcccctcccctctgcttgagccttgagccttgactgggagctgaaaggagttgcagctgttggcatgagacctccttctccccgtcttggggaggtggggaccagcagataaatcccacccttccttgagctgtcgctgtactctgaagttcagccagctcagattttataaaaattaattaaaatctcaaaa

SEQ ID NO: 315416 - DNA, 1766 bp, Homo sapiens
ggcacttagctacgactgcacgtgcgcgcacagctgcccgccggaagaaccgagcttggctgtgtttatctcgttggggactaaggcgtcggttggcgcgcaacgggttctaggctgcaggcagctcgaggacccgcggccccgccccggctcggcctggcagatagcagaggcagcaggccgtgccgggggggcatgttgctgtaaccagtggcccaggggatgttacggtggacagtgcacctggagggcgggccccgcagggtgaaccatgctgcagtggctgtcgggcatcgggtatactccttcgggggttactgctctggtgaagactatgagacactgcgtcagatagatgtgcacattttcaatgcagtgtccttgcgttggacaaagctgcccccggtgaagtctgccatccgtgggcaagctcctgtggtaccctacatgcgctatggacactcaaccgtcctcatcgacgacacagtcctcctttggggcgggcggaatgacaccgaaggggcctgcaatgtgctctatgcctttgacgtcaatacgcacaagtggttcacaccccgagtgtcagggacagttcctggggcccgggatggacattcagcctgtgtcctaggcaagatcatgtacatttttgggggctacgagcagcaggcggactgtttttccaatgacattcacaagctagataccagcaccatgacatggactcttatctgtacaaagggcagccctgcacgctggagggacttccactcagccacaatgctgggaagtcacatgtatgtctttgggggccgtgccgaccgctttgggccattccattccaacaatgagatttactgcaaccgcattcgagtctttgacaccagaactgaggcttggctggactgtcccccgactccagtgctgcctgaggggcgccggagccactcggcctttggctacaatggggagctgtacatctttggtggttataatgcaaggctgaaccggcacttccatgacctctggaagtttaatcctgtgtcctttacctggaaaaagattgaaccgaaggggaaggggccatgtccccgccggcgccagtgctgctgtattgttggtgacaagattgtcctctttgggggtaccagtccatctcctgaggaaggcctgggagatgaatttgaccttatagatcattctgacttacacattttggactttagccctagtctgaagactctgtgcaaactggccgtgattcagtataacctagaccagtcctgtttgcctcatgatatcaggtgggagctgaatgccatgaccaccaacagcaatatcagtcgccccatcgtctcctcccatgggtaggaggaagtttctgccacctcccctcctgagcctgctgtcatcttcactgcccctgcccatctgtcacccacctgctcctttgacccctggacttggtatacctccatgtggagttgttgggcgagaggtgttctctgtgctgtgaattcagtggggagctgtagcggggtgggggctaggttcctccccccttgggccgagggccccttccccttggtgctctgtccccatccacttggggaggtggggaccagcagataaatcccacccttccttgagctgtcgctgtactctgaagttcagccagctcagattttataaaaattaattaaaatctcaaaaaaaaaacacagacaagaaacttcagggcacacaaaaaacgggtggggaaaagg

SEQ ID NO: 315417 - DNA, 1459 bp, Homo sapiens
ggcacttagctacgactgcacgtgcgcgcacagctgcccgccggaagaaccgagcttggctgtgtttatctcgttggggactaaggcgtcggttggcgcgcaacgggttctaggctgcaggcagctcgaggacccgcggccccgccccggctcggcctggcagatagcagaggcagcaggccgtgccgggggggcatgttgctgtaaccagtggcccaggggatgttacggtggacagtgcacctggagggcgggccccgcagggtgaaccatgctgcagtggctgtcgggcatcgggtatactccttcgggggttactgctctggtgaagactatgagacactgcgtcagatagatgtgcacattttcaatgcagtgtccttgcgttggacaaagctgcccccggtgaagtctgccatccgtgggcaagctcctgtggtaccctacatgcgctatggacactcaaccgtcctcatcgacgacacagtcctcctttggggcgggcggaatgacaccgaaggggcctgcaatgtgctctatgcctttgacgtcaatacgcacaagtggttcacaccccgagtgtcagggacagttcctggggcccgggatggacattcagcctgtgtcctaggcaagatcatgtacatttttgggggctacgagcagcaggcggactgtttttccaatgacattcacaagctagataccagcaccatgacatggactcttatctgtacaaagggcagccctgcacgctggagggacttccactcagccacaatgctgggaagtcacatgtatgtctttgggggccgtgccgaccgctttgggccattccattccaacaatgagatttactgcaaccgcattcgagtctttgacaccagaactgaggcttggctggactgtcccccgactccagtgctgcctgaggggcgccggagccactcggcctttggctacaatggggagctgtacatctttggtggttataatgcaaggctgaaccggcacttccatgacctctggaagtttaatcctgtgtcctttacctggaaaaagattgaaccgaaggggaaggggccatgtccccgccggcgccagtgctgctgtattgttggtgacaagattgtcctctttgggggtaccagtccatctcctgaggaaggcctgggagatgaatttgaccttatagatcattctgacttacacattttggactttagccctagtctgaagactctgtgcaaactggccgtgattcagtataacctagaccagtcctgtttgcctcatgatatcaggtgggagctgaatgccatgaccaccaacagcaatatcagtcgccccatttggggaggtggggaccagcagataaatcccacccttccttgagctgtcgctgtactctgaagttcagccagctcagattttataaaaattaattaaaatctcaaaa

SEQ ID NO: 315418 - DNA, 1606 bp, Homo sapiens
ggcacttagctacgactgcacgtgcgcgcacagctgcccgccggaagaaccgagcttggctgtgtttatctcgttggggactaaggcgtcggttggcgcgcaacgggttctaggctgcaggcagctcgaggacccgcggccccgccccggctcggcctggcagatagcagaggcagcaggccgtgccgggggggcatgttgctgtaaccagtggcccaggggatgttacggtggacagtgcacctggagggcgggccccgcagggtgaaccatgctgcagtggctgtcgggcatcgggtatactccttcgggggttactgctctggtgaagactatgagacactgcgtcagatagatgtgcacattttcaatgcagtgtccttgcgttggacaaagctgcccccggtgaagtctgccatccgtgggcaagctcctgtggtaccctacatgcgctatggacactcaaccgtcctcatcgacgacacagtcctcctttggggcgggcggaatgacaccgaaggggcctgcaatgtgctctatgcctttgacgtcaatacgcacaagtggttcacaccccgagtgtcagggacagttcctggggcccgggatggacattcagcctgtgtcctaggcaagatcatgtacatttttgggggctacgagcagcaggcggactgtttttccaatgacattcacaagctagataccagcaccatgacatggactcttatctgtacaaagggcagccctgcacgctggagggacttccactcagccacaatgctgggaagtcacatgtatgtctttgggggccgtgccgaccgctttgggccattccattccaacaatgagatttactgcaaccgcattcgagtctttgacaccagaactgaggcttggctggactgtcccccgactccagtgctgcctgaggggcgccggagccactcggcctttggctacaatggggagctgtacatctttggtggttataatgcaaggctgaaccggcacttccatgacctctggaagtttaatcctgtgtcctttacctggaaaaagattgaaccgaaggggaaggggccatgtccccgccggcgccagtgctgctgtattgttggtgacaagattgtcctctttgggggtaccagtccatctcctgaggaaggcctgggagatgaatttgaccttatagatcattctgacttacacattttggactttagccctagtctgaagactctgtgcaaactggccgtgattcagtataacctagaccagtcctgtttgcctcatgatatcaggtacagcgagtggttggaagggagggattgagtgagggtgagtgagcagcacaggtgtgacctgattagcttggtttcagtatggaggagacagacatttttgttctgctggagatgtagtgtacttgtgggaaatgagatggaaggaggtgaattgacagccatcatataaaactgtcagcagaataaattatatgaaaaaaaaatacagctcggcagcatcactttctgagacctaagcttatacagttatttttgtgaccatgctgagaacaactgattaaatcttagaacctagctgc

SEQ ID NO: 315419 - DNA, 1135 bp, Homo sapiens
  misc_feature (963)..(963): n is a, c, g, or t
  misc_feature (968)..(969): n is a, c, g, or t
  misc_feature (982)..(982): n is a, c, g, or t
  misc_feature (1003)..(1003): n is a, c, g, or t
ggcacttagctacgactgcacgtgcgcgcacagctgcccgccggaagaaccgagcttggctgtgtttatctcgttggggactaaggcgtcggttggcgcgcaacgggttctaggctgcaggcagctcgaggacccgcggccccgccccggctcggcctggcagatagcagaggcagcaggccgtgccgggggggcatgttgctgtaaccagtggcccaggggatgttacggtggacagtgcacctggagggcgggccccgcagggtgaaccatgctgcagtggctgtcgggcatcgggtatactccttcgggggttactgctctggtgaagactatgagacactgcgtcagatagatgtgcacattttcaatgcagtgtccttgcgttggacaaagctgcccccggtgaagtctgccatccgtgggcaagctcctgtggtaccctacatgcgctatggacactcaaccgtcctcatcgacgacacagtcctcctttggggcgggcggaatgacaccgaaggggcctgcaatgtgctctatgcctttgacgtcaatacgcacaagtggttcacaccccgagtgtcagggacagttcctggggcccgggatggacattcagcctgtgtcctaggcaagatcatgtacatttttgggggctacgagcagcaggcggactgtttttccaatgacattcacaagctagataccagcaccatgacatggactcttatctgtacaaagggcagccctgcacgctggagggacttccactcagccacaatgctgggaagtcacatgtatgtctttgggggccgtgccgaccgctttgggccattccattccaacaatgagatttactgcaaccgcattcgagtctttgacaccagaactgaggcttggctggactgtcccccgactccagtgctgcctgaggggcgccggagccactcggccttggtacantgggnnctgtcatcttggnggtatatgcaagctgaacggnacttcatgactctggagttaatctgtgtctttactggaaagatgaacgaggaaagggcatgtccgcgggacaagctcgatgatgtgggccaatgcctctgggaacacatcgagaagcgggaaatggcagaga

SEQ ID NO: 315420 - DNA, 1204 bp, Homo sapiens
ggcacttagctacgactgcacgtgcgcgcacagctgcccgccggaagaaccgagcttggctgtgtttatctcgttggggactaaggcgtcggttggcgcgcaacgggttctaggctgcaggcagctcgaggacccgcggccccgccccggctcggcctggcagatagcagaggcagcaggccgtgccgggggggcatgttgctgtaaccagtggcccaggggatgttacggtggacagtgcacctggagggcgggccccgcagggtgaaccatgctgcagtggctgtcgggcatcgggtatactccttcgggggttactgctctggtgaagactatgagacactgcgtcagatagatgtgcacattttcaatgcagtgtccttgcgttggacaaagctgcccccggtgaagtctgccatccgtgggcaagctcctgtggtaccctacatgcgctatggacactcaaccgtcctcatcgacgacacagtcctcctttggggcgggcggaatgacaccgaaggggcctgcaatgtgctctatgcctttgacgtcaatacgcacaagtggttcacaccccgagtgtcagggacagttcctggggcccgggatggacattcagcctgtgtcctaggcaagatcatgtacatttttgggggctacgagcagcaggcggactgtttttccaatgacattcacaagctagataccagcaccatgacatggactcttatctgtacaaagggcagccctgcacgctggagggacttccactcagccacaatgctgggaagtcacatgtatgtctttgggggccgtgccgaccgctttgggccattccattccaacaatgagatttactgcaaccgcattcgagtctttgacaccagaactgaggcttggctggactgtcccccgactccagtgctgcctgaggggcgccggagccactcggcctttggctacaatgggggtgtgaaccacttgtgcgtattgacgtcaaaggcatagagcacattgcaggccccttcggtgtcattccgcccgccccaaaggaggactgtgtcgtcgatgaggacggttgagtgtccatagcgcatgtagggtaccacaggagcttgcccacggatggcagacttcaccgggggcagctttgtccaacgcaaggacatatgcattgaaaaatgtgcacagtccagtctagctc

SEQ ID NO: 315421 - DNA, 1938 bp, Homo sapiens
  misc_feature (9)..(9): n is a, c, g, or t
gagtcttgngctagtgctttactctacagttagggtgacctaagggtcgctcgcgttaggacgcgcaatcgtgtgttctacggcgtgctagcgcagactcgcatggacgccgctggccccagcctccggcctctggtgccctgtgtcagatacgcaagcatgtgcatgcagggccgatagccgcgggcgagggacatagttcgtctgctaaaccagctggcccaggggatgttacggtggacagtgcacctggagggcgggccccgcagggtgaaccatgctgcagtggctgtcgggcatcgggtatactccttcgggggttactgctctggtgaagactatgagacactgcgtcagatagatgtgcacattttcaatgcagtgtccttgcgttggacaaagctgcccccggtgaagtctgccatccgtgggcaagctcctgtggtaccctacatgcgctatggacactcaaccgtcctcatcgacgacacagtcctcctttggggcgggcggaatgacaccgaaggggcctgcaatgtgctctatgcctttgacgtcaatacgcacaagtggttcacaccccgagtgtcagggacagttcctggggcccgggatggacattcagcctgtgtcctaggcaagatcatgtacatttttgggggctacgagcagcaggcggactgtttttccaatgacattcacaagctagataccagcaccatgacatggactcttatctgtacaaagggcagccctgcacgctggagggacttccactcagccacaatgctgggaagtcacatgtatgtctttgggggccgtgccgaccgctttgggccattccattccaacaatgagatttactgcaaccgcattcgagtctttgacaccagaactgaggcttggctggactgtcccccgactccagtgctgcctgaggggcgccggagccactcggcctttggctacaatggggagctgtacatctttggtggttataatgcaaggctgaaccggcacttccatgacctctggaagtttaatcctgtgtcctttacctggaaaaagattgaaccgaaggggaaggggccatgtccccgccggcgccagtgctgctgtattgttggtgacaagattgtcctctttgggggtaccagtccatctcctgaggaaggcctgggagatgaatttgaccttatagatcattctgacttacacattttggactttagccctagtctgaagactctgtgcaaactggccgtgattcagtataacctagaccagtcctgtttgcctcatgatatcaggtgggagctgaatgccatgaccaccaacagcaatatcagtcgccccatcgtctcctcccatgggtaggaggaagtttctgccacctcccctcctgagcctgctgtcatcttcactgcccctgcccatctgtcacccacctgctcctttgacccctggacttggtatacctccatgtggagttgttgggcgagaggtgttctctgtgctgtgaattcagtggggagctgtagcggggtgggggctaggttcctccccccttgggccgagggccccttccccttggtgctctgtccccatccacctcctttcagctgctcctgggcctcagctctgcccagggccagccaggttctgctgggaagggaagggaatggggagaagggagaagcaagcagtgtctgagcctcaggagcttccccctccccctttgcctatcccctcccctctgcttgagccttgagccttgactgggagctgaaaggagttgcagctgttggcatgagacctccttctccccgtcttggggaggtggggaccagcagataaatcccacccttccttgagctgtcgctgtactctgaagttcagccagctcagattttataaaaattaattaaaatctcaaaa

SEQ ID NO: 315422 - DNA, 1003 bp, Homo sapiens
ggcacttagctacgactgcacgtgcgcgcacagctgcccgccggaagaaccgagcttggctgtgtttatctcgttggggactaaggcgtcggttggcgcgcaacgggttctaggctgcaggcagctcgaggacccgcggccccgccccggctcggcctggcagatagcagaggcagcaggccgtgccgggggggcatgttgctgtaaccagtggcccaggggatgttacggtggacagtgcacctggagggcgggccccgcagggtgaaccatgctgcagtggctgtcgggcatcgggtatactccttcgggggttactgctctggtgaagactatgagacactgcgtcagatagatgtgcacattttcaatgcagtgtccttgcgttggacaaagctgcccccggtgaagtctgccatccgtgggcaagctcctgtggtaccctacatgcgctatggacactcaaccgtcctcatcgacgacacagtcctcctttggggcgggcggaatgacaccgaaggggcctgcaatgtgctctatgcctttgacgtcaatacgcacaagtggttcacaccccgagtgtcagggacagttcctggggcccgggatggacattcagcctgtgtcctaggcaagatcatgtacatttttgggggctacgagcagcaggcggactgtttttccaatgacattcacaagctagataccagcaccatgacatggactcttatctgtacaaagggcagccctgcacgctggagggacttccactcagccacaatgctgggaagtcacatgtatgtctttgggggccgtgccgaccgctttgggccattccattccaacaatgagatttactgcaaccgcattcgagtctttgacaccagaactgaggtgggtggtgccccgctccaggtgctgaggggcccggccctcgcctggtccagggggcgcccccggggtaggcagggacggtccacccgagtccggcttcggaaagagg

SEQ ID NO: 315423 - DNA, 1816 bp, Homo sapiens
ggcacttagctacgactgcacgtgcgcgcacagctgcccgccggaagaaccgagcttggctgtgtttatctcgttggggactaaggcgtcggttggcgcgcaacgggttctaggctgcaggcagctcgaggacccgcggccccgccccggctcggcctggcagatagcagaggcagcaggccgtgccgggggggcatgttgctgtaaccagtggcccaggggatgttacggtggacagtgcacctggagggcgggccccgcagggtgaaccatgctgcagtggctgtcgggcatcgggtatactccttcgggggttactgctctggtgaagactatgagacactgcgtcagatagatgtgcacattttcaatgcagtgtccttgcgttggacaaagctgcccccggtgaagtctgccatccgtgggcaagctcctgtggtaccctacatgcgctatggacactcaaccgtcctcatcgacgacacagtcctcctttggggcgggcggaatgacaccgaaggggcctgcaatgtgctctatgcctttgacgtcagcggactgtttttccaatgacattcacaagctagataccagcaccatgacatggactcttatctgtacaaagggcagccctgcacgctggagggacttccactcagccacaatgctgggaagtcacatgtatgtctttgggggccgtgccgaccgctttgggccattccattccaacaatgagatttactgcaaccgcattcgagtctttgacaccagaactgaggcttggctggactgtcccccgactccagtgctgcctgaggggcgccggagccactcggcctttggctacaatggggagctgtacatctttggtggttataatgcaaggctgaaccggcacttccatgacctctggaagtttaatcctgtgtcctttacctggaaaaagattgaaccgaaggggaaggggccatgtccccgccggcgccagtgctgctgtattgttggtgacaagattgtcctctttgggggtaccagtccatctcctgaggaaggcctgggagatgaatttgaccttatagatcattctgacttacacattttggactttagccctagtctgaagactctgtgcaaactggccgtgattcagtataacctagaccagtcctgtttgcctcatgatatcaggtgggagctgaatgccatgaccaccaacagcaatatcagtcgccccatcgtctcctcccatgggtaggaggaagtttctgccacctcccctcctgagcctgctgtcatcttcactgcccctgcccatctgtcacccacctgctcctttgacccctggacttggtatacctccatgtggagttgttgggcgagaggtgttctctgtgctgtgaattcagtggggagctgtagcggggtgggggctaggttcctccccccttgggccgagggccccttccccttggtgctctgtccccatccacctcctttcagctgctcctgggcctcagctctgcccagggccagccaggttctgctgggaagggaagggaatggggagaagggagaagcaagcagtgtctgagcctcaggagcttccccctccccctttgcctatcccctcccctctgcttgagccttgagccttgactgggagctgaaaggagttgcagctgttggcatgagacctccttctccccgtcttggggaggtggggaccagcagataaatcccacccttccttgagctgtcgctgtactctgaagttcagccagctcagattttataaaaattaattaaaatctcaaaa

SEQ ID NO: 315424 - DNA, 1755 bp, Homo sapiens
ggcacttagctacgactgcacgtgcgcgcacagctgcccgccggaagaaccgagcttggctgtgtttatctcgttggggactaaggcgtcggttggcgcgcaacgggttctaggctgcaggcagctcgaggacccgcggccccgccccggctcggcctggcagatagcagaggcagcaggccgtgccgggggggcatgttgctgtaaccagtggcccaggggatgttacggtggacagtgcacctggagggcgggccccgcagggtgaaccatgctgcagtggctgtcgggcatcgggtatactccttcgggggttactgctctggtgaagactatgagacactgcgtcagatagatgtgcacattttcaatgcagatacgcacaagtggttcacaccccgagtgtcagggacagttcctggggcccgggatggacattcagcctgtgtcctaggcaagatcatgtacatttttgggggctacgagcagcaggcggactgtttttccaatgacattcacaagctagataccagcaccatgacatggactcttatctgtacaaagggcagccctgcacgctggagggacttccactcagccacaatgctgggaagtcacatgtatgtctttgggggccgtgccgaccgctttgggccattccattccaacaatgagatttactgcaaccgcattcgagtctttgacaccagaactgaggcttggctggactgtcccccgactccagtgctgcctgaggggcgccggagccactcggcctttggctacaatggggagctgtacatctttggtggttataatgcaaggctgaaccggcacttccatgacctctggaagtttaatcctgtgtcctttacctggaaaaagattgaaccgaaggggaaggggccatgtccccgccggcgccagtgctgctgtattgttggtgacaagattgtcctctttgggggtaccagtccatctcctgaggaaggcctgggagatgaatttgaccttatagatcattctgacttacacattttggactttagccctagtctgaagactctgtgcaaactggccgtgattcagtataacctagaccagtcctgtttgcctcatgatatcaggtgggagctgaatgccatgaccaccaacagcaatatcagtcgccccatcgtctcctcccatgggtaggaggaagtttctgccacctcccctcctgagcctgctgtcatcttcactgcccctgcccatctgtcacccacctgctcctttgacccctggacttggtatacctccatgtggagttgttgggcgagaggtgttctctgtgctgtgaattcagtggggagctgtagcggggtgggggctaggttcctccccccttgggccgagggccccttccccttggtgctctgtccccatccacctcctttcagctgctcctgggcctcagctctgcccagggccagccaggttctgctgggaagggaagggaatggggagaagggagaagcaagcagtgtctgagcctcaggagcttccccctccccctttgcctatcccctcccctctgcttgagccttgagccttgactgggagctgaaaggagttgcagctgttggcatgagacctccttctccccgtcttggggaggtggggaccagcagataaatcccacccttccttgagctgtcgctgtactctgaagttcagccagctcagattttataaaaattaattaaaatctcaaaa

SEQ ID NO: 315425 - DNA, 1263 bp, Homo sapiens
tggctagtacgaggctgcgtttgaatcggcagaggctcgtgccgatgatcatggactcttatctgtacaaagggcagccctgcacgctggagggacttccactcagccacaatgctgggaagtcacatgtatgtctttgggggccgtgccgaccgctttgggccattccattccaacaatgagatttactgcaaccgcattcgagtctttgacaccagaactgaggcttggctggactgtcccccgactccagtgctgcctgaggggcgccggagccactcggcctttggctacaatggggagctgtacatctttggtggttataatgcaaggctgaaccggcacttccatgacctctggaagtttaatcctgtgtcctttacctggaaaaagattgaaccgaaggggaaggggccatgtccccgccggcgccagtgctgctgtattgttggtgacaagattgtcctctttgggggtaccagtccatctcctgaggaaggcctgggagatgaatttgaccttatagatcattctgacttacacattttggactttagccctagtctgaagactctgtgcaaactggccgtgattcagtataacctagaccagtcctgtttgcctcatgatatcaggtgggagctgaatgccatgaccaccaacagcaatatcagtcgccccatcgtctcctcccatgggtaggaggaagtttctgccacctcccctcctgagcctgctgtcatcttcactgcccctgcccatctgtcacccacctgctcctttgacccctggacttggtatacctccatgtggagttgttgggcgagaggtgttctctgtgctgtgaattcagtggggagctgtagcggggtgggggctaggttcctccccccttgggccgagggccccttccccttggtgctctgtccccatccacctcctttcagctgctcctgggcctcagctctgcccagggccagccaggttctgctgggaagggaagggaatggggagaagggagaagcaagcagtgtctgagcctcaggagcttccccctccccctttgcctatcccctcccctctgcttgagccttgagccttgactgggagctgaaaggagttgcagctgttggcatgagacctccttctccccgtcttggggaggtggggaccagcagataaatcccacccttccttgagctgtcgctgtactctgaagttcagccagctcagattttataaaaattaattaaaatctcaaaa

SEQ ID NO: 315426 - DNA, 1614 bp, Homo sapiens
agtttaggagcctctggatcacattggttccagaagatctggctgcttccctttgaatttcgttcttaggttccaattaaccaccagatgttactttatgtataatttttcaggttcaaattaaccaccagatgttactttgtatataatttttcctgtctgggtcattctgagatacttcgtctctttgtatcagttcagtttaactcttgctggctgggcatggtggctcatacctgtaatcccatcacttcgggaggttgaggtgggcaaatcagttgaggtcaggagttcgagaccatcctggccacatggtgaagccctgtctatactaaaaatacaaaaattagctgggcatagtggcagccaccagtagtcccagctacttgggaggttgaggcaagagaattgcttgaacccgggaggcgggggtttcagtgagtcaagattgtgccactgcaccactgtactccagcctaggtgacagaacaagactcaaaaaaaaaattaatatggttgggtgggtggggaaggcctcaggaaggataggagtgctgagtcagagccttaaaaggatgggagttaagagcaaaaatgggtattcctggtggggtgaggcattcctggtgagggtaaggtggaggggctgcctggttggctctaagcaaagcaggaaaggcaggttgggatgttgactgacatgtatacacagatctcaggtgcctggacactgcaatatacatacatacataaacataaaccggaaatccatatgagcttggaggtagaggagtgggtggtgttggatttggtggtgggtgggttctgattgttcaacctagtaggtctcttaagtaagaggtggctgtgggtggttgacctttaggaagttggagagactggtgtgtttttagcttggttcaaacatcccttagcttgggctgagggccccctcttctttctgtctcttattgttggccttccaggtgggagctgaatgccatgaccaccaacagcaatatcagtcgccccatcgtctcctcccatgggtaggaggaagtttctgccacctcccctcctgagcctgctgtcatcttcactgcccctgcccatctgtcacccacctgctcctttgacccctggacttggtatacctccatgtggagttgttgggcgagaggtgttctctgtgctgtgaattcagtggggagctgtagcggggtgggggctaggttcctccccccttgggccgagggccccttccccttggtgctctgtccccatccacctcctttcagctgctcctgggcctcagctctgcccagggccagccaggttctgctgggaagggaagggaatggggagaagggagaagcaagcagtgtctgagcctcaggagcttccccctccccctttgcctatcccctcccctctgcttgagccttgagccttgactgggagctgaaaggagttgcagctgttggcatgagacctccttctccccgtcttggggaggtggggaccagcagataaatcccacccttccttgagctgtcgctgtactctgaagttcagccagctcagattttataaaaattaattaaaatctcaaaa

SEQ ID NO: 315427 - DNA, 945 bp, Homo sapiens
gtccaccaacgattgaactcgttggccaacgggccatgtgcccgcccgttcgcccgggtgcttgttttcagttgattggtcgacaagattagtcctctttgagtgtgatacccaagtcccaatctcctttgacggacacggcctcggtcagcatcgacatttcgaccgctttgtacgactcgaatctcgtgccgttctacgccgagtttatcggacttgcaccccacttattcattgaatattcctagtaagctcatactggcctgtcgattatataacaatgacttagaccagccttcgtgtgcctttcactgaatatccacggtgatagctcgaatgccatgcattcacaagaaagtacacagcgtctcctcccatgggtaggaggaagtttctgccacctcccctcctgagcctgctgtcatcttcactgcccctgcccatctgtcacccacctgctcctttgacccctggacttggtatacctccatgtggagttgttgggcgagaggtgttctctgtgctgtgaattcagtggggagctgtagcggggtgggggctaggttcctccccccttgggccgagggccccttccccttggtgctctgtccccatccacctcctttcagctgctcctgggcctcagctctgcccagggccagccaggttctgctgggaagggaagggaatggggagaagggagaagcaagcagtgtctgagcctcaggagcttccccctccccctttgcctatcccctcccctctgcttgagccttgagccttgactgggagctgaaaggagttgcagctgttggcatgagacctccttctccccgtcttggggaggtggggaccagcagataaatcccacccttccttgagctgtcgctgtactctgaagttcagccagctcagattttataaaaattaattaaaatctcaaaa

SEQ ID NO: 315428 - DNA, 727 bp, Homo sapiens
ggcacttagctacgactgcacgtgcgcgcacagctgcccgccggaagaaccgagcttggctgtgtttatctcgttggggactaaggcgtcggttggcgcgcaacgggttctaggctgcaggcagctcgaggacccgcggccccgccccggctcggcctggcagatagcagaggcagcaggccgtgccgggggggcatgttgctgtaaccagtggcccaggggatgttacggtggacagtgcacctggagggcgggccccgcagggtgaaccatgctgcagtggctgtcgggcatcgggtatactccttcgggggttactgctctggtgaagactatgagacactgcgtcagatagatgtgcacattttcaatgcagtgtccttgcgttggacaaagctgcccccggtgaagtctgccatccgtgggcaagctcctgtggtaccctacatgcgctatggacactcaaccgtcctcatcgacgacacagtcctcctttggggcgggcggaatgacaccgaaggggcctgcaatgtgctctatgcctttgacgtcaatacgcacaagtggttcacaccccgagtgtcagggacagttcctggggcccgggatggacattcagcctgtgtcctaggcaagatcatgtacatttttgggggctacgagcagcagcggactgtttttccatgtcatgctgctggtatctagcttgtgaatgtcattgtcgacc

SEQ ID NO: 315429 - DNA, 344 bp, Homo sapiens
cagagtggagcctccacgagtaggttgtgaccatgatatgcagattctgagctggcaatcaggtgggggtggccccacccttcactgttggagaacactgggcccaggctgctccctgacctcggcagctcccttggggcagggccagccacctgagctgagactagtgcccctgtggaggggtagtgtgggagggcccccagggtgacacttggaggcaaaggctggttctgggcagagtcacagtgagctgggcagaagcctcgcctgaggatcccgtggccccaatttgtgtgcagatagcagaggcagcaggccgtgccgggggggcatgttgctgtaac

SEQ ID NO: 315430 - DNA, 1528 bp, Homo sapiens
aagtagggccgcgagttgagtcggtcagaggatggactctgatctgtacaaagggcagccctgcacgctggagggacttccactcagccacaatgctgggaagtcacatgtatgtctttgggggccgtgccgaccgctttgggccattccattccaacaatgagatttactgcaaccgcattcgagtctttgacaccagaactgaggcttggctggactgtcccccgactccagtgctgcctgaggggcgccggagccactcggcctttggctacaatggggagctgtacatctttggtggttataatgcaaggctgaaccggcacttccatgacctctggaagtttaatcctgtgtcctttacctggaaaaagattgaaccgaaggggaaggggccatgtccccgccggcgccagtgctgctgtattgttggtgacaagattgtcctctttgggggtaccagtccatctcctgaggaaggcctgggagatgaatttgaccttatagatcattctgacttacacattttggactttagccctagtctgaagactctgtgcaaactggccgtgattcagtataacctagaccagtcctgtttgcctcatgatatcaggtgggagctgaatgccatgaccaccaacagcaatatcagtcgccccatcgtctcctcccatgggtaggaggaagtttctgccacctcccctcctgagcctgctgtcatcttcactgcccctgcccatctgtcacccacctgtctcaacacatcaccatcaccaccagcaacagcaacagcagcagcagcagcagcagcagcagcagcagcagcagcagcagcatcacggaaactctgggccccctcctcctggagcatttccccacccactggagggcggtagctcccaccacgcacacccttacgccatgtctccctccctggggtctctgaggccctacccaccagggacagcacacctgcccccacctcacagccaggtgtcctacagccaagcaggccccaatggccctccagtctcctcctcttccaactcttcctcttccacttctcaagggtcctacccatgttcacacccctccccttcccagggccctcaaggggcgccctaccctttcccaccggtgcctacggtcaccacctcttcggctaccctttccacggtcattgccaccgtggcttcctcgccagcaggctacaaaacggcctccccacctgggcccccaccgtacggaaagagagccccgtccccgggggcctacaagacagccaccccacccggatacaaacccgggtcgcctccctccttccgaacggggaccccaccgggctatcgaggaacctcgccacctgcaggcccagggaccttcaagccgggctcgcccaccgtgggacctgggcccctgccacctgcggggccctcaggcctgccatcgctgccaccaccacctgcggcccctgcctcagggccgcccctgagcgccacgcagatcaaacaggagcctggaattc

SEQ ID NO: 315431 - DNA, 2054 bp, Homo sapiens
ggcacttagctacgactgcacgtgcgcgcacagctgcccgccggaagaaccgagcttggctgtgtttatctcgttggggactaaggcgtcggttggcgcgcaacgggttctaggctgcaggcagctcgaggacccgcggccccgccccggctcggcctggcagatagcagaggcagcaggccgtgccgggggggcatgttgctgtaaccagtggcccaggggatgttacggtggacagtgcacctggagggcgggccccgcagggtgaaccatgctgcagtggctgtcgggcatcgggtatactccttcgggggttactgctctggtgaagactatgagacactgcgtcagatagatgtgcacattttcaatgcagtgtccttgcgttggacaaagctgcccccggtgaagtctgccatccgtgggcaagctcctgtggtaccctacatgcgctatggacactcaaccgtcctcatcgacgacacagtcctcctttggggcgggcggaatgacaccgaaggggcctgcaatgtgctctatgcctttgacgtcaatacgcacaagtggttcacaccccgagtgtcagggacagttcctggggcccgggatggacattcagcctgtgtcctaggcaagatcatgtacatttttgggggctacgagcagcaggcggactgtttttccaatgacattcacaagctagataccagcaccatgacatggactcttatctgtacaaagggcagccctgcacgctggagggacttccactcagccacaatgctgggaagtcacatgtatgtctttgggggccgtgccgaccgctttgggccattccattccaacaatgagatttactgcaaccgcattcgagtctttgacaccagaactgaggcttggctggactgtcccccgactccagtgctgcctgaggggcgccggagccactcggcctttggctacaatggggagctgtacatctttggtggttataatgcaaggctgaaccggcacttccatgacctctggaagtttaatcctgtgtcctttacctggaaaaagattgaaccgaaggggaaggggccatgtccccgccggcgccagtgctgctgtattgttggtgacaagattgtcctctttgggggtaccagtccatctcctgaggaaggcctgggagatgaatttgaccttatagatcattctgacttacacattttggactttagtaagtatagttattcctgaattgctcctgccatcaaggtccctgtctttgggtggtgatatccaggactggatcctttcctcacctttgaccatctcctttccacaacttctcccttaaaggccctagtctgaagactctgtgcaaactggccgtgattcagtataacctagaccagtcctgtttgcctcatgatatcaggtgggagctgaatgccatgaccaccaacagcaatatcagtcgccccatcgtctcctcccatgggtaggaggaagtttctgccacctcccctcctgagcctgctgtcatcttcactgcccctgcccatctgtcacccacctgctcctttgacccctggacttggtatacctccatgtggagttgttgggcgagaggtgttctctgtgctgtgaattcagtggggagctgtagcggggtgggggctaggttcctccccccttgggccgagggccccttccccttggtgctctgtccccatccacctcctttcagctgctcctgggcctcagctctgcccagggccagccaggttctgctgggaagggaagggaatggggagaagggagaagcaagcagtgtctgagcctcaggagcttccccctccccctttgcctatcccctcccctctgcttgagccttgagccttgactgggagctgaaaggagttgcagctgttggcatgagacctccttctccccgtcttggggaggtggggaccagcagataaatcccacccttccttgagctgtcgctgtactctgaagttcagccagctcagattttataaaaattaattaaaatctcaaaa

SEQ ID NO: 315432 - DNA, 2216 bp, Homo sapiens
ggcacttagctacgactgcacgtgcgcgcacagctgcccgccggaagaaccgagcttggctgtgtttatctcgttggggactaaggcgtcggttggcgcgcaacgggttctaggctgcaggcagctcgaggacccgcggccccgccccggctcggcctggcagatagcagaggcagcaggccgtgccgggggggcatgttgctgtaaccagtggcccaggggatgttacggtggacagtgcacctggagggcgggccccgcagggtgaaccatgctgcagtggctgtcgggcatcgggtatactccttcgggggttactgctctggtgaagactatgagacactgcgtcagatagatgtgcacattttcaatgcagtgtccttgcgttggacaaagctgcccccggtgaagtctgccatccgtgggcaagctcctgtggtaccctacatgcgctatggacactcaaccgtcctcatcgacgacacagtcctcctttggggcgggcggaatgacaccgaaggggcctgcaatgtgctctatgcctttgacgtcaatacgcacaagtggttcacaccccgagtgtcagggacagttcctggggcccgggatggacattcagcctgtgtcctaggcaagatcatgtacatttttgggggctacgagcagcaggcggactgtttttccaatgacattcacaagctagataccagcaccatgacatggactcttatctgtacaaagggcagccctgcacgctggagggacttccactcagccacaatgctgggaagtcacatgtatgtctttgggggccgtgccgaccgctttgggccattccattccaacaatgagatttactgcaaccgcattcgagtctttgacaccagaactgaggcttggctggactgtcccccgactccagtgctgcctgaggggcgccggagccactcggcctttggctacaatggggagctgtacatctttggtggttataatgcaaggctgaaccggcacttccatgacctctggaagtttaatcctgtgtcctttacctggaaaaagattgaaccgaaggggaaggggccatgtccccgccggcgccagtgctgctgtattgttggtgacaagattgtcctctttgggggtaccagtccatctcctgaggaaggcctgggagatgaatttgaccttatagatcattctgacttacacattttggactttagccctagtctgaagactctgtgcaaactggccgtgattcagtataacctagaccagtcctgtttgcctcatgatatcaggtgggagctgaatgccatgaccaccaacagcaatatcagtcgccccatcgtctcctcccatgggtaggaggaagtttctgccacctcccctcctgagcctgctgtcatcttcactgcccctgcccatctgtcacccacctgtctcaacacatcaccatcaccaccagcaacagcaacagcagcagcagcagcagcagcagcagcagcagcagcagcagcagcatcacggaaactctgggccccctcctcctggagcatttccccacccactggagggcggtagctcccaccacgcacacccttacgccatgtctccctccctggggtctctgaggccctacccaccagggacagcacacctgcccccacctcacagccaggtgtcctacagccaagcaggccccaatggccctccagtctcctcctcttccaactcttcctcttccacttctcaagggtcctacccatgttcacacccctccccttcccagggccctcaaggggcgccctaccctttcccaccggtgcctacggtcaccacctcttcggctaccctttccacggtcattgccaccgtggcttcctcgccagcaggctacaaaacggcctccccacctgggcccccaccgtacggaaagagagccccgtccccgggggcctacaagacagccaccccacccggatacaaacccgggtcgcctccctccttccgaacggggaccccaccgggctatcgaggaacctcgccacctgcaggcccagggaccttcaagccgggctcgcccaccgtgggacctgggcccctgccacctgcggggccctcaggcctgccatcgctgccaccaccacctgcggcccctgcctcagggccgcccctgagcgccacgcagatcaaacaggagcctggaattc

SEQ ID NO: 315433 - DNA, 1536 bp, Homo sapiens
ggcacttagctacgactgcacgtgcgcgcacagctgcccgccggaagaaccgagcttggctgtgtttatctcgttggggactaaggcgtcggttggcgcgcaacgggttctaggctgcaggcagctcgaggacccgcggccccgccccggctcggcctggcagatagcagaggcagcaggccgtgccgggggggcatgttgctgtaaccagtggcccaggggatgttacggtggacagtgcacctggagggcgggccccgcagggtgaaccatgctgcagtggctgtcgggcatcgggtatactccttcgggggttactgctctggtgaagactatgagacactgcgtcagatagatgtgcacattttcaatgcagtgtccttgcgttggacaaagctgcccccggtgaagtctgccatccgtgggcaagctcctgtggtaccctacatgcgctatggacactcaaccgtcctcatcgacgacacagtcctcctttggggcgggcggaatgacaccgaaggggcctgcaatgtgctctatgcctttgacgtcaatacgcacaagtggttcacaccccgagtgtcagggacagttcctggggcccgggatggacattcagcctgtgtcctaggcaagatcatgtacatttttgggggctacgagcagcaggcggactgtttttccaatgacattcacaagctagataccagcaccatgacatggactcttatctgtacaaagggcagccctgcacgctggagggacttccactcagccacaatgctgggaagtcacatgtatgtctttgggggccgtgccgaccgctttgggccattccattccaacaatgagatttactgcaaccgcattcgagtctttgacaccagaactgaggcttggctggactgtcccccgactccagtgctgcctgaggggcgccggagccactcggcctttggctacaatggggagctgtacatctttggtggttataatgcaaggctgaaccggcacttccatgacctctggaagtttaatcctgtgtcctttacctggaaaaagattgaaccgaaggggaaggggccatgtccccgccggcgccagtgctgctgtattgttggtgacaagattgtcctctttgggggtaccagtccatctcctgaggaaggcctgggagatgaatttgaccttatagatcattctgacttacacattttggactttagccctagtctgaagactctgtgcaaactggccgtgattcagtataacctagaccagtcctgtttgcctcatgatatcaggtgggagctgaatgccatgaccaccaacagcaatatcagtcgccccatctctgcttgagccttgagccttgactgggagctgaaaggagttgcagctgttggcatgagacctccttctccccgtcttggggaggtggggaccagcagataaatcccacccttccttgagctgtcgctgtactctgaagttcagccagctcagattttataaaaattaattaaaatctcaaaa

SEQ ID NO: 315434 - DNA, 1411 bp, Homo sapiens
ggcacttagctacgactgcacgtgcgcgcacagctgcccgccggaagaaccgagcttggctgtgtttatctcgttggggactaaggcgtcggttggcgcgcaacgggttctaggctgcaggcagctcgaggacccgcggccccgccccggctcggcctggcagatagcagaggcagcaggccgtgccgggggggcatgttgctgtaaccagtggcccaggggatgttacggtggacagtgcacctggagggcgggccccgcagggtgaaccatgctgcagtggctgtcgggcatcgggtatactccttcgggggttactgctctggtgaagactatgagacactgcgtcagatagatgtgcacattttcaatgcagtgtccttgcgttggacaaagctgcccccggtgaagtctgccatccgtgggcaagctcctgtggtaccctacatgcgctatggacactcaaccgtcctcatcgacgacacagtcctcctttggggcgggcggaatgacaccgaaggggcctgcaatgtgctctatgcctttgacgtcaatacgcacaagtggttcacaccccgagtgtcagggacagttcctggggcccgggatggacattcagcctgtgtcctaggcaagatcatgtacatttttgggggctacgagcagcaggcggactgtttttccaatgacattcacaagctagataccagcaccatgacatggactcttatctgtacaaagggcagccctgcacgctggagggacttccactcagccacaatgctgggaagtcacatgtatgtctttgggggccgtgccgaccgctttgggccattccattccaacaatgagatttactgcaaccgcattcgagtctttgacaccagaactgaggcttggctggactgtcccccgactccagtgctgcctgaggggcgccggagccactcggcctttggctacaatggggagctgtacatctttggtggttataatgcaaggctgaaccggcacttccatgacctctggaagtttaatcctgtgtcctttacctggaaaaagattgaaccgaaggggaaggggccatgtccccgccggcgccagtgctgctgtattgttggtgacaagattgtcctctttgggggtaccagtccatctcctgaggaaggcctgggagatgaatttgaccttatagatcattctgacttacacattttggactttagccctagtctgaagactctgtgcaaactggccgtgattcagtataacctagaccagtcctgtttgcctcatgatatcagttggggaggtggggaccagcagataaatcccacccttccttgagctgtcgctgtactctgaagttcagccagctcagattttataaaaattaattaaaatctcaaaa

SEQ ID NO: 315435 - DNA, 1870 bp, Homo sapiens
cgtgagctgaattcggacacgagggacggctcagcgacgccacggccataagctgcaggcagctcgaggacccgcggccccgccccggctcggcctggcagatagcagaggcagcaggccgtgccgggggggcatgttgctgtaaccagtggcccaggggatgttacggtggacagtgcacctggagggcgggccccgcagggtgaaccatgctgcagtggctgtcgggcatcgggtatactccttcgggggttactgctctggtgaagactatgagacactgcgtcagatagatgtgcacattttcaatgcagtgtccttgcgttggacaaagctgcccccggtgaagtctgccatccgtgggcaagctcctgtggtaccctacatgcgctatggacactcaaccgtcctcatcgacgacacagtcctcctttggggcgggcggaatgacaccgaaggggcctgcaatgtgctctatgcctttgacgtcaatacgcacaagtggttcacaccccgagtgtcagggacagttcctggggcccgggatggacattcagcctgtgtcctaggcaagatcatgtacatttttgggggctacgagcagcaggcggactgtttttccaatgacattcacaagctagataccagcaccatgacatggactcttatctgtacaaagggcagccctgcacgctggagggacttccactcagccacaatgctgggaagtcacatgtatgtctttgggggccgtgccgaccgctttgggccattccattccaacaatgagatttactgcaaccgcattcgagtctttgacaccagaactgaggcttggctggactgtcccccgactccagtgctgcctgaggggcgccggagccactcggcctttggctacaatggggagctgtacatctttggtggttataatgcaaggctgaaccggcacttccatgacctctggaagtttaatcctgtgtcctttacctggaaaaagattgaaccgaaggggaaggggccatgtccccgccggcgccagtgctgctgtattgttggtgacaagattgtcctctttgggggtaccagtccatctcctgaggaaggcctgggagatgaatttgaccttatagatcattctgacttacacattttggactttagccctagtctgaagactctgtgcaaactggccgtgattcagtataacctagaccagtcctgtttgcctcatgatatcaggtgggagctgaatgccatgaccaccaacagcaatatcagtcgccccatcgtctcctcccatgggtaggaggaagtttctgccacctcccctcctgagcctgctgtcatcttcactgcccctgcccatctgtcacccacctgctcctttgacccctggacttggtatacctccatgtggagttgttgggcgagaggtgttctctgtgctgtgaattcagtggggagctgtagcggggtgggggctaggttcctccccccttgggccgagggccccttccccttggtgctctgtccccatccacctcctttcagctgctcctgggcctcagctctgcccagggccagccaggttctgctgggaagggaagggaatggggagaagggagaagcaagcagtgtctgagcctcaggagcttccccctccccctttgcctatcccctcccctctgcttgagccttgagccttgactgggagctgaaaggagttgcagctgttggcatgagacctccttctccccgtcttggggaggtggggaccagcagataaatcccacccttccttgagctgtcgctgtactctgaagttcagccagctcagattttataaaaattaattaaaatctcaaaa

SEQ ID NO: 315436 - DNA, 1937 bp, Homo sapiens
taccccgtacaaggccccgcgggctggcagctggtgggcctggcgctgtgcctgatgctggtgcaagtcatcatcgctgtggagtggctggtgctcaccgtgctgcgtgacacaaggccagcctgcgcctacgagcccatggactttgtgatggccctcatctacgacatggtactgcttgtggtcaccctggggctggccctcttcactctgtgcggcaagttcaagaggtggaagctgaacggggccttgtacgcgtacaacgcagggtgaaccatgctgcagtggctgtcgggcatcgggtatactccttcgggggttactgctctggtgaagactatgagacactgcgtcagatagatgtgcacattttcaatgcagtgtccttgcgttggacaaagctgcccccggtgaagtctgccatccgtgggcaagctcctgtggtaccctacatgcgctatggacactcaaccgtcctcatcgacgacacagtcctcctttggggcgggcggaatgacaccgaaggggcctgcaatgtgctctatgcctttgacgtcaatacgcacaagtggttcacaccccgagtgtcagggacagttcctggggcccgggatggacattcagcctgtgtcctaggcaagatcatgtacatttttgggggctacgagcagcaggcggactgtttttccaatgacattcacaagctagataccagcaccatgacatggactcttatctgtacaaagggcagccctgcacgctggagggacttccactcagccacaatgctgggaagtcacatgtatgtctttgggggccgtgccgaccgctttgggccattccattccaacaatgagatttactgcaaccgcattcgagtctttgacaccagaactgaggcttggctggactgtcccccgactccagtgctgcctgaggggcgccggagccactcggcctttggctacaatggggagctgtacatctttggtggttataatgcaaggctgaaccggcacttccatgacctctggaagtttaatcctgtgtcctttacctggaaaaagattgaaccgaaggggaaggggccatgtccccgccggcgccagtgctgctgtattgttggtgacaagattgtcctctttgggggtaccagtccatctcctgaggaaggcctgggagatgaatttgaccttatagatcattctgacttacacattttggactttagccctagtctgaagactctgtgcaaactggccgtgattcagtataacctagaccagtcctgtttgcctcatgatatcaggtgggagctgaatgccatgaccaccaacagcaatatcagtcgccccatcgtctcctcccatgggtaggaggaagtttctgccacctcccctcctgagcctgctgtcatcttcactgcccctgcccatctgtcacccacctgctcctttgacccctggacttggtatacctccatgtggagttgttgggcgagaggtgttctctgtgctgtgaattcagtggggagctgtagcggggtgggggctaggttcctccccccttgggccgagggccccttccccttggtgctctgtccccatccacctcctttcagctgctcctgggcctcagctctgcccagggccagccaggttctgctgggaagggaagggaatggggagaagggagaagcaagcagtgtctgagcctcaggagcttccccctccccctttgcctatcccctcccctctgcttgagccttgagccttgactgggagctgaaaggagttgcagctgttggcatgagacctccttctccccgtcttggggaggtggggaccagcagataaatcccacccttccttgagctgtcgctgtactctgaagttcagccagctcagattttataaaaattaattaaaatctcaaaa

SEQ ID NO: 315437 - DNA, 1657 bp, Homo sapiens
cgtgagctgaattcggacacgagggacggctcagcgacgccacggccataagctgcaggcagctcgaggacccgcggccccgccccggctcggcctggcagtgtccttgcgttggacaaagctgcccccggtgaagtctgccatccgtgggcaagctcctgtggtaccctacatgcgctatggacactcaaccgtcctcatcgacgacacagtcctcctttggggcgggcggaatgacaccgaaggggcctgcaatgtgctctatgcctttgacgtcaatacgcacaagtggttcacaccccgagtgtcagggacagttcctggggcccgggatggacattcagcctgtgtcctaggcaagatcatgtacatttttgggggctacgagcagcaggcggactgtttttccaatgacattcacaagctagataccagcaccatgacatggactcttatctgtacaaagggcagccctgcacgctggagggacttccactcagccacaatgctgggaagtcacatgtatgtctttgggggccgtgccgaccgctttgggccattccattccaacaatgagatttactgcaaccgcattcgagtctttgacaccagaactgaggcttggctggactgtcccccgactccagtgctgcctgaggggcgccggagccactcggcctttggctacaatggggagctgtacatctttggtggttataatgcaaggctgaaccggcacttccatgacctctggaagtttaatcctgtgtcctttacctggaaaaagattgaaccgaaggggaaggggccatgtccccgccggcgccagtgctgctgtattgttggtgacaagattgtcctctttgggggtaccagtccatctcctgaggaaggcctgggagatgaatttgaccttatagatcattctgacttacacattttggactttagccctagtctgaagactctgtgcaaactggccgtgattcagtataacctagaccagtcctgtttgcctcatgatatcaggtgggagctgaatgccatgaccaccaacagcaatatcagtcgccccatcgtctcctcccatgggtaggaggaagtttctgccacctcccctcctgagcctgctgtcatcttcactgcccctgcccatctgtcacccacctgctcctttgacccctggacttggtatacctccatgtggagttgttgggcgagaggtgttctctgtgctgtgaattcagtggggagctgtagcggggtgggggctaggttcctccccccttgggccgagggccccttccccttggtgctctgtccccatccacctcctttcagctgctcctgggcctcagctctgcccagggccagccaggttctgctgggaagggaagggaatggggagaagggagaagcaagcagtgtctgagcctcaggagcttccccctccccctttgcctatcccctcccctctgcttgagccttgagccttgactgggagctgaaaggagttgcagctgttggcatgagacctccttctccccgtcttggggaggtggggaccagcagataaatcccacccttccttgagctgtcgctgtactctgaagttcagccagctcagattttataaaaattaattaaaatctcaaaa

SEQ ID NO: 315438 - DNA, 2067 bp, Homo sapiens
  misc_feature (501)..(501): n is a, c, g, or t
  misc_feature (511)..(511): n is a, c, g, or t
  misc_feature (616)..(616): n is a, c, g, or t
ggcacttagctacgactgcacgtgcgcgcacagctgcccgccggaagaaccgagcttggctgtgtttatctcgttggggactaaggcgtcggttggcgcgcaacgggttctaggctgcaggcagctcgaggacccgcggccccgccccggctcggcctggcagatagcagaggcagcaggccgtgccgggggggcatgttgctgtaaccagtggcccaggggatgttacggtggacagtgcacctggagggcgggccccgcagggtgaaccatgctgcagtggctgtcgggcatcgggtatactccttcgggggttactgctctggtgagagcacgtagtggaggaccacgtgcgctcacgactaggactgtgcacgagttgttcaagtgccagatgtccattgcagttcggtacagaatgcttggctcgcccgagtgaacatgctcatgtgcagtcctggtgcggtcaagagcctccagtgttgtgtgacccttgacaantgcggcctantgagacgacttcggaacacaggtccgtccaatcgacagactacaaggtctctcctttttgggggcgcaggggctggcaagtgaatgacacgatagggtgccatgncgaagtgatggcgtctatgctcttgttgtacgtactaaataacgtcacaaggtggtttcagcatcgcccgtagtagtctagggggaacatggtcctgggggacccggggactgggacattccatgccgtgtgtccctaagggcagagtagtcactgttacactttgttggaggggctacgagcagcaggcggactgtttttccaatgacattcacaagctagataccagcaccatgacatggactcttatctgtacaaagggcagccctgcacgctggagggacttccactcagccacaatgctgggaagtcacatgtatgtctttgggggccgtgccgaccgctttgggccattccattccaacaatgagatttactgcaaccgcattcgagtctttgacaccagaactgaggcttggctggactgtcccccgactccagtgctgcctgaggggcgccggagccactcggcctttggctacaatggggagctgtacatctttggtggttataatgcaaggctgaaccggcacttccatgacctctggaagtttaatcctgtgtcctttacctggaaaaagattgaaccgaaggggaaggggccatgtccccgccggcgccagtgctgctgtattgttggtgacaagattgtcctctttgggggtaccagtccatctcctgaggaaggcctgggagatgaatttgaccttatagatcattctgacttacacattttggactttagccctagtctgaagactctgtgcaaactggccgtgattcagtataacctagaccagtcctgtttgcctcatgatatcaggtgggagctgaatgccatgaccaccaacagcaatatcagtcgccccatcgtctcctcccatgggtaggaggaagtttctgccacctcccctcctgagcctgctgtcatcttcactgcccctgcccatctgtcacccacctgctcctttgacccctggacttggtatacctccatgtggagttgttgggcgagaggtgttctctgtgctgtgaattcagtggggagctgtagcggggtgggggctaggttcctccccccttgggccgagggccccttccccttggtgctctgtccccatccacctcctttcagctgctcctgggcctcagctctgcccagggccagccaggttctgctgggaagggaagggaatggggagaagggagaagcaagcagtgtctgagcctcaggagcttccccctccccctttgcctatcccctcccctctgcttgagccttgagccttgactgggagctgaaaggagttgcagctgttggcatgagacctccttctccccgtcttggggaggtggggaccagcagataaatcccacccttccttgagctgtcgctgtactctgaagttcagccagctcagattttataaaaattaattaaaatctcaaaa

SEQ ID NO: 315439 - DNA, 764 bp, Homo sapiens
atcttgaggcgtgcgaggagggggcatggcggatactgtgttgtttgagtttcttcacacggagatggtggctgagctgtgggctcacgaccccgaccccggcccggggggacagaagatgagcctgtcggtcctggagggtatggggttccgtgtgggccaggctctaggcgagaggctgccccgggagacgctggccttcagggaggagctggatgtcctcaagttcttgtgcaaagacctgtgggtggcggtgttccagaagcagatggacagcctgcgcaccaatcaccaggggacctacgtcctgcaagacaacagcttccccctcctcctcccgatggcctctggcctgcagtatctggaggaagcacccaagttcctggccttcacctgcggcctcctgcgcggcgccctctataccctgggcattgagagcgtggtcaccgcctccgtggcagccctgcccgtctgtaagttccaggtggtgattccgaaatcctaagcctgcctcgcacctgctgagccgcactgctgcccctggcctcaccggcctcaggagacggtggggccgctgcatttcggggtggtcttgggaatcccaggccctaggggtcacatttgctcaggaagtgggtatcaaattgaggtgggggtgtcagaggaggcaaaggggtcccagctgcggtcaggactgtggtgggattcccgcctcggcagcgtcactgcccagtagctgctcaataaaggctgtgtgtgtggaa

SEQ ID NO: 315440 - DNA, 920 bp, Homo sapiens
atcttgaggcgtgcgaggagggggcatggcggatactgtgttgtttgagtttcttcacacggagatggtggctgagctgtgggctcacgaccccgaccccggcccgggggtgagcgccgggctccgtggggaggaagcgggggccaccaagggacagaagatgagcctgtcggtcctggagggtatggggttccgtgtgggccaggctctaggcgagaggctgccccgggagacgctggccttcagggaggagctggatgtcctcaagttcttgtgcaaagacctgtgggtggcggtgttccagaagcagatggacagcctgcgcaccaatcaccaggggacctacgtcctgcaagacaacagcttccccctcctcctcccgatggcctctggcctgcagtatctggaggaagcacccaagttcctggccttcacctgcggcctcctgcgcggcgccctctataccctgggcattgagagcgtggtcaccgcctccgtggcagccctgcccgtctgtaagttccaggtggtgattccgaaatcctaagcctgcctcgcacctgctgagccgcactgctgcccctggcctcaccggcctcaggagacggtggggccgctgcatttcggggtggtcttgggaatcccaggccctaggggtcacatttgctcaggaagtgggtatcaaattgaggtgggggtgtcagaggaggcaaaggggtcccagctgcggtcaggactgtggtgggattcccgcctcggcagcgtcactgcccagtagctgctcaataaaggctgtgtgtgtggaacaaaaaaaaaaaaactcggcttatttcggggggggaaaagggtttggatggcctggcttgggtcggccattttgtcaagggaattgcggccaaagggatatcaacgtagggggg

SEQ ID NO: 315441 - DNA, 798 bp, Homo sapiens
atcttgaggcgtgcgaggagggggcatggcggatactgtgttgtttgagtttcttcacacggagatggtggctgagctgtgggctcacgaccccgaccccggcccggggggacagaagatgagcctgtcggtcctggagggtatggggttccgtgtgggccaggctctaggcgagaggctgccccgggagacgctggccttcagggaggagctggatgtcctcaagttcttgtgcaaagacctgtgggtggcggtgttccagaagcagatggacagcctgcgcaccaatcaccaggggacctacgtcctgcaagacaacagcttccccctcctcctcccgatggcctctggcctgcagtatctggaggaagcacccaagttcctggccttcacctgcggcctcctgcgcggcgccctctataccctgggcattgagagcgtggtcaccgcctccgtggcagccctgcccgtctgtaagttccaggtggtgattccgaaatcctaagcctgcctcgcacctgctgagccgcactgctgcccctggcctcaccggcctcaggagacggtggggccgctgcatttcggggtggtcttgggaatcccaggccctaggggtcacatttgctcaggaagtgggtatcaaattgaggtgggggtgtcagaggaggcaaaggggtcccagctgcggtcaggactgtggtgggattcccgcctcggcagcgtcactgcccagtagctgctcaataaaggctgtgtgtgtggaaaaaaacaacacactgatacaaaacaacaaaaaag

SEQ ID NO: 315442 - DNA, 594 bp, Homo sapiens
gctcacccctgaactgacgagcaccagcaagttggtctttgggtcccctggcaggtccccccctgggtggccccgggttcgtggtggctaagggcccctgagcatctctcccctggccttctagggacagaagatgagcctgtcggtcctggagggtatggggttccgtgtgggccaggctctaggcgagaggtgagcgcggcccctcctgctctcccccagcctggctggcagggctgggcaggccccgggcggggagggttgcattgctccatgcaggagtcgggcctgtcttcctccctcttcctggcctggccccacggcctcagcttggtactgccccaccaggctgccccgggagacgctggccttcagggaggagctggatgtcctcaagttcttgtgcaaagacctgtgggtggcggtgttccagaagcagatggacagcctgcgcaccaatcaccaggtgggagcaccccggcctgcccgtccagcttcctcctgagggcaagaccaagagagtgggaggggaatcccccggcgccagagcagcggctgccgggacccgcccagagctttcccacaggcggccgc

SEQ ID NO: 315443 - DNA, 465 bp, Homo sapiens
atcttgaggcgtgcgaggagggggcatggcggatactgtgttgtttgagtttcttcacacggagatggtggctgagctgtgggctcacgaccccgaccccggcccgggggtgagcgccgggctccgtggggaggaagcgggggccaccaagggacagaagatgagcctgtcggtcctggagggtatggggttccgtgtgggccaggctctaggcgagaggctgccccgggagacgctggccttcagggaggagctggatgtcctcaagttcttgtgcaaagacctgtgggtggcggtgttccagaagcagatggacagcctgcgcaccaatcaccaggtgggagcaccccggcctgcccgtccagcttcctcctgagggcaagaccaagagagtgggaggggaatcccccggcgccagagcagcggctgccgggacccgcccagagctttcccacaggcggccgc

SEQ ID NO: 315444 - DNA, 840 bp, Homo sapiens
atcttgaggcgtgcgaggagggggcatggcggatactgtgttgtttgagtttcttcacacggagatggtggctgagctgtgggctcacgaccccgaccccggcccgggggtgagcgccgggctccgtggggaggaagcgggggccaccaagggacagaagatgagcctgtcggtcctggagggtatggggttccgtgtgggccaggctctaggcgagaggctgccccgggagacgctggccttcagggaggagctggatgtcctcaagttcttgtgcaaagacctgtgggtggcggtgttccagaagcagatggacagcctgcgcaccaatcaccaggggacctacgtcctgcaagacaacagcttccccctcctcctcccgatggcctctggcctgcagtatctggaggaagcacccaagttcctggccttcacctgcggcctcctgcgcggcgccctctataccctgggcattgagagcgtggtcaccgcctccgtggcagccctgcccgtctgtaagttccaggtggtgattccgaaatcctaagcctgcctcgcacctgctgagccgcactgctgcccctggcctcaccggcctcaggagacggtggggccgctgcatttcggggtggtcttgggaatcccaggccctaggggtcacatttgctcaggaagtgggtatcaaattgaggtgggggtgtcagaggaggcaaaggggtcccagctgcggtcaggactgtggtgggattcccgcctcggcagcgtcactgcccagtagctgctcaataaaggctgtgtgtgtggaaaaaaacaacacactgatacaaaacaacaaaaaag

SEQ ID NO: 315445 - DNA, 880 bp, Homo sapiens
cggaacttctccagcctaccaggagtgagccatgcatgggcagaaagcccctggtggctgcctgccctacccccagtgtgatgctgcttgtcccaagctggtctagtcccccagtgacacccaggctgtacctgcccttctgcatcttcctgggccgggtccccagcttttctgcacaaccctgggaggcgagggcaggacccacactccccagggcacaggcacccactccaagtttggaagccctgggccctaccagagcactggaggccaaggctgtgactccagtggttctcaggaagggggccttcccaacctcagcccaatctaagacctgggttcctgcttaccctccctgcgcttcaaatgtacaggccccgaccccacccaccagcctctcctctcccccaggggacctacgtcctgcaagacaacagcttccccctcctcctcccgatggcctctggcctgcagtatctggaggaagcacccaagttcctggccttcacctgcggcctcctgcgcggcgccctctataccctgggcattgagagcgtggtcaccgcctccgtggcagccctgcccgtctgtaagttccaggtggtgattccgaaatcctaagcctgcctcgcacctgctgagccgcactgctgcccctggcctcaccggcctcaggagacggtggggccgctgcatttcggggtggtcttgggaatcccaggccctaggggtcacatttgctcaggaagtgggtatcaaattgaggtgggggtgtcagaggaggcaaaggggtcccagctgcggtcaggactgtggtgggattcccgcctcggcagcgtcactgcccagtagctgctcaataaaggctgtgtgtgtggaa

SEQ ID NO: 315446 - DNA, 605 bp, Homo sapiens
atcttgaggcgtgcgaggagggggcatggcggatactgtgttgtttgagtttcttcacacggagatggtggctgagctgtgggctcacgaccccgaccccggcccggggggacagaagatgagcctgtcggtcctggagggtatggggttccgtgtgggccaggctctaggcgagaggctgccccgggagacgctggccttcagggaggagctggatgtcctcaagttcttgtgcaaagacctgtgggtggcggtgttccagaagcagatggacagcctgcgcaccaatcaccaggggacctacgtcctgcaagacaacagcttccccctcctcctcccgatggcctctggcctgcagtatctggaggaagcacccaagccctggcctcaccggcctcaggagacggtggggccgctgcatttcggggtggtcttgggaatcccaggccctaggggtcacatttgctcaggaagtgggtatcaaattgaggtgggggtgtcagaggaggcaaaggggtcccagctgcggtcaggactgtggtgggattcccgcctcggcagcgtcactgcccagtagctgctcaataaaggctgtgtgtgtggaa

SEQ ID NO: 315447 - DNA, 806 bp, Homo sapiens
atcttgaggcgtgcgaggagggggcatggcggatactgtgttgtttgagtttcttcacacggagatggtggctgagctgtgggctcacgaccccgaccccggcccgggggtgagcgccgggctccgtggggaggaagcgggggccaccaagggacagaagatgagcctgtcggtcctggagggtatggggttccgtgtgggccaggctctaggcgagaggctgccccgggagacgctggccttcagggaggagctggatgtcctcaagttcttgtgcaaagacctgtgggtggcggtgttccagaagcagatggacagcctgcgcaccaatcaccaggggacctacgtcctgcaagacaacagcttccccctcctcctcccgatggcctctggcctgcagtatctggaggaagcacccaagttcctggccttcacctgcggcctcctgcgcggcgccctctataccctgggcattgagagcgtggtcaccgcctccgtggcagccctgcccgtctgtaagttccaggtggtgattccgaaatcctaagcctgcctcgcacctgctgagccgcactgctgcccctggcctcaccggcctcaggagacggtggggccgctgcatttcggggtggtcttgggaatcccaggccctaggggtcacatttgctcaggaagtgggtatcaaattgaggtgggggtgtcagaggaggcaaaggggtcccagctgcggtcaggactgtggtgggattcccgcctcggcagcgtcactgcccagtagctgctcaataaaggctgtgtgtgtggaa

SEQ ID NO: 315448 - DNA, 696 bp, Homo sapiens
atcttgaggcgtgcgaggagggggcatggcggatactgtgttgtttgagtttcttcacacggagatggtggctgagctgtgggctcacgaccccgaccccggcccgggggctgccccgggagacgctggccttcagggaggagctggatgtcctcaagttcttgtgcaaagacctgtgggtggcggtgttccagaagcagatggacagcctgcgcaccaatcaccaggggacctacgtcctgcaagacaacagcttccccctcctcctcccgatggcctctggcctgcagtatctggaggaagcacccaagttcctggccttcacctgcggcctcctgcgcggcgccctctataccctgggcattgagagcgtggtcaccgcctccgtggcagccctgcccgtctgtaagttccaggtggtgattccgaaatcctaagcctgcctcgcacctgctgagccgcactgctgcccctggcctcaccggcctcaggagacggtggggccgctgcatttcggggtggtcttgggaatcccaggccctaggggtcacatttgctcaggaagtgggtatcaaattgaggtgggggtgtcagaggaggcaaaggggtcccagctgcggtcaggactgtggtgggattcccgcctcggcagcgtcactgcccagtagctgctcaataaaggctgtgtgtgtggaa

SEQ ID NO: 315449 - DNA, 724 bp, Homo sapiens
atcttgaggcgtgcgaggagggggcatggcggatactgtgttgtttgagtttcttcacacggagatggtggctgagctgtgggctcacgaccccgaccccggcccgggggctgccccgggagacgctggccttcagggaggagctggatgtcctcaagttcttgtgcaaagacctgtgggtggcggtgttccagaagcagatggacagcctgcgcaccaatcaccaggggacctacgtcctgcaagacaacagcttccccctcctcctcccgatggcctctggcctgcagtatctggaggaagcacccaagttcctggccttcacctgcggcctcctgcgcggcgccctctataccctgggcattgagagcgtggtcaccgcctccgtggcagccctgcccgtctgtaagttccaggtggtgattccgaaatcctaagcctgcctcgcacctgctgagccgcactgctgcccctggcctcaccggcctcaggagacggtggggccgctgcatttcggggtggtcttgggaatcccaggccctaggggtcacatttgctcaggaagtgggtatcaaattgaggtgggggtgtcagaggaggcaaaggggtcccagctgcggtcaggactgtggtgggattcccgcctcggcagcgtcactgcccagtagctgctcaataaaggctgtgtgtgtggaaacagaacgaacaacgtctacaagcgcag

SEQ ID NO: 315450 - DNA, 884 bp, Homo sapiens
  misc_feature (649)..(649): n is a, c, g, or t
atcttgaggcgtgcgaggagggggcatggcggatactgtgttgtttgagtttcttcacacggagatggtggctgagctgtgggctcacgaccccgaccccggcccgggggtgagcgccgggctccgtggggaggaagcgggggccaccaaggccttctgcagggctaggatcggagggcgggacctggggccagtggtttaactgtaccctgcctgagctaactgttgtactgggaagagcagggaaggaagcaagcagtgtcaggttcacactggggccgtcacctcctgcaggctgctgggtcaggtggtccagacggctgtggacctgcagctgtggacacacatgggacagccacgtccactttggcctggaggacgtgcccctgctgacatggctcctgggctgcctgtccctggtccttgtggtggtgaccaatgagatcgtgaagctacatgagattcgggtccgagtccgctaccagaagcgacagaagctgcagtttgaaactaagctgggcatgaactctcccttctgagccactggctgtggtggctgtagttgcccccgtccctggggctaaagccagacccatttctgaacaggggagtttgtatcatgaatgtttccaggtttgctccttgcacncgtggcactggaaacccagctccccgtgtcagaccccgctgtcttcctgagccctggggctcactgtggaggagctgacggcctggcccttggccaggtcttggctcttccctgggctcaccagggacactcttgaatgtatggcctcaggcgctccctagagggggcctaaagcccttcacttgtgaggctaaccctttaggggatccttgccccttggagatccttgccccca

SEQ ID NO: 315451 - DNA, 484 bp, Homo sapiens
atcttgaggcgtgcgaggagggggcatggcggatactgtgttgtttgagtttcttcacacggagatggtggctgagctgtgggctcacgaccccgaccccggcccgggggtgagcgccgggctccgtggggaggaagcgggggccaccaaggtaacgcctctgggagagcggagggcgcgtcaggcgtccgggttcgaacccggcccagccccggccttgcagggcaacgtctggccctggcttcctcctttggaaagtggcgttcgcgacggtgccggctcggggttattgctaaattgagcgcgatgattcagggtaaagcacttagctcaaggcctgagtaagcggctagtaatcataataatgctgttattgggcgtgtgctgaggactcgcctcccccacttactaggtgtgcgacccaatgacttaatctttgtgtgtcctagttttctcttttgtaaaatgagtatcataacgtacc

SEQ ID NO: 315452 - DNA, 834 bp, Homo sapiens
atcttgaggcgtgcgaggagggggcatggcggatactgtgttgtttgagtttcttcacacggagatggtggctgagctgtgggctcacgaccccgaccccggcccgggggtgagcgccgggctccgtggggaggaagcgggggccaccaagggacagaagatgagcctgtcggtcctggagggtatggggttccgtgtgggccaggctctaggcgagaggctgccccgggagacgctggccttcagggaggagctggatgtcctcaagttcttgtgcaaagacctgtgggtggcggtgttccagaagcagatggacagcctgcgcaccaatcaccaggggacctacgtcctgcaagacaacagcttccccctcctcctcccgatggcctctggcctgcagtatctggaggaagcacccaagttcctggccttcacctgcggcctcctgcgcggcgccctctataccctgggcattgagagcgtggtcaccgcctccgtggcagccctgcccgtctgtaagttccaggtggtgattccgaaatcctaagcctgcctcgcacctgctgagccgcactgctgcccctggcctcaccggcctcaggagacggtggggccgctgcatttcggggtggtcttgggaatcccaggccctaggggtcacatttgctcaggaagtgggtatcaaattgaggtgggggtgtcagaggaggcaaaggggtcccagctgcggtcaggactgtggtgggattcccgcctcggcagcgtcactgcccagtagctgctcaataaaggctgtgtgtgtggaaacagaacgaacaacgtctacaagcgcag

SEQ ID NO: 315453 - DNA, 5100 bp, Homo sapiens
acccgtggctttcttagagaaatgaagtcttaagtcttaaatagacaacaaggaggggccgatcggtgtcttttggacgcgtctggagcccctccctccgccaaaggaaaagccccttggatgagaggcaggcgcttcagagaagctaagaaaagcacctctccgcgcgccccacctcctccgcctcgcgctcctcctgagcagcgggcccagactgcgctccggccgcggccctcgccccgcggagccctcctaccccggcccgacgctcggcccgcgacctgccccgagccctctccatggaggcagcccgcccctccggctcctggaacggagccctctgccggctgctcctgctgaccctcgcgatcttaatatttgccagtgatgcctgcaaaaatgtgacattacatgttccctccaaactagatgccgagaaacttgttggtagagttaacctgaaagagtgctttacagctgcaaatctaattcattcaagtgatcctgacttccaaattttggaggatggttcagtctatacaacaaatactattctattgtcctcggagaagagaagttttaccatattactttccaacactgagaaccaagaaaagaagaaaatatttgtctttttggagcatcaaacaaaggtcctaaagaaaagacatactaaagaaaaagttctaaggcgcgccaagagaagatgggctccaattccttgttcgatgctagaaaactccttgggtccttttccacttttccttcaacaggttcaatctgacacggcccaaaactataccatatactattccataagaggtcctggagttgaccaagaacctcggaatttattttatgtggagagagacactggaaacttgtattgtactcgtcctgtagatcgtgagcagtatgaatcttttgagataattgcctttgcaacaactccagatgggtatactccagaacttccactgcccctaataatcaaaatagaggatgaaaatgataactacccaatttttacagaagaaacttatacttttacaatttttgaaaattgcagagtgggcactactgtgggacaagtgtgtgctactgacaaagatgagcctgacacgatgcacacacgcctgaagtactccatcattgggcaggtgccaccatcacccaccctattttctatgcatccaactacaggcgtgatcaccacaacatcatctcagctagacagagagttaattgacaagtaccagttgaaaataaaagtacaagacatggatggtcagtattttggtctacagacaacttcaacttgtatcattaacattgatgatgtaaatgaccacttgccaacatttactcgtacttcttatgtgacatcagtggaagaaaatacagttgatgtggaaatcttacgagttactgttgaggataaggacttagtgaatactgctaactggagagctaattataccattttaaagggcaatgaaaatggcaattttaaaattgtaacagatgccaaaaccaatgaaggagttctttgtgtagttaagcctttgaattatgaagaaaagcaacagatgatcttgcaaattggtgtagttaatgaagctccattttccagagaggctagtccaagatcagccatgagcacagcaacagttactgttaatgtagaagatcaggatgagggccctgagtgtaaccctccaatacagactgttcgcatgaaagaaaatgcagaagtgggaacaacaagcaatggatataaagcatatgacccagaaacaagaagtagcagtggcataaggtataagaaattaactgatccaacagggtgggtcaccattgatgaaaatacaggatcaatcaaagttttcagaagcctggatagagaggcagagaccatcaaaaatggcatatataatattacagtccttgcatcagaccaaggagggagaacatgtacggggacactgggcattatacttcaagacgtgaatgataacagcccattcatacctaaaaagacagtgatcatctgcaaacccaccatgtcatctgcggagattgttgcggttgatcctgatgagcctatccatggcccaccctttgactttagtctggagagttctacttcagaagtacagagaatgtggagactgaaagcaattaatgatacagcagcacgtctttcctatcagaatgatcctccatttggctcatatgtagtacctataacagtgagagatagacttggcatgtctagtgtcacttcattggatgttacactgtgtgactgcattaccgaaaatgactgcacacatcgtgtagatccaaggattggcggtggaggagtacaacttggaaagtgggccatccttgcaatattgttgggcatagcattgctcttttgcatcctgtttacgctggtctgtggggcttctgggacgtctaaacaaccaaaagtaattcctgatgatttagcccagcagaacctaattgtatcaaacacagaagctcctggagatgacaaagtgtattctgcgaatggcttcacaacccaaactgtgggcgcttctgctcagggagtttgtggcaccgtgggatcaggaatcaaaaacggaggtcaggagaccatcgaaatggtgaaaggaggacaccagacctcggaatcctgccggggggctggccaccatcacaccctggactcctgcaggggaggacacacggaggtggacaactgcagatacacttactcggagtggcacagttttactcagccccgtcttggtgaagaatccattagaggacacactctgattaaaaattaaacaatgaaagaaagtgtatctgtgtaatcaagatgaaaatcacaagcatgcccaagactatgtcctgacatataactatgaaggaagaggatcggtggctgggtctgtaggttgttgcagtgaacgacaagaagaagatgggcttgaatttttggataatttggagcccaaatttaggacactagcagaagcatgcatgaagagatgagtgtgttctaataagtctctgaaagccagtggctttatgacttttaaaaaaaattacaaaccaagaattttttaaagcagaagatgctatttgtgggggtttttctctcattatttggatggaatctctttggtcaaatgcacatttacagagagacactataaacaagtacacaaatttttcaatttttacatatttttaaattacttatcttctatccaaggaggtctacagagaaattaaagtctgccttatttgttacatttgggtataatgacaacagccaatttatagtgcaataaaatgtaattaattcaagtccttattatagactatttgaagcacaacctaatggaaaattgtagagaccttgctttaacattatctccagttaattaagtgttcatgtggtgcttggaaactgttgttttcctgaacatctaaagtgtgtagactgcattcttgctattattttattcttgtaatgtgaccttttcactgtgcaaagggagatttctagccaggcattgactattacaatttcattttggtggagtttagttttaggttttattgtatataaaatcctgcactgaatctgtgtctcctctgttacctacttttgccagtgaaatttaagttttaaaatactttcagaatgtatttttactactgcaagtttttggtctttaaaatgtcaagtagcatctctctctttctctctgtctctttctgtttctctctccagttttttttttttttttaatttccatatgggctaaagaatccaaatattttaaaaatctgtctctcttttcttctctcataaagtgaattattccttttttttgttttatgtaagtgtatatattcttagtttttcttgaaatcattgtaatgttaactttgttgtttcaaatatcttggtgattgcttcattatctcttcaacaaaaaaaacctttaattttgccattgaaactgtagaactatgccatgcttttattagaagcagtgctctgtgttaacaacaagaatggtgtaattagaattgggatgtggatatttactgtatgacaacacatttacagttctgtaatgcaaggatgcagtttaaaaatgtgaagtagtgatggtttttgaaataagctttaaaatatagggatcttgaaggctccctggggtaactattttataacttagataaaatggctagtcatatctgtgtgtttgtaaagttatttttttaatattttaagattacaattttaacaaatgtagaaatgagccaaactatttaaattttaaaacagtaaaacaaaatgaaacttaatagctcacaaaattccagtccatgtttcatgacttattttagtcaatgaattttctatttatactaaacatatggacattttaaatgtgtttctaatatttttgattatctataatgtgcctgtcttcaattcacaagattgggttataacaattatttgccagattaacactagggaattatttgataaccagcttatcttatcagtagttttattgctgatcaggcaaaaatagttttccaaagttatttttaataaagtatatacaaaattcttatatattactagtcatgataaagtaaattaagcagtttttaaaacttagtgtgagtttgttcatcacaggtctgatatgagtttaagggatttcgcactccctgaatcagagaagtaagaccccttccttagattcctgttatacattttttaaaatgtagagtttgttttggagacattttcagtgcattgttattgccatatttatataatatgactattctaaaggctgtgaggccatggggtattggttaagttgcttgcttttgctttgtccattttcatcattttaaaatgggggataataacagaacttgtttcctagggccattgtaagtcacttgaataaaaaatagttttgaagcatgagagtcatacagagcggtccacctaaaaggcactcctgataataataaatgattttaaacaaaaaaaaaaaa

SEQ ID NO: 315454 - DNA, 3685 bp, Homo sapiens
tctagaggaccccgttcattttctacaccaagtagatgggcactccagtaaaaatgacatccacacactgttgaaggatcttaattcatatcttgaagataaagtctaccttacagggtataactttacattagcagatatactattgtactatggacttcatcgctttatagtgagtatttgtatagttaagcctttgaattatgaagaaaagcaacagatgatcttgcaaattggtgtagttaatgaagctccattttccagagaggctagtccaagatcagccatgagcacagcaacagttactgttaatgtagaagatcaggatgagggccctgagtgtaaccctccaatacagactgttcgcatgaaagaaaatgcagaagtgggaacaacaagcaatggatataaagcatatgacccagaaacaagaagtagcagtggcataaggtataagaaattaactgatccaacagggtgggtcaccattgatgaaaatacaggatcaatcaaagttttcagaagcctggatagagaggcagagaccatcaaaaatggcatatataatattacagtccttgcatcagaccaaggagggagaacatgtacggggacactgggcattatacttcaagacgtgaatgataacagcccattcatacctaaaaagacagtgatcatctgcaaacccaccatgtcatctgcggagattgttgcggttgatcctgatgagcctatccatggcccaccctttgactttagtctggagagttctacttcagaagtacagagaatgtggagactgaaagcaattaatgatacagcagcacgtctttcctatcagaatgatcctccatttggctcatatgtagtacctataacagtgagagatagacttggcatgtctagtgtcacttcattggatgttacactgtgtgactgcattaccgaaaatgactgcacacatcgtgtagatccaaggattggcggtggaggagtacaacttggaaagtgggccatccttgcaatattgttgggcatagcattgctcttttgcatcctgtttacgctggtctgtggggcttctgggacgtctaaacaaccaaaagtaattcctgatgatttagcccagcagaacctaattgtatcaaacacagaagctcctggagatgacaaagtgtattctgcgaatggcttcacaacccaaactgtgggcgcttctgctcagggagtttgtggcaccgtgggatcaggaatcaaaaacggaggtcaggagaccatcgaaatggtgaaaggaggacaccagacctcggaatcctgccggggggctggccaccatcacaccctggactcctgcaggggaggacacacggaggtggacaactgcagatacacttactcggagtggcacagttttactcagccccgtcttggtgaaaaagtgtatctgtgtaatcaagatgaaaatcacaagcatgcccaagactatgtcctgacatataactatgaaggaagaggatcggtggctgggtctgtaggttgttgcagtgaacgacaagaagaagatgggcttgaatttttggataatttggagcccaaatttaggacactagcagaagcatgcatgaagagatgagtgtgttctaataagtctctgaaagccagtggctttatgacttttaaaaaaaattacaaaccaagaattttttaaagcagaagatgctatttgtgggggtttttctctcattatttggatggaatctctttggtcaaatgcacatttacagagagacactataaacaagtacacaaatttttcaatttttacatatttttaaattacttatcttctatccaaggaggtctacagagaaattaaagtctgccttatttgttacatttgggtataatgacaacagccaatttatagtgcaataaaatgtaattaattcaagtccttattatagactatttgaagcacaacctaatggaaaattgtagagaccttgctttaacattatctccagttaattaagtgttcatgtggtgcttggaaactgttgttttcctgaacatctaaagtgtgtagactgcattcttgctattattttattcttgtaatgtgaccttttcactgtgcaaagggagatttctagccaggcattgactattacaatttcattttggtggagtttagttttaggttttattgtatataaaatcctgcactgaatctgtgtctcctctgttacctacttttgccagtgaaatttaagttttaaaatactttcagaatgtatttttactactgcaagtttttggtctttaaaatgtcaagtagcatctctctctttctctctgtctctttctgtttctctctccagttttttttttttttttaatttccatatgggctaaagaatccaaatattttaaaaatctgtctctcttttcttctctcataaagtgaattattccttttttttgttttatgtaagtgtatatattcttagtttttcttgaaatcattgtaatgttaactttgttgtttcaaatatcttggtgattgcttcattatctcttcaacaaaaaaaacctttaattttgccattgaaactgtagaactatgccatgcttttattagaagcagtgctctgtgttaacaacaagaatggtgtaattagaattgggatgtggatatttactgtatgacaacacatttacagttctgtaatgcaaggatgcagtttaaaaatgtgaagtagtgatggtttttgaaataagctttaaaatatagggatcttgaaggctccctggggtaactattttataacttagataaaatggctagtcatatctgtgtgtttgtaaagttatttttttaatattttaagattacaattttaacaaatgtagaaatgagccaaactatttaaattttaaaacagtaaaacaaaatgaaacttaatagctcacaaaattccagtccatgtttcatgacttattttagtcaatgaattttctatttatactaaacatatggacattttaaatgtgtttctaatatttttgattatctataatgtgcctgtcttcaattcacaagattgggttataacaattatttgccagattaacactagggaattatttgataaccagcttatcttatcagtagttttattgctgatcaggcaaaaatagttttccaaagttatttttaataaagtatatacaaaattcttatatattactagtcatgataaagtaaattaagcagtttttaaaacttagtgtgagtttgttcatcacaggtctgatatgagtttaagggatttcgcactccctgaatcagagaagtaagaccccttccttagattcctgttatacattttttaaaatgtagagtttgttttggagacattttcagtgcattgttattgccatatttatataatatgactattctaaaggctgtgaggccatggggtattggttaagttgcttgcttttgctttgtccattttcatcattttaaaatgggggataataacagaacttgtttcctagggccattgtaagtcacttgaataaaaaatagttttgaagcatgagagtcatacagagcggtccacctaaaaggcactcctgataataataaatgattttaaacaaaaaaaaaaaa

SEQ ID NO: 315455 - DNA, 2018 bp, Homo sapiens
tagaggacccgacgtaatatgtaaccaaaccaagaattttttaaagcagaagatgctatttgtgggggtttttctctcattatttggatggaatctctttggtcaaatgcacatttacagagagacactataaacaagtacacaaatttttcaatttttacatatttttaaattacttatcttctatccaaggaggtctacagagaaattaaagtctgccttatttgttacatttgggtataatgacaacagccaatttatagtgcaataaaatgtaattaattcaagtccttattatagactatttgaagcacaacctaatggaaaattgtagagaccttgctttaacattatctccagttaattaagtgttcatgtggtgcttggaaactgttgttttcctgaacatctaaagtgtgtagactgcattcttgctattattttattcttgtaatgtgaccttttcactgtgcaaagggagatttctagccaggcattgactattacaatttcattttggtggagtttagttttaggttttattgtatataaaatcctgcactgaatctgtgtctcctctgttacctacttttgccagtgaaatttaagttttaaaatactttcagaatgtatttttactactgcaagtttttggtctttaaaatgtcaagtagcatctctctctttctctctgtctctttctgtttctctctccagttttttttttttttttaatttccatatgggctaaagaatccaaatattttaaaaatctgtctctcttttcttctctcataaagtgaattattccttttttttgttttatgtaagtgtatatattcttagtttttcttgaaatcattgtaatgttaactttgttgtttcaaatatcttggtgattgcttcattatctcttcaacaaaaaaaacctttaattttgccattgaaactgtagaactatgccatgcttttattagaagcagtgctctgtgttaacaacaagaatggtgtaattagaattgggatgtggatatttactgtatgacaacacatttacagttctgtaatgcaaggatgcagtttaaaaatgtgaagtagtgatggtttttgaaataagctttaaaatatagggatcttgaaggctccctggggtaactattttataacttagataaaatggctagtcatatctgtgtgtttgtaaagttatttttttaatattttaagattacaattttaacaaatgtagaaatgagccaaactatttaaattttaaaacagtaaaacaaaatgaaacttaatagctcacaaaattccagtccatgtttcatgacttattttagtcaatgaattttctatttatactaaacatatggacattttaaatgtgtttctaatatttttgattatctataatgtgcctgtcttcaattcacaagattgggttataacaattatttgccagattaacactagggaattatttgataaccagcttatcttatcagtagttttattgctgatcaggcaaaaatagttttccaaagttatttttaataaagtatatacaaaattcttatatattactagtcatgataaagtaaattaagcagtttttaaaacttagtgtgagtttgttcatcacaggtctgatatgagtttaagggatttcgcactccctgaatcagagaagtaagaccccttccttagattcctgttatacattttttaaaatgtagagtttgttttggagacattttcagtgcattgttattgccatatttatataatatgactattctaaaggctgtgaggccatggggtattggttaagttgcttgcttttgctttgtccattttcatcattttaaaatgggggataataacagaacttgtttcctagggccattgtaagtcacttgaataaaaaatagttttgaagcatgagagtcatacagagcggtccacctaaaaggcactcctgataataataaatgattttaaacaaaaaaaaaaaa

SEQ ID NO: 315456 - DNA, 3322 bp, Homo sapiens
acccgtggctttcttagagaaatgaagtcttaagtcttaaatagacaacaaggaggggccgatcggtgtcttttggacgcgtctggagcccctccctccgccaaaggaaaagccccttggatgagaggcaggcgcttcagagaagctaagaaaagcacctctccgcgcgccccacctcctccgcctcgcgctcctcctgagcagcgggcccagactgcgctccggccgcggccctcgccccgcggagccctcctaccccggcccgacgctcggcccgcgacctgccccgagccctctccatggaggcagcccgcccctccggctcctggaacggagccctctgccggctgctcctgctgaccctcgcgatcttaatatttgccagtgatgcctgcaaaaatgtgacattacatgttccctccaaactagatgccgagaaacttgttggtagagttaacctgaaagagtgctttacagctgcaaatctaattcattcaagtgatcctgacttccaaattttggaggatggttcagtctatacaacaaatactattctattgtcctcggagaagagaagttttaccatattactttccaacactgagaaccaagaaaagaagaaaatatttgtctttttggagcatcaaacaaaggtcctaaagaaaagacatactaaagaaaaagttctaaggcgcgccaagagaagatgggctccaattccttgttcgatgctagaaaactccttgggtccttttccacttttccttcaacaggttcaatctgacacggcccaaaactataccatatactattccataagaggtcctggagttgaccaagaacctcggaatttattttatgtggagagagacactggaaacttgtattgtactcgtcctgtagatcgtgagcagtatgaatcttttgagataattgcctttgcaacaactccagatgggtatactccagaacttccactgcccctaataatcaaaatagaggatgaaaatgataactacccaatttttacagaagaaacttatacttttacaatttttgaaaattgcagagtgggcactactgtgggacaagtgtgtgctactgacaaagatgagcctgacacgatgcacacacgcctgaagtactccatcattgggcaggtgccaccatcacccaccctattttctatgcatccaactacaggcgtgatcaccacaacatcatctcagctagacagagagttaattgacaagtaccagttgaaaataaaagtacaagacatggatggtcagtattttggtctacagacaacttcaacttgtatcattaacattgatgatgtaaatgaccacttgccaacatttactcgtacttcttatgtgacatcagtggaagaaaatacagttgatgtggaaatcttacgagttactgttgaggataaggacttagtgaatactgctaactggagagctaattataccattttaaagggcaatgaaaatggcaattttaaaattgtaacagatgccaaaaccaatgaaggagttctttgtgtagttaagcctttgaattatgaagaaaagcaacagatgatcttgcaaattggtgtagttaatgaagctccattttccagagaggctagtccaagatcagccatgagcacagcaacagttactgttaatgtagaagatcaggatgagggccctgagtgtaaccctccaatacagactgttcgcatgaaagaaaatgcagaagtgggaacaacaagcaatggatataaagcatatgacccagaaacaagaagtagcagtggcataaggtataagaaattaactgatccaacagggtgggtcaccattgatgaaaatacaggatcaatcaaagttttcagaagcctggatagagaggcagagaccatcaaaaatggcatatataatattacagtccttgcatcagaccaaggagggagaacatgtacggggacactgggcattatacttcaagacgtgaatgataacagcccattcatacctaaaaagacagtgatcatctgcaaacccaccatgtcatctgcggagattgttgcggttgatcctgatgagcctatccatggcccaccctttgactttagtctggagagttctacttcagaagtacagagaatgtggagactgaaagcaattaatgatacagcagcacgtctttcctatcagaatgatcctccatttggctcatatgtagtacctataacagtgagagatagacttggcatgtctagtgtcacttcattggatgttacactgtgtgactgcattaccgaaaatgactgcacacatcgtgtagatccaaggattggcggtggaggagtacaacttggaaagtgggccatccttgcaatattgttgggcatagcattgctcttttgcatcctgtttacgctggtctgtggggcttctgggacgtctaaacaaccaaaagtaattcctgatgatttagcccagcagaacctaattgtatcaaacacagaagctcctggagatgacaaagtgtattctgcgaatggcttcacaacccaaactgtgggcgcttctgctcagggagtttgtggcaccgtgggatcaggaatcaaaaacggaggtcaggagaccatcgaaatggtgaaaggaggacaccagacctcggaatcctgccggggggctggccaccatcacaccctggactcctgcaggggaggacacacggaggtggacaactgcagatacacttactcggagtggcacagttttactcagccccgtcttggtgaaaaagtgtatctgtgtaatcaagatgaaaatcacaagcatgcccaagactatgtcctgacatataactatgaaggaagaggatcggtggctgggtctgtaggttgttgcagtgaacgacaagaagaagatgggcttgaatttttggataatttggagcccaaatttaggacactagcagaagcatgcatgaagagatgagtgtgttctaataagtctctgaaagccagtggctttatgacttttaaaaaaaattacaaaccaagaattttttaaagcagaagatgctatttgtgggggtttttctctcattatttggatggaatctctttggtcaaatgcacatttacagagagacactataaacaagtacacaaatttttcaatttttacatatttttaaattacttatcttctatccaaggaggtctacagagaaattaaagtctgccttatttgttacatttgggtataatgacaacagccaatttatagtgcaataaaatgtaattaattca

SEQ ID NO: 315457 - DNA, 4808 bp, Homo sapiens
acccgtggctttcttagagaaatgaagtcttaagtcttaaatagacaacaaggaggggccgatcggtgtcttttggacgcgtctggagcccctccctccgccaaaggaaaagccccttggatgagaggcaggcgcttcagagaagctaagaaaagcacctctccgcgcgccccacctcctccgcctcgcgctcctcctgagcagcgggcccagactgcgctccggccgcggccctcgccccgcggagccctcctaccccggcccgacgctcggcccgcgacctgccccgagccctctccatggaggcagcccgcccctccggctcctggaacggagccctctgccggctgctcctgctgaccctcgcgatcttaatatttgccagtgatgcctgcaaaaatgtgacattacatgttccctccaaactagatgccgagaaacttgttggtagagttaacctgaaagagtgctttacagctgcaaatctaattcattcaagtgatcctgacttccaaattttggaggatggttcagtctatacaacaaatactattctattgtcctcggagaagagaagttttaccatattactttccaacactgagaaccaagaaaagaagaaaatatttgtctttttggagcatcaaacaaaggtcctaaagaaaagacatactaaagaaaaagttctaaggcgcgccaagagaagatgggctccaattccttgttcgatgctagaaaactccttgggtccttttccacttttccttcaacaggttcaatctgacacggcccaaaactataccatatactattccataagaggtcctggagttgaccaagaacctcggaatttattttatgtggagagagacactggaaacttgtattgtactcgtcctgtagatcgtgagcagtatgaatcttttgagataattgcctttgcaacaactccagatgggtatactccagaacttccactgcccctaataatcaaaatagaggatgaaaatgataactacccaatttttacagaagaaacttatacttttacaatttttgaaaattgcagagtgggcactactgtgggacaagtgtgtgctactgacaaagatgagcctgacacgatgcacacacgcctgaagtactccatcattgggcaggtgccaccatcacccaccctattttctatgcatccaactacaggcgtgatcaccacaacatcatctcagctagacagagagttaattgacaagtaccagttgaaaataaaagtacaagacatggatggtcagtattttggtctacagacaacttcaacttgtatcattaacattgatgatgtaaatgaccacttgccaacatttactcgtacttcttatgtgacatcagtggaagaaaatacagttgatgtggaaatcttacgagttactgttgaggataaggacttagtgaatactgctaactggagagctaattataccattttaaagggcaatgaaaatggcaattttaaaattgtaacagatgccaaaaccaatgaaggagttctttgtgtagttaagcctttgaattatgaagaaaagcaacagatgatcttgcaaattggtgtagttaatgaagctccattttccagagaggctagtccaagatcagccatgagcacagcaacagttactgttaatgtagaagatcaggatgagggccctgagtgtaaccctccaatacagactgttcgcatgaaagaaaatgcagaagtgggaacaacaagcaatggatataaagcatatgacccagaaacaagaagtagcagtggcataaggtataagaaattaactgatccaacagggtgggtcaccattgatgaaaatacaggatcaatcaaagttttcagaagcctggatagagaggcagagaccatcaaaaatggcatatataatattacagtccttgcatcagaccaaggagggagaacatgtacggggacactgggcattatacttcaagacgtgaatgataacagcccattcatacctaaaaagacagtgatcatctgcaaacccaccatgtcatctgcggagattgttgcggttgatcctgatgagcctatccatggcccaccctttgactttagtctggagagttctacttcagaagtacagagaatgtggagactgaaagcaattaatgatacagcagcacgtctttcctatcagaatgatcctccatttggctcatatgtagtacctataacagtgagagatagacttggcatgtctagtgtcacttcattggatgttacactgtgtgactgcattaccgaaaatgactgcacacatcgtgtagatccaaggattggcggtggaggagtacaacttggaaagtgggccatccttgcaatattgttgggcatagcattgctcttttgcatcctgtttacgctggtctgtggggcttctgggacgtctaaacaaccaaaagtaattcctgatgatttagcccagcagaacctaattgtatcaaacacagaagctcctggagatgacaaagtgtattctgcgaatggcttcacaacccaaactgtgggcgcttctgctcagggagtttgtggcaccgtgggatcaggaatcaaaaacggaggtcaggagaccatcgaaatggtgaaaggaggacaccagacctcggaatcctgccggggggctggccaccatcacaccctggactcctgcaggggaggacacacggaggtggacaactgcagatacacttactcggagtggcacagttttactcagccccgtcttggtgaagaatccattagaggacacactctgattaaaaattaaacaatgaaagaaagtgtatctgtgtaatcaagatgaaaatcacaagcatgcccaagactatgtcctgacatataactatgaaggaagaggatcggtggctgggtctgtaggttgttgcagtgaacgacaagaagaagatgggcttgaatttttggataatttggagcccaaatttaggacactagcagaagcatgcatgaagagatgagtgtgttctaataagtctctgaaagccagtggctttatgacttttaaaaaaaattacaaaccaagaattttttaaagcagaagatgctatttgtgggggtttttctctcattatttggatggaatctctttggtcaaatgcacatttacagagagacactataaacaagtacacaaatttttcaatttttacatatttttaaattacttatcttctatccaaggaggtctacagagaaattaaagtctgccttatttgttacatttgggtataatgacaacagccaatttatagtgcaataaaatgtaattaattcaagtccttattatagactatttgaagcacaacctaatggaaaattgtagagaccttgctttaacattatctccagttaattaagtgttcatgtggtgcttggaaactgttgttttcctgaacatctaaagtgtgtagactgcattcttgctattattttattcttgtaatgtgaccttttcactgtgcaaagggagatttctagccaggcattgactattacaatttcattttggtggagtttagttttaggttttattgtatataaaatcctgcactgaatctgtgtctcctctgttacctacttttgccagtgaaatttaagttttaaaatactttcagaatgtatttttactactgcaagtttttggtctttaaaatgtcaagtagcatctctctctttctctctgtctctttctgtttctctctccagttttttttttttttttaatttccatatgggctaaagaatccaaatattttaaaaatctgtctctcttttcttctctcataaagtgaattattccttttttttgttttatgtaagtgtatatattcttagtttttcttgaaatcattgtaatgttaactttgttgtttcaaatatcttggtgattgcttcattatctcttcaacaaaaaaaacctttaattttgccattgaaactgtagaactatgccatgcttttattagaagcagtgctctgtgttaacaacaagaatggtgtaattagaattgggatgtggatatttactgtatgacaacacatttacagttctgtaatgcaaggatgcagtttaaaaatgtgaagtagtgatggtttttgaaataagctttaaaatatagggatcttgaaggctccctggggtaactattttataacttagataaaatggctagtcatatctgtgtgtttgtaaagttatttttttaatattttaagattacaattttaacaaatgtagaaatgagccaaactatttaaattttaaaacagtaaaacaaaatgaaacttaatagctcacaaaattccagtccatgtttcatgacttattttagtcaatgaattttctatttatactaaacatatggacattttaaatgtgtttctaatatttttgattatctataatgtgcctgtcttcaattcacaagattgggttataacaattatttgccagattaacactagggaattatttgataaccagcttatcttatcagtagttttattgctgatcaggcaaaaatagttttccaaagttatttttaataaagtatatacaaaattcttatatattactagtcatgataaagtaaattaagcagtttttaaaacttagtgtgagtttgttcatcacaggaatctaaggaaggggtcttacttctctgattcagggagtgcgaaatcccttaaactcatatcagacctgtggtcgacg

SEQ ID NO: 315458 - DNA, 5054 bp, Homo sapiens
acccgtggctttcttagagaaatgaagtcttaagtcttaaatagacaacaaggaggggccgatcggtgtcttttggacgcgtctggagcccctccctccgccaaaggaaaagccccttggatgagaggcaggcgcttcagagaagctaagaaaagcacctctccgcgcgccccacctcctccgcctcgcgctcctcctgagcagcgggcccagactgcgctccggccgcggccctcgccccgcggagccctcctaccccggcccgacgctcggcccgcgacctgccccgagccctctccatggaggcagcccgcccctccggctcctggaacggagccctctgccggctgctcctgctgaccctcgcgatcttaatatttgccagtgatgcctgcaaaaatgtgacattacatgttccctccaaactagatgccgagaaacttgttggtagagttaacctgaaagagtgctttacagctgcaaatctaattcattcaagtgatcctgacttccaaattttggaggatggttcagtctatacaacaaatactattctattgtcctcggagaagagaagttttaccatattactttccaacactgagaaccaagaaaagaagaaaatatttgtctttttggagcatcaaacaaaggtcctaaagaaaagacatactaaagaaaaagttctaaggcgcgccaagagaagatgggctccaattccttgttcgatgctagaaaactccttgggtccttttccacttttccttcaacaggttcaatctgacacggcccaaaactataccatatactattccataagaggtcctggagttgaccaagaacctcggaatttattttatgtggagagagacactggaaacttgtattgtactcgtcctgtagatcgtgagcagtatgaatcttttgagataattgcctttgcaacaactccagatgggtatactccagaacttccactgcccctaataatcaaaatagaggatgaaaatgataactacccaatttttacagaagaaacttatacttttacaatttttgaaaattgcagagtgggcactactgtgggacaagtgtgtgctactgacaaagatgagcctgacacgatgcacacacgcctgaagtactccatcattgggcaggtgccaccatcacccaccctattttctatgcatccaactacaggcgtgatcaccacaacatcatctcagctagacagagagttaattgacaagtaccagttgaaaataaaagtacaagacatggatggtcagtattttggtctacagacaacttcaacttgtatcattaacattgatgatgtaaatgaccacttgccaacatttactcgtacttcttatgtgacatcagtggaagaaaatacagttgatgtggaaatcttacgagttactgttgaggataaggacttagtgaatactgctaactggagagctaattataccattttaaagggcaatgaaaatggcaattttaaaattgtaacagatgccaaaaccaatgaaggagttctttgtgtagttaagcctttgaattatgaagaaaagcaacagatgatcttgcaaattggtgtagttaatgaagctccattttccagagaggctagtccaagatcagccatgagcacagcaacagttactgttaatgtagaagatcaggatgagggccctgagtgtaaccctccaatacagactgttcgcatgaaagaaaatgcagaagtgggaacaacaagcaatggatataaagcatatgacccagaaacaagaagtagcagtggcataaggtataagaaattaactgatccaacagggtgggtcaccattgatgaaaatacaggatcaatcaaagttttcagaagcctggatagagaggcagagaccatcaaaaatggcatatataatattacagtccttgcatcagaccaaggagggagaacatgtacggggacactgggcattatacttcaagacgtgaatgataacagcccattcatacctaaaaagacagtgatcatctgcaaacccaccatgtcatctgcggagattgttgcggttgatcctgatgagcctatccatggcccaccctttgactttagtctggagagttctacttcagaagtacagagaatgtggagactgaaagcaattaatgatacagcagcacgtctttcctatcagaatgatcctccatttggctcatatgtagtacctataacagtgagagatagacttggcatgtctagtgtcacttcattggatgttacactgtgtgactgcattaccgaaaatgactgcacacatcgtgtagatccaaggattggcggtggaggagtacaacttggaaagtgggccatccttgcaatattgttgggcatagcattgctcttttgcatcctgtttacgctggtctgtggggcttctgggacgtctaaacaaccaaaagtaattcctgatgatttagcccagcagaacctaattgtatcaaacacagaagctcctggagatgacaaagtgtattctgcgaatggcttcacaacccaaactgtgggcgcttctgctcagggagtttgtggcaccgtgggatcaggaatcaaaaacggaggtcaggagaccatcgaaatggtgaaaggaggacaccagacctcggaatcctgccggggggctggccaccatcacaccctggactcctgcaggggaggacacacggaggtggacaactgcagatacacttactcggagtggcacagttttactcagccccgtcttggtgaaaaagtgtatctgtgtaatcaagatgaaaatcacaagcatgcccaagactatgtcctgacatataactatgaaggaagaggatcggtggctgggtctgtaggttgttgcagtgaacgacaagaagaagatgggcttgaatttttggataatttggagcccaaatttaggacactagcagaagcatgcatgaagagatgagtgtgttctaataagtctctgaaagccagtggctttatgacttttaaaaaaaattacaaaccaagaattttttaaagcagaagatgctatttgtgggggtttttctctcattatttggatggaatctctttggtcaaatgcacatttacagagagacactataaacaagtacacaaatttttcaatttttacatatttttaaattacttatcttctatccaaggaggtctacagagaaattaaagtctgccttatttgttacatttgggtataatgacaacagccaatttatagtgcaataaaatgtaattaattcaagtccttattatagactatttgaagcacaacctaatggaaaattgtagagaccttgctttaacattatctccagttaattaagtgttcatgtggtgcttggaaactgttgttttcctgaacatctaaagtgtgtagactgcattcttgctattattttattcttgtaatgtgaccttttcactgtgcaaagggagatttctagccaggcattgactattacaatttcattttggtggagtttagttttaggttttattgtatataaaatcctgcactgaatctgtgtctcctctgttacctacttttgccagtgaaatttaagttttaaaatactttcagaatgtatttttactactgcaagtttttggtctttaaaatgtcaagtagcatctctctctttctctctgtctctttctgtttctctctccagttttttttttttttttaatttccatatgggctaaagaatccaaatattttaaaaatctgtctctcttttcttctctcataaagtgaattattccttttttttgttttatgtaagtgtatatattcttagtttttcttgaaatcattgtaatgttaactttgttgtttcaaatatcttggtgattgcttcattatctcttcaacaaaaaaaacctttaattttgccattgaaactgtagaactatgccatgcttttattagaagcagtgctctgtgttaacaacaagaatggtgtaattagaattgggatgtggatatttactgtatgacaacacatttacagttctgtaatgcaaggatgcagtttaaaaatgtgaagtagtgatggtttttgaaataagctttaaaatatagggatcttgaaggctccctggggtaactattttataacttagataaaatggctagtcatatctgtgtgtttgtaaagttatttttttaatattttaagattacaattttaacaaatgtagaaatgagccaaactatttaaattttaaaacagtaaaacaaaatgaaacttaatagctcacaaaattccagtccatgtttcatgacttattttagtcaatgaattttctatttatactaaacatatggacattttaaatgtgtttctaatatttttgattatctataatgtgcctgtcttcaattcacaagattgggttataacaattatttgccagattaacactagggaattatttgataaccagcttatcttatcagtagttttattgctgatcaggcaaaaatagttttccaaagttatttttaataaagtatatacaaaattcttatatattactagtcatgataaagtaaattaagcagtttttaaaacttagtgtgagtttgttcatcacaggtctgatatgagtttaagggatttcgcactccctgaatcagagaagtaagaccccttccttagattcctgttatacattttttaaaatgtagagtttgttttggagacattttcagtgcattgttattgccatatttatataatatgactattctaaaggctgtgaggccatggggtattggttaagttgcttgcttttgctttgtccattttcatcattttaaaatgggggataataacagaacttgtttcctagggccattgtaagtcacttgaataaaaaatagttttgaagcatgagagtcatacagagcggtccacctaaaaggcactcctgataataataaatgattttaaacaaaaaaaaaaaa

SEQ ID NO: 315459 - DNA, 3069 bp, Homo sapiens
acccgtggctttcttagagaaatgaagtcttaagtcttaaatagacaacaaggaggggccgatcggtgtcttttggacgcgtctggagcccctccctccgccaaaggaaaagccccttggatgagaggcaggcgcttcagagaagctaagaaaagcacctctccgcgcgccccacctcctccgcctcgcgctcctcctgagcagcgggcccagactgcgctccggccgcggccctcgccccgcggagccctcctaccccggcccgacgctcggcccgcgacctgccccgagccctctccatggaggcagcccgcccctccggctcctggaacggagccctctgccggctgctcctgctgaccctcgcgatcttaatatttgccagtgatgcctgcaaaaatgtgacattacatgttccctccaaactagatgccgagaaacttgttggtagagttaacctgaaagagtgctttacagctgcaaatctaattcattcaagtgatcctgacttccaaattttggaggatggttcagtctatacaacaaatactattctattgtcctcggagaagagaagttttaccatattactttccaacactgagaaccaagaaaagaagaaaatatttgtctttttggagcatcaaacaaaggtcctaaagaaaagacatactaaagaaaaagttctaaggcgcgccaagagaagatgggctccaattccttgttcgatgctagaaaactccttgggtccttttccacttttccttcaacaggttcaatctgacacggcccaaaactataccatatactattccataagaggtcctggagttgaccaagaacctcggaatttattttatgtggagagagacactggaaacttgtattgtactcgtcctgtagatcgtgagcagtatgaatcttttgagataattgcctttgcaacaactccagatgggtatactccagaacttccactgcccctaataatcaaaatagaggatgaaaatgataactacccaatttttacagaagaaacttatacttttacaatttttgaaaattgcagagtgggcactactgtgggacaagtgtgtgctactgacaaagatgagcctgacacgatgcacacacgcctgaagtactccatcattgggcaggtgccaccatcacccaccctattttctatgcatccaactacaggcgtgatcaccacaacatcatctcagctagacagagagttaattgacaagtaccagttgaaaataaaagtacaagacatggatggtcagtattttggtctacagacaacttcaacttgtatcattaacattgatgatgtaaatgaccacttgccaacatttactcgtacttcttatgtgacatcagtggaagaaaatacagttgatgtggaaatcttacgagttactgttgaggataaggacttagtgaatactgctaactggagagctaattataccattttaaagggcaatgaaaatggcaattttaaaattgtaacagatgccaaaaccaatgaaggagttctttgtgtagttaagcctttgaattatgaagaaaagcaacagatgatcttgcaaattggtgtagttaatgaagctccattttccagagaggctagtccaagatcagccatgagcacagcaacagttactgttaatgtagaagatcaggatgagggccctgagtgtaaccctccaatacagactgttcgcatgaaagaaaatgcagaagtgggaacaacaagcaatggatataaagcatatgacccagaaacaagaagtagcagtggcataaggtataagaaattaactgatccaacagggtgggtcaccattgatgaaaatacaggatcaatcaaagttttcagaagcctggatagagaggcagagaccatcaaaaatggcatatataatattacagtccttgcatcagaccaaggagggagaacatgtacggggacactgggcattatacttcaagacgtgaatgataacagcccattcatacctaaaaagacagtgatcatctgcaaacccaccatgtcatctgcggagattgttgcggttgatcctgatgagcctatccatggcccaccctttgactttagtctggagagttctacttcagaagtacagagaatgtggagactgaaagcaattaatgatacagcagcacgtctttcctatcagaatgatcctccatttggctcatatgtagtacctataacagtgagagatagacttggcatgtctagtgtcacttcattggatgttacactgtgtgactgcattaccgaaaatgactgcacacatcgtgtagatccaaggattggcggtggaggagtacaacttggaaagtgggccatccttgcaatattgttgggcatagcattgctcttttgcatcctgtttacgctggtctgtggggcttctgggacgtctaaacaaccaaaagtaattcctgatgatttagcccagcagaacctaattgtatcaaacacagaagctcctggagatgacaaagtgtattctgcgaatggcttcacaacccaaactgtgggcgcttctgctcagggagtttgtggcaccgtgggatcaggaatcaaaaacggaggtcaggagaccatcgaaatggtgaaaggaggacaccagacctcggaatcctgccggggggctggccaccatcacaccctggactcctgcaggggaggacacacggaggtggacaactgcagatacacttactcggagtggcacagttttactcagccccgtcttggtgaaaaagtgtatctgtgtaatcaagatgaaaatcacaagcatgcccaagactatgtcctgacatataactatgaaggaagaggatcggtggctgggtctgtaggttgttgcagtgaacgacaagaagaagatgggcttgaattttttttaaaagtcataaagccactggctttcagagacttattagaacacactcatctcttcatgcatgcttctgctagtgtcctaaatctgggctccaaattatccaaaaattcaagtcgac

SEQ ID NO: 315460 - DNA, 265 bp, Homo sapiens
cgatcctcctgcctcagcctcctgagtagctcagattacaggcgtgagccactgcgcctggcctgatcatcttctgtatattgatgtatttcctttcagcctttcattgcatttttaaatgtagtagagatagaactaaagatagaaatttgtatcttagtcttatgtttttaacctgtaattgaattataagcattttcttgtgtaacaaagagctctttggaagctgtgtctcacaagcagttatccatgtcacccaaatgtg

SEQ ID NO: 315461 - DNA, 3668 bp, Homo sapiens
attcacactggagagaaaccttatatctgcaatgagtgtggaaaatcatttggtgctcgtctatcccttatccagcatcagagaattcacactggagagaaaccttatggttgtagtgtgtgtgggaaaacctttagtcaaaagggacatcttattcagcatcagtgaattcacacaggagagaaaccctatgaatgtagtgagtgtggaaaagctttcagccagagttttaatcttattcaccatcaaagaacacacaatggtgagaagtcctatgaatgtaatgaatgtgataaagccttcagtttgctttcttcccttgttcaacatcagagaatacataatggagacaaaccctatgagtgtcacaaatgtgggaaggcctttagccaggggtcacaccttattcagcatcagaggagtcacattggtgagaaaccctatgagtgtaatgagtgtgggaaaacctttgggcagatatccaccctaattaagcatgagagaacacacaatggagagaagccctatgagtgcagtgactgtgggaaggccttcagccagagtgcacaccttatccaccatcaaagaattcacactggagagaatccctatgagtgcagtgaatgtgggaaggccttcaatgtttgttcctctctcattcagcatcacagaattcatactggtgagaaaccttatgaatgtagtgactgtggcaaggcgttcagtcagcattcacaatttatccaacatcagagaattcacactggagagaaaccctacatgtgcaatgagtgtgagaaatccttcagtgcatgcttatcccttatccaacacaagagaattcacactggagagaaaccctatgtatgtgccaaatgtggaaaatccttctgacaaagctctcaccttattcaacatcagagaattcacagtggggagcaacctcatacgtgtaatcgatgtgaaaaaaccttcagttagagaataactcttagtagtcatgagaaaatccatacaattcacattagagagcaagtctatgaatgtagtaagtgtggggaactctagcgcacagtcatctttcattcaacattgtacagttcacagtggagagtaactgattagtctataaattcttcacagttatacattatatgagagtcatactcgtgagaaatgagtcactttatggttttccttttggagattcagctcttaagggatttcactctcccagtgagctgctaactaaaggcaggctgctgaagtatatagcagcaatcccacaatagcacaccttgcttcagattcagaggatgagcccccttcttgagccctgtagatatgtgaaacttaattatttagatgcatttcatggcaccagaccctaaggtacagttaggtatttcactggagaccacttactttgctttgctttgctttttttttttttttttgtatgatttatttcaacttcaaagaaagtagttgagatccttgcacttccaagtgtgatggaaccaggctagggttttctttgtttgtttgggcctcttcaaaacgtttttattctgttataaggaatatgataccttaagcttcaattcacagggaagagaaacatgattataagcaaaagtttgtcaaggaataaggtgagtctttgtgtagattaaaatagttgagaccttgctaaaaagtcagataacactgtaatccacctccaggtttccaagagttaagacgctgccagcaaggagcttgcagtcttgtagctggcccaatatatccaactaattcaaaatgggaaattgtacattttacttaaacaggatttggtagatgggtcttctagatatgttgtcatgaagaaaaatcaggtagctatgttacactgcaagaacagagttcatggcttttcctgaggtggctggaaaccttaatctcctgaagttaagtcaaaacttaaatgtcaattcacccagctctcttgcctgcaggctgatccagggacttagagcttgttacccagttacaacttcttctagagaagaacttttaagaaggaagcaaaaagaaattcagtttcccccaaggatctcttctttgaggttccatcaagagatgacaaaaggaggctgggtgcggtgtctcacacctgtaatcccagcactttgggaggctgaagtgggcagatcacgaggtcaagagatcaagaccatcctggccaacatggtgaaaccacatttctacaaaatgcaaaaattagctgggcatggtggtgcacgcctgtagtcccagctacttgggaggctgaggcaggagaattgcttgaacccaggaggcggaggtagcagtgagccaagattgcaccactgcattccagcatggccacaaagcaagactccaaaaaatatatatatatatgacaaaagggttaggaagcttttcctctgaggcccacgattacacaaccaaatcagaaaataatattttttttgttttaaacctgtttacataagatggaggtgtttacttaactaagaacctcggtatttactcaaatccggttttgggttttatggctaaaacatttctccagattaaccttatcagtttggaatatgtttttattttccattaaatatttcatccaaatcatactgaattttatttatcatgggcttttaatgttctctattcaagtcaaatttctgtttcctaattacttgggcttggtgatggcattaatattggttgggagctagatggtctctgctctatttgatgattggcatagagcaatcatacacttggtacttcctagcatttttttttgagacagtatcatgctgtatcatgttgcacagggtggagtgcagtggtgcagtcatagctcactgtaaccttgaactcctgggctcaagtgattcccctgcctcaacttcatgagtagcagggactacagctgtgtaccaccacaccggcctctcctggcttcttaaccacttacattaaaattgagaggagaaaggcattttcagtttctttagttaataaaaagaagccatttctggaggagttttatgcctgtaccagcagaggttcagccttccaggaatctcatcatgatccatactgctgacacaggcctttgtcacctgaagcattcttaaaataaggagactgacattaaacaggacaattgtgaactccactttgtaagcatcatacatatcttacaactcattctgaagactcctttattcttgctcttcccagagagctactgtgtttagtcatgctcactgcactcacaagagaaaaagagtaagtggcatatttgcaggtgttgatggttacaagagcatttttactttttcctccatgtttgttctgcagcatttccattgatgcatgctattgtagacttcttaggttgaccttggccttgacctccaccactagctcatgacccaaaactgaagatgtgcatcagaaagggacagatttggtctttctgctgtaaaagatattctgccttagtgcctgctaatttgttgtgcatagtcctgtgctgccaatcttccccaccaattgttaaggttaatgtgtgttttatatgtgtattcacaaacattaaaatgtaatcagtggattccaaaatt

SEQ ID NO: 315462 - DNA, 3722 bp, Homo sapiens
attcacactggagagaaaccttatatctgcaatgagtgtggaaaatcatttggtgctcgtctatcccttatccagcatcagagaattcacactggagagaaaccttatggttgtagtgtgtgtgggaaaacctttagtcaaaagggacatcttattcagcatcagtgaattcacacaggagagaaaccctatgaatgtagtgagtgtggaaaagctttcagccagagttttaatcttattcaccatcaaagaacacacaatggtgagaagtcctatgaatgtaatgaatgtgataaagccttcagtttgctttcttcccttgttcaacatcagagaatacataatggagacaaaccctatgagtgtcacaaatgtgggaaggcctttagccaggggtcacaccttattcagcatcagaggagtcacattggtgagaaaccctatgagtgtaatgagtgtgggaaaacctttgggcagatatccaccctaattaagcatgagagaacacacaatggagagaagccctatgagtgcagtgactgtgggaaggccttcagccagagtgcacaccttatccaccatcaaagaattcacactggagagaatccctatgagtgcagtgaatgtgggaaggccttcaatgtttgttcctctctcattcagcatcacagaattcatactggtgagaaaccttatgaatgtagtgactgtggcaaggcgttcagtcagcattcacaatttatccaacatcagagaattcacactggagagaaaccctacatgtgcaatgagtgtgagaaatccttcagtgcatgcttatcccttatccaacacaagagaattcacactggagagaaaccctatgtatgtgccaaatgtggaaaatccttctgacaaagctctcaccttattcaacatcagagaattcacagtggggagcaacctcatacgtgtaatcgatgtgaaaaaaccttcagttagagaataactcttagtagtcatgagaaaatccatacaattcacattagagagcaagtctatgaatgtagtaagtgtggggaactctagcgcacagtcatctttcattcaacattgtacagttcacagtggagagtaactgattagtctataaattcttcacagttatacattatatgagagtcatactcgtgagaaatgagtcactttatggttttccttttggagattcagctcttaagggatttcactctcccagtgagctgctaactaaaggcaggctgctgaagtatatagcagcaatcccacaatagcacaccttgcttcagattcagaggatgagcccccttcttgagccctgtagatatgtgaaacttaattatttagatgcatttcatggcaccagaccctaaggtacagttaggtatttcactggagaccacttactttgctttgctttgctttttttttttttttttgtatgatttatttcaacttcaaagaaagtagttgagatccttgcacttccaagtgtgatggaaccaggctagggttttctttgtttgtttgggcctcttcaaaacgtttttattctgttataaggaatatgataccttaagcttcaattcacagggaagagaaacatgattataagcaaaagtttgtcaaggaataaggtgagtctttgtgtagattaaaatagttgagaccttgctaaaaagtcagataacactgtaatccacctccaggtttccaagagttaagacgctgccagcaaggagcttgcagtcttgtagctggcccaatatatccaactaattcaaaatgggaaattgtacattttacttaaacaggatttggtagatgggtcttctagatatgttgtcatgaagaaaaatcaggaaaatgtccaagggtgggagcctgtggcttatggcttcacttacccatcacagatagctatgttacactgcaagaacagagttcatggcttttcctgaggtggctggaaaccttaatctcctgaagttaagtcaaaacttaaatgtcaattcacccagctctcttgcctgcaggctgatccagggacttagagcttgttacccagttacaacttcttctagagaagaacttttaagaaggaagcaaaaagaaattcagtttcccccaaggatctcttctttgaggttccatcaagagatgacaaaaggaggctgggtgcggtgtctcacacctgtaatcccagcactttgggaggctgaagtgggcagatcacgaggtcaagagatcaagaccatcctggccaacatggtgaaaccacatttctacaaaatgcaaaaattagctgggcatggtggtgcacgcctgtagtcccagctacttgggaggctgaggcaggagaattgcttgaacccaggaggcggaggtagcagtgagccaagattgcaccactgcattccagcatggccacaaagcaagactccaaaaaatatatatatatatgacaaaagggttaggaagcttttcctctgaggcccacgattacacaaccaaatcagaaaataatattttttttgttttaaacctgtttacataagatggaggtgtttacttaactaagaacctcggtatttactcaaatccggttttgggttttatggctaaaacatttctccagattaaccttatcagtttggaatatgtttttattttccattaaatatttcatccaaatcatactgaattttatttatcatgggcttttaatgttctctattcaagtcaaatttctgtttcctaattacttgggcttggtgatggcattaatattggttgggagctagatggtctctgctctatttgatgattggcatagagcaatcatacacttggtacttcctagcatttttttttgagacagtatcatgctgtatcatgttgcacagggtggagtgcagtggtgcagtcatagctcactgtaaccttgaactcctgggctcaagtgattcccctgcctcaacttcatgagtagcagggactacagctgtgtaccaccacaccggcctctcctggcttcttaaccacttacattaaaattgagaggagaaaggcattttcagtttctttagttaataaaaagaagccatttctggaggagttttatgcctgtaccagcagaggttcagccttccaggaatctcatcatgatccatactgctgacacaggcctttgtcacctgaagcattcttaaaataaggagactgacattaaacaggacaattgtgaactccactttgtaagcatcatacatatcttacaactcattctgaagactcctttattcttgctcttcccagagagctactgtgtttagtcatgctcactgcactcacaagagaaaaagagtaagtggcatatttgcaggtgttgatggttacaagagcatttttactttttcctccatgtttgttctgcagcatttccattgatgcatgctattgtagacttcttaggttgaccttggccttgacctccaccactagctcatgacccaaaactgaagatgtgcatcagaaagggacagatttggtctttctgctgtaaaagatattctgccttagtgcctgctaatttgttgtgcatagtcctgtgctgccaatcttccccaccaattgttaaggttaatgtgtgttttatatgtgtattcacaaacattaaaatgtaatcagtggattccaaaatt

SEQ ID NO: 315463 - DNA, 629 bp, Homo sapiens
tcctggcctcaaatgatcctctctcctgagtctctcaaaatgctgggattacaggcatgagccaccctgccgcagtgtttcttctttttgtcaaagcacttaagatctttttgtcatgaagttagtcacagtagggttactttttgtttcatagttaatgaccaaaaatttcaggaggaaaaattactaagacctcttaagtatcttttaaaaatatgttgaatgcttgaaagcttttttcaggcaaagagctcctttctatctgagccataagaatatgctaaaaacagttcataaggatggaatcttcagttcccatgtgtgacattctcaggtgcatacttgcagtgtggccatgtcagctatgtggcagagacctagattcactagtagtgtgacaggctaactgtaagctggttgtctgcttgcctccagtgtgttcattctgtgaatgaaatgtgtatttcttttgttatctaaaatgttctttctccccgtttctagctctcgtgctcattcccccatgatcgccgtaggaagtgatgacagtagccccaacgcaatggccaaggttcagatttttgaatataatgaaaacaccagtatatgtgagctgaggaccatccttg

SEQ ID NO: 315464 - DNA, 3243 bp, Homo sapiens
tggaagacacatagtggatctgtatggcgtgtgacatgggcccatcctgaatttgggcaggttttggcttcctgttcttttgaccgaacagctgctgtatgggaagaaatagtaggagaatcaaatgataaactgcgaggacagagccactgggttaaaaggacaactctggtggatagcagaacatctgttactgatgtgaagtttgctcccaagcacatgggtcttatgttagcaacctgttccgcagatggtatagtaagaatctatgaggcaccagatgttatgaatctcagccagtggtctttgcagcatgagatctcatgtaagctaagctgtagttgtatttcttggaacccttcaagctctcgtgctcattcccccatgatcgccgtaggaagtgatgacagtagccccaacgcaatggccaaggttcagatttttgaatataatgaaaacaccaggaaatatgcaaaagctgaaactcttatgacagtcactgatcctgttcatgatattgcattcgctccaaatttgggaagatctttccatattctagcaatagcgaccaaagatgtgagaatttttacattaaagcctgtgaggaaagaactgacttcctctggtgggccaacaaagtttgaaatccatatagtggctcagttcgataatcataattctcaggtctggcgagtgagttggaatataacaggaacggtgctagcatcttcaggagatgatgggtgtgtaagattgtggaaagctaattatatggacaattggaagtgtactggtattttgaaaggtaatgggagcccagtcaatgggagttctcagcagggaacctcaaatccttccctaggttcaactattccaagtcttcagaattcattaaatggatcttctgctggcagaaagcacagctgagtacaagctaactggagtaactttgctgttttgctgcttgttgcatgcacacaggaatggaaagcgagctccttttccccttccccagcgccgtttgacctctcccaagatacaccagcagcctgcttactactaaacgcaatccaaaaggcctttaaaaatacagtgtatattttttgtactagtcagtttattgacactatttgaaacttttgaaatataaacggagaggctttctgttgagacattgtcaccaaaacaattttttgaaatgttcctgaaactaatttgggtttaaagattaaaagggttgttaccattcttatctgagtagttgggaggaggggaataccactttagttcatttggaaaatatagacatatttcttttgctttcttaaaacagcttaaaatgatgaacttttataattttaatttgaagattgaataaatattttttataaagattgttttgagtgctgatttgtttactttttgtagatttgctttatccatgatattcagtacaactctgtcatttctttgtaatatttaaaaaatattagtaaaggagtgaattaataaagtagtaatagtaaaatgaaaggaacttgactgtacagtttgtagccaggttaagcatttggtattgtttcatttacaatttgggactaagatggaaacactttttttataagtttttaattcatagtcactaaagagataaatgtttcttatatacatttgtatatttttatggtgttatttattccatggcttagcttccttcaaatcaaaatttggacacacactattaagagaagccattaaaattttactaaaattgtgcatgtaaattaattgtcagcattccatgtctcaagattttcttaatttagttcgctgtttaaattaattcatgtcctgtaaagttctgaccttgataacaaagctataaatatttaagtttgctaatatgcgtaagtattatcggtaagttacaagatggaagaagaataacagtagggcacagtcattctgtgaatccttttacttatcaaaatttggtagctattctaaggcttttgcagaaaaataagtgttcaatgtttgtagttcttcaaaagcatgttgcagtagccagccatactatgtgtattcccagtatcatgtacgcactaaaaaaaatgtgtgcttgctgctgctgtgagtgaaccattgcttaagataaaaaacttaactagatctgtaaatgtacagaatagcatcagatgtttctgagagattagaaaatgttttgaatttataaaattaatgtttttctttgtaacatttatatatattttttaacattttaagtttaacagattgtattcctttcaagtttctatacttgcttaagcaatcttgatttgagtaagggtcttgatttgtgctattatgttctgttagttttggcatgaatatactaaagcttttttttttttttctagcatgtgttttctcctcttgggttctctttgtatttactacttttctctttttcttgtgttttttttttcctgtttttgttttgtttggtgttttgttcctgtcttcattgtttcaggtatttctttacccctctggattccccacgggctggatcgagatggtccagttatgcccagctccttcctcctcctcctcctcctctggtagagcactcttgcgatgctgacactgccaacctccagtatcctcaccctcgcagacgatatctctctcggcctcttaatcccttacctgagaatgaagggatttaaaacactgatttaacattgaaaggccttattcaagtgcttgtaaatgctttcatttctggctgctttttgtttttcattttctttcagaagatttttctaacttagggtctgtcttgcatgtattacaaccagaatacagtgtttggaacctaaatctgtttgtgcgtctgcatcaaaggaacatttgcttcactgggtgataacctttgatgaaatgagatatgtccaagtaacgttaactgtgaagttacacacagtagctgacttcaaagtgcctgttctgtaaattttattttaaactgttaccatagtcttaagttgtttatgctttatcagactggctaatgtgaaagcataatattatgaagtttattctgccttatacacaggaatgatttagtttacatactagtcagttacaacattagcctgtaaaatgaaatccattttttaaggtctcataaggcagaataaacttcataatattatgctttcacattagccagtctga

SEQ ID NO: 315465 - DNA, 1395 bp, Homo sapiens
tggaagacacatagtggatctgtatggcgtgtgacatgggcccatcctgaatttgggcaggttttggcttcctgttcttttgaccgaacagctgctgtatgggaagaaatagtaggagaatcaaatgataaactgcgaggacagagccactgggttaaaaggacaactctggtggatagcagaacatctgttactgatgtgaagtttgctcccaagcacatgggtcttatgttagcaacctgttccgcagatggtatagtaagaatctatgaggcaccagatgttatgaatctcagccagtggtctttgcagcatgagatctcatgtaagctaagctgtagttgtatttcttggaacccttcaagctctcgtgctcattcccccatgatcgccgtaggaagtgatgacagtagccccaacgcaatggccaaggttcagatttttgaatataatgaaaacaccaggaaatatgcaaaagctgaaactcttatgacagtcactgatcctgttcatgatattgcattcgctccaaatttgggaagatctttccatattctagcaatagcgaccaaagatgtgagaatttttacattaaagcctgtgaggaaagaactgacttcctctggtgggccaacaaagtttgaaatccatatagtggctcagttcgataatcataattctcaggtctggcgagtgagttggaatataacaggaacggtgctagcatcttcaggagatgatgggtgtgtaagattgtggaaagctaattatatggacaattggaagtgtactggtattttgaaaggtaatgggagcccagtcaatgggagttctcagcagggaacctcaaatccttccctaggttcaactattccaagtcttcagaattcattaaatggatcttctgctggcagaaagcacagctgagtacaagctaactggagtaactttgctgttttgctgcttgttgcatgcacacaggaatggaaagcgagctccttttccccttccccagcgccgtttgacctctcccaagatacaccagcagcctgcttactactaaacgcaatccaaaaggcctttaaaaatacagtgtatattttttgtactagtcagtttattgacactatttgaaacttttgaaatataaacggagaggctttctgttgagacattgtcaccaaaacaattttttgaaatgttcctgaaactaatttgggtttaaagattaaaagggttgttaccattcttatctgagtagttgggaggaggggaataccactttagttcatttggaaaatatagacatatttcttttgctttcttaaaacagcttaaaatgatgaacttttataattttaatttgaagattgaataaatattttttataaagat

SEQ ID NO: 315466 - DNA, 491 bp, Homo sapiens
caaaacaatttcaggttaccgtggaagataccagattataaagattatttcatgaaacaaataatattagagttgattttttaaagtctggtttttggtcactgcctgtactgcatattttcttttgtaaatagcttctattttttgatctgtattcttattgtgccaataaccatctgtgttagatctgtgatgcattttcccttttccatttgtattatgtcctttaacagaaagcacagctgagtacaagctaactggagtaactttgctgttttgctgcttgttgcatgcacacaggaatggaaagcgagctccttttccccttccccagcgccgtttgacctctcccaagatacaccagcagcctgcttactactaaacgcaatccaaaaggcctttaaaaatacagtgtatattttttgtactagtcagtttattgacactatttgaaacttttgaaatataaacggagaggctttctgttgaga

SEQ ID NO: 315467 - DNA, 3336 bp, Homo sapiens
tggaagacacatagtggatctgtatggcgtgtgacatgggcccatcctgaatttgggcaggttttggcttcctgttcttttgaccgaacagctgctgtatgggaagaaatagtaggagaatcaaatgataaactgcgaggacagagccactgggttaaaaggacaactctggtggatagcagaacatctgttactgatgtgaagtttgctcccaagcacatgggtcttatgttagcaacctgttccgcagatggtatagtaagaatctatgaggcaccagatgttatgaatctcagccagtggtctttgcagcatgagatctcatgtaagctaagctgtagttgtatttcttggaacccttcaagctctcgtgctcattcccccatgatcgccgtaggaagtgatgacagtagccccaacgcaatggccaaggttcagatttttgaatataatgaaaacaccaggaaatatgcaaaagctgaaactcttatgacagtcactgatcctgttcatgatattgcattcgctccaaatttgggaagatctttccatattctagcaatagcgaccaaagatgtgagaatttttacattaaagcctgtgaggaaagaactgacttcctctggtgggccaacaaagtttgaaatccatatagtggctcagttcgataatcataattctcaggtctggcgagtgagttggaatataacaggaacggtgctagcatcttcaggagatgatgggtgtgtaagattgtggaaagctaattatatggacaattggaagtgtactggtattttgaaaggtaatgggagcccagtcaatgggagttctcagcagggaacctcaaatccttccctaggttcaactattccaagtcttcagaattcattaaatggatcttctgctggcagaaagcacagctgagtacaagctaactggagtaactttgctgttttgctgcttgttgcatgcacacaggaatggaaagcgagctccttttccccttccccagcgccgtttgacctctcccaagatacaccagcagcctgcttactactaaacgcaatccaaaaggcctttaaaaatacagtgtatattttttgtactagtcagtttattgacactatttgaaacttttgaaatataaacggagaggctttctgttgagacattgtcaccaaaacaattttttgaaatgttcctgaaactaatttgggtttaaagattaaaagggttgttaccattcttatctgagtagttgggaggaggggaataccactttagttcatttggaaaatatagacatatttcttttgctttcttaaaacagcttaaaatgatgaacttttataattttaatttgaagattgaataaatattttttataaagattgttttgagtgctgatttgtttactttttgtagatttgctttatccatgatattcagtacaactctgtcatttctttgtaatatttaaaaaatattagtaaaggagtgaattaataaagtagtaatagtaaaatgaaaggaacttgactgtacagtttgtagccaggttaagcatttggtattgtttcatttacaatttgggactaagatggaaacactttttttataagtttttaattcatagtcactaaagagataaatgtttcttatatacatttgtatatttttatggtgttatttattccatggcttagcttccttcaaatcaaaatttggacacacactattaagagaagccattaaaattttactaaaattgtgcatgtaaattaattgtcagcattccatgtctcaagattttcttaatttagttcgctgtttaaattaattcatgtcctgtaaagttctgaccttgataacaaagctataaatatttaagtttgctaatatgcgtaagtattatcggtaagttacaagatggaagaagaataacagtagggcacagtcattctgtgaatccttttacttatcaaaatttggtagctattctaaggcttttgcagaaaaataagtgttcaatgtttgtagttcttcaaaagcatgttgcagtagccagccatactatgtgtattcccagtatcatgtacgcactaaaaaaaatgtgtgcttgctgctgctgtgagtgaaccattgcttaagataaaaaacttaactagatctgtaaatgtacagaatagcatcagatgtttctgagagattagaaaatgttttgaatttataaaattaatgtttttctttgtaacatttatatatattttttaacattttaagtttaacagattgtattcctttcaagtttctatacttgcttaagcaatcttgatttgagtaagggtcttgatttgtgctattatgttctgttagttttggcatgaatatactaaagcttttttttttttttctagcatgtgttttctcctcttgggttctctttgtatttactacttttctctttttcttgtgttttttttttcctgtttttgttttgtttggtgttttgttcctgtcttcattgtttcaggtatttctttacccctctggattccccacgggctggatcgagatggtccagttatgcccagctccttcctcctcctcctcctcctctggtagagcactcttgcgatgctgacactgccaacctccagtatcctcaccctcgcagacgatatctctctcggcctcttaatcccttacctgagaatgaagggatttaaaacactgatttaacattgaaaggccttattcaagtgcttgtaaatgctttcatttctggctgctttttgtttttcattttctttcagaagatttttctaacttagggtctgtcttgcatgtattacaaccagaatacagtgtttggaacctaaatctgtttgtgcgtctgcatcaaaggaacatttgcttcactgggtgataacctttgatgaaatgagatatgtccaagtaacgttaactgtgaagttacacacagtagctgacttcaaagtgcctgttctgtaaattttattttaaactgttaccatagtcttaagttgtttatgctttatcagactggctaatgtgaaagcataatattatgaagtttattctgccttatgagaccttaaaaaatggatttcattttacaggctaatgttgtaactgactagtatgtaaaataaatcattcctgtgtataaagcagcaaaacctaatgtggactttttggtcttttttttttttttttttttttaaaggaaattgcctttcactacttggaattactgtttaaagcttttgtaattattatccaagtaggttatgtaataaaatatattta

SEQ ID NO: 315468 - DNA, 3202 bp, Homo sapiens
tggaagacacatagtggatctgtatggcgtgtgacatgggcccatcctgaatttgggcaggttttggcttcctgttcttttgaccgaacagctgctgtatgggaagaaatagtaggagaatcaaatgataaactgcgaggacagagccactgggttaaaaggacaactctggtggatagcagaacatctgttactgatgtgaagtttgctcccaagcacatgggtcttatgttagcaacctgttccgcagatggtatagtaagaatctatgaggcaccagatgttatgaatctcagccagtggtctttgcagcatgagatctcatgtaagctaagctgtagttgtatttcttggaacccttcaagctctcgtgctcattcccccatgatcgccgtaggaagtgatgacagtagccccaacgcaatggccaaggttcagatttttgaatataatgaaaacaccaggaaatatgcaaaagctgaaactcttatgacagtcactgatcctgttcatgatattgcattcgctccaaatttgggaagatctttccatattctagcaatagcgaccaaagatgtgagaatttttacattaaagcctgtgaggaaagaactgacttcctctggtgggccaacaaagtttgaaatccatatagtggctcagttcgataatcataattctcaggtctggcgagtgagttggaatataacaggaacggtgctagcatcttcaggagatgatgggtgtgtaagattgtggaaagctaattatatggacaattggaagtgtactggtattttgaaaggtaatgggagcccagtcaatgggagttctcagcagggaacctcaaatccttccctaggttcaactattccaagtcttcagaattcattaaatggatcttctgctggcagaaagcacagctgagtacaagctaactggagtaactttgctgttttgctgcttgttgcatgcacacaggaatggaaagcgagctccttttccccttccccagcgccgtttgacctctcccaagatacaccagcagcctgcttactactaaacgcaatccaaaaggcctttaaaaatacagtgtatattttttgtactagtcagtttattgacactatttgaaacttttgaaatataaacggagaggctttctgttgagacattgtcaccaaaacaattttttgaaatgttcctgaaactaatttgggtttaaagattaaaagggttgttaccattcttatctgagtagttgggaggaggggaataccactttagttcatttggaaaatatagacatatttcttttgctttcttaaaacagcttaaaatgatgaacttttataattttaatttgaagattgaataaatattttttataaagattgttttgagtgctgatttgtttactttttgtagatttgctttatccatgatattcagtacaactctgtcatttctttgtaatatttaaaaaatattagtaaaggagtgaattaataaagtagtaatagtaaaatgaaaggaacttgactgtacagtttgtagccaggttaagcatttggtattgtttcatttacaatttgggactaagatggaaacactttttttataagtttttaattcatagtcactaaagagataaatgtttcttatatacatttgtatatttttatggtgttatttattccatggcttagcttccttcaaatcaaaatttggacacacactattaagagaagccattaaaattttactaaaattgtgcatgtaaattaattgtcagcattccatgtctcaagattttcttaatttagttcgctgtttaaattaattcatgtcctgtaaagttctgaccttgataacaaagctataaatatttaagtttgctaatatgcgtaagtattatcggtaagttacaagatggaagaagaataacagtagggcacagtcattctgtgaatccttttacttatcaaaatttggtagctattctaaggcttttgcagaaaaataagtgttcaatgtttgtagttcttcaaaagcatgttgcagtagccagccatactatgtgtattcccagtatcatgtacgcactaaaaaaaatgtgtgcttgctgctgctgtgagtgaaccattgcttaagataaaaaacttaactagatctgtaaatgtacagaatagcatcagatgtttctgagagattagaaaatgttttgaatttataaaattaatgtttttctttgtaacatttatatatattttttaacattttaagtttaacagattgtattcctttcaagtttctatacttgcttaagcaatcttgatttgagtaagggtcttgatttgtgctattatgttctgttagttttggcatgaatatactaaagcttttttttttttttctagcatgtgttttctcctcttgggttctctttgtatttactacttttctctttttcttgtgttttttttttcctgtttttgttttgtttggtgttttgttcctgtcttcattgtttcaggtatttctttacccctctggattccccacgggctggatcgagatggtccagttatgcccagctccttcctcctcctcctcctcctctggtagagcactcttgcgatgctgacactgccaacctccagtatcctcaccctcgcagacgatatctctctcggcctcttaatcccttacctgagaatgaagggatttaaaacactgatttaacattgaaaggccttattcaagtgcttgtaaatgctttcatttctggctgctttttgtttttcattttctttcagaagatttttctaacttagggtctgtcttgcatgtattacaaccagaatacagtgtttggaacctaaatctgtttgtgcgtctgcatcaaaggaacatttgcttcactgggtgataacctttgatgaaatgagatatgtccaagtaacgttaactgtgaagttacacacagtagctgacttcaaagtgcctgttctgtaaattttattttaaactgttaccatagtcttaagttgtttatgctttatcagactggctaatgtgaaagcataatattatgaagtttattctgccttatgagaccttaaaaaatggatttcattttacaggctaatgttgtaactgactagtatgtaaaataaatcattcctgtgtataaagcagc

SEQ ID NO: 315469 - DNA, 3282 bp, Homo sapiens
tggaagacacatagtggatctgtatggcgtgtgacatgggcccatcctgaatttgggcaggttttggcttcctgttcttttgaccgaacagctgctgtatgggaagaaatagtaggagaatcaaatgataaactgcgaggacagagccactgggttaaaaggacaactctggtggatagcagaacatctgttactgatgtgaagtttgctcccaagcacatgggtcttatgttagcaacctgttccgcagatggtatagtaagaatctatgaggcaccagatgttatgaatctcagccagtggtctttgcagcatgagatctcatgtaagctaagctgtagttgtatttcttggaacccttcaagctctcgtgctcattcccccatgatcgccgtaggaagtgatgacagtagccccaacgcaatggccaaggttcagatttttgaatataatgaaaacaccaggaaatatgcaaaagctgaaactcttatgacagtcactgatcctgttcatgatattgcattcgctccaaatttgggaagatctttccatattctagcaatagcgaccaaagatgtgagaatttttacattaaagcctgtgaggaaagaactgacttcctctggtgggccaacaaagtttgaaatccatatagtggctcagttcgataatcataattctcaggtctggcgagtgagttggaatataacaggaacggtgctagcatcttcaggagatgatgggtgtgtaagattgtggaaagctaattatatggacaattggaagtgtactggtattttgaaaggtaatgggagcccagtcaatgggagttctcagcagggaacctcaaatccttccctaggttcaactattccaagtcttcagaattcattaaatggatcttctgctggcagaaagcacagctgagtacaagctaactggagtaactttgctgttttgctgcttgttgcatgcacacaggaatggaaagcgagctccttttccccttccccagcgccgtttgacctctcccaagatacaccagcagcctgcttactactaaacgcaatccaaaaggcctttaaaaatacagtgtatattttttgtactagtcagtttattgacactatttgaaacttttgaaatataaacggagaggctttctgttgagacattgtcaccaaaacaattttttgaaatgttcctgaaactaatttgggtttaaagattaaaagggttgttaccattcttatctgagtagttgggaggaggggaataccactttagttcatttggaaaatatagacatatttcttttgctttcttaaaacagcttaaaatgatgaacttttataattttaatttgaagattgaataaatattttttataaagattgttttgagtgctgatttgtttactttttgtagatttgctttatccatgatattcagtacaactctgtcatttctttgtaatatttaaaaaatattagtaaaggagtgaattaataaagtagtaatagtaaaatgaaaggaacttgactgtacagtttgtagccaggttaagcatttggtattgtttcatttacaatttgggactaagatggaaacactttttttataagtttttaattcatagtcactaaagagataaatgtttcttatatacatttgtatatttttatggtgttatttattccatggcttagcttccttcaaatcaaaatttggacacacactattaagagaagccattaaaattttactaaaattgtgcatgtaaattaattgtcagcattccatgtctcaagattttcttaatttagttcgctgtttaaattaattcatgtcctgtaaagttctgaccttgataacaaagctataaatatttaagtttgctaatatgcgtaagtattatcggtaagttacaagatggaagaagaataacagtagggcacagtcattctgtgaatccttttacttatcaaaatttggtagctattctaaggcttttgcagaaaaataagtgttcaatgtttgtagttcttcaaaagcatgttgcagtagccagccatactatgtgtattcccagtatcatgtacgcactaaaaaaaatgtgtgcttgctgctgctgtgagtgaaccattgcttaagataaaaaacttaactagatctgtaaatgtacagaatagcatcagatgtttctgagagattagaaaatgttttgaatttataaaattaatgtttttctttgtaacatttatatatattttttaacattttaagtttaacagattgtattcctttcaagtttctatacttgcttaagcaatcttgatttgagtaagggtcttgatttgtgctattatgttctgttagttttggcatgaatatactaaagcttttttttttttttctagcatgtgttttctcctcttgggttctctttgtatttactacttttctctttttcttgtgttttttttttcctgtttttgttttgtttggtgttttgttcctgtcttcattgtttcaggtatttctttacccctctggattccccacgggctggatcgagatggtccagttatgcccagctccttcctcctcctcctcctcctctggtagagcactcttgcgatgctgacactgccaacctccagtatcctcaccctcgcagacgatatctctctcggcctcttaatcccttacctgagaatgaagggattttttctggctgctttttgtttttcattttctttcagaagatttttctaacttagggtctgtcttgcatgtattacaaccagaatacagtgtttggaacctaaatctgtttgtgcgtctgcatcaaaggaacatttgcttcactgggtgataacctttgatgaaatgagatatgtccaagtaacgttaactgtgaagttacacacagtagctgacttcaaagtgcctgttctgtaaattttattttaaactgttaccatagtcttaagttgtttatgctttatcagactggctaatgtgaaagcataatattatgaagtttattctgccttatgagaccttaaaaaatggatttcattttacaggctaatgttgtaactgactagtatgtaaaataaatcattcctgtgtataaagcagcaaaacctaatgtggactttttggtcttttttttttttttttttttttaaaggaaattgcctttcactacttggaattactgtttaaagcttttgtaattattatccaagtaggttatgtaataaaatatattta

SEQ ID NO: 315470 - DNA, 1714 bp, Homo sapiens
tggaagacacatagtggatctgtatggcgtgtgacatgggcccatcctgaatttgggcaggttttggcttcctgttcttttgaccgaacagctgctgtatgggaagaaatagtaggagaatcaaatgataaactgcgaggacagagccactgggttaaaaggacaactctggtggatagcagaacatctgttactgatgtgaagtttgctcccaagcacatgggtcttatgttagcaacctgttccgcagatggtatagtaagaatctatgaggcaccagatgttatgaatctcagccagtggtctttgcagcatgagatctcatgtaagctaagctgtagttgtatttcttggaacccttcaagctctcgtgctcattcccccatgatcgccgtaggaagtgatgacagtagccccaacgcaatggccaaggttcagatttttgaatataatgaaaacaccaggaaatatgcaaaagctgaaactcttatgacagtcactgatcctgttcatgatattgcattcgctccaaatttgggaagatctttccatattctagcaatagcgaccaaagatgtgagaatttttacattaaagcctgtgaggaaagaactgacttcctctggtgggccaacaaagtttgaaatccatatagtggctcagttcgataatcataattctcaggtctggcgagtgagttggaatataacaggaacggtgctagcatcttcaggagatgatgggtgtgtaagattgtggaaagctaattatatggacaattggaagtgtactggtattttgaaaggtaatgggagcccagtcaatgggagttctcagcagggaacctcaaatccttccctaggttcaactattccaagtcttcagaattcattaaatggatcttctgctggcaggtatttctttacccctctggattccccacgggctggatcgagatggtccagttatgcccagctccttcctcctcctcctcctcctctggtagagcactcttgcgatgctgacactgccaacctccagtatcctcaccctcgcagacgatatctctctcggcctcttaatcccttacctgagaatgaagggatttaaaacactgatttaacattgaaaggccttattcaagtgcttgtaaatgctttcatttctggctgctttttgtttttcattttctttcagaagatttttctaacttagggtctgtcttgcatgtattacaaccagaatacagtgtttggaacctaaatctgtttgtgcgtctgcatcaaaggaacatttgcttcactgggtgataacctttgatgaaatgagatatgtccaagtaacgttaactgtgaagttacacacagtagctgacttcaaagtgcctgttctgtaaattttattttaaactgttaccatagtcttaagttgtttatgctttatcagactggctaatgtgaaagcataatattatgaagtttattctgccttatgagaccttaaaaaatggatttcattttacaggctaatgttgtaactgactagtatgtaaaataaatcattcctgtgtataaagcagcaaaacctaatgtggactttttggtcttttttttttttttttttttttaaaggaaattgcctttcactacttggaattactgtttaaagcttttgtaattattatccaagtaggttatgtaataaaatatattta

SEQ ID NO: 315471 - DNA, 1274 bp, Homo sapiens
ggaaagggtccagtggctgcttttatcgaccaatcaaatattttcctgacagatcccaaaatattcctgggccaacggagggaggagcccaagatgcctctgctgctccttggagagacagagcctcttaagttggagcgggactgccggagcccagtggacccctgggctgctgccagccccgacctggcacttgcttgcctgtgtcactgtcaggatttgtctagcggcgcattccctaacaggggtgtgttggggggagtcctctttccaactgtcgaaatggttatcaaagtgtttgttgctacatcttctgggtccatagcgattaggaagaaacagcaagaagtagtgggttttttggaagcgaataaaatcgactttaaggaattagatattgctggagatgaagacaacaggaggtggatgagagagaatgttcctggagagaaaaaacctcaaaatgggattcctttgcctccccagatcttcaatgaggagcagtactgtggggattttgactctttcttctctgcaaaagaagagaatattatttattccttccttggtttggctcctcctccagactcaaagggatcagagaaggctgaagaaggtggagaaactgaggcacaaaaagagggcagtgaagatgtgggcaacctccctgaagcccaggagaagaatgaagaagaaggagagacagccacagaagagacggaagaaatagccatggagggtgcggaaggggaagccgaggaggaggaagaaactgcagaaggagaagaagagcctggagaagacgaagattcctaggccttttcatgcttcatttcttccacttctccagaaaatggaagctatgaagcaacatttcaaatgtctctccacaaaccaaactcaacagaatactttggcttgaagccggcacacccagggttactgaggacttatgctgcctgacctggttagatgtacatggaggtatctcccgaatcatacaaaattaaatgtgaagaccgtttatgcataccttcatgtgcctgacagtcttggcttttgaagatttttttttcttttttgctctgcatagctagaccatcttattaataatactctgaaaaaaatgatttcaaggcatggaagttctctgtgatacaacaatagtatttcttcaaatgcgccttatgctacttatctcagaaacaggttttaaaatgaagtgctttccagagaaccatcatataaataaagattaatagaaaaataaaaaa

SEQ ID NO: 315472 - DNA, 988 bp, Homo sapiens
cagcaggagccgcggcggggaggggcgtcttgggcctggagattaggaagaaacagcaagaagtagtgggttttttggaagcgaataaaatcgactttaaggaattagatattgctggagatgaagacaacaggaggtggatgagagagaatgttcctggagagaaaaaacctcaaaatgggattcctttgcctccccagatcttcaatgaggagcagtactgtggggattttgactctttcttctctgcaaaagaagagaatattatttattccttccttggtttggctcctcctccagactcaaagggatcagagaaggctgaagaaggtggagaaactgaggcacaaaaagagggcagtgaagatgtgggcaacctccctgaagcccaggagaagaatgaagaagaaggagagacagccacagaagagacggaagaaatagccatggagggtgcggaaggggaagccgaggaggaggaagaaactgcagaaggagaagaagagcctggagaagacgaagattcctaggccttttcatgcttcatttcttccacttctccagaaaatggaagctatgaagcaacatttcaaatgtctctccacaaaccaaactcaacagaatactttggcttgaagccggcacacccagggttactgaggacttatgctgcctgacctggttagatgtacatggaggtatctcccgaatcatacaaaattaaatgtgaagaccgtttatgcataccttcatgtgcctgacagtcttggcttttgaagatttttttttcttttttgctctgcatagctagaccatcttattaataatactctgaaaaaaatgatttcaaggcatggaagttctctgtgatacaacaatagtatttcttcaaatgcgccttatgctacttatctcagaaacaggttttaaaatgaagtgctttccagagaaccatcatataaataaagattaatagaaaaataaaaaa

SEQ ID NO: 315473 - DNA, 1181 bp, Homo sapiens
ggaaagggtccagtggctgcttttatcgaccaatcaaatattttcctgacagatcccaaaatattcctgggccaacggagggaggagcccaagatgcctctgctgctccttggagagacagagcctcttaagttggagcgggactgccggagcccagtggacccctgggctgctgccagccccgacctggcacttgcttgcctgtgtcactgtcaggatttgtctagcggcgcattccctaacaggggtgtgttggggggagtcctctttccaactgtcgaaatggttatcaaagtgtttgttgctacatcttctgggtccatagcgattaggaagaaacagcaagaagtagtgggttttttggaagcgaataaaatcgactttaaggaattagatattgctggagatgaagacaacaggaggtggatgagagagaatgttcctggagagaaaaaacctcaaaatgggattcctttgcctccccagatcttcaatgaggagcagtactgtggggattttgactctttcttctctgcaaaagaagagaatattatttattccttccttggtttggctcctcctccagactcaaaggaagaagaaggagagacagccacagaagagacggaagaaatagccatggagggtgcggaaggggaagccgaggaggaggaagaaactgcagaaggagaagaagagcctggagaagacgaagattcctaggccttttcatgcttcatttcttccacttctccagaaaatggaagctatgaagcaacatttcaaatgtctctccacaaaccaaactcaacagaatactttggcttgaagccggcacacccagggttactgaggacttatgctgcctgacctggttagatgtacatggaggtatctcccgaatcatacaaaattaaatgtgaagaccgtttatgcataccttcatgtgcctgacagtcttggcttttgaagatttttttttcttttttgctctgcatagctagaccatcttattaataatactctgaaaaaaatgatttcaaggcatggaagttctctgtgatacaacaatagtatttcttcaaatgcgccttatgctacttatctcagaaacaggttttaaaatgaagtgctttccagagaaccatcatataaataaagattaatagaaaaataaaaaa

SEQ ID NO: 315474 - DNA, 1084 bp, Homo sapiens
cagcaggagccgcggcggggaggggcgtcttgggcctggaggtcagtgtggcctcgcgtttgtcttcggtgacgggaagtgagtttcttgtgtagacgtctgtaaacgatcctcctgccgtccctgttcggcgcccgggaccctgccttcccgcgtggccgcaccgagacgagggagcctgtcacgcgctctggcgctctcctgacctcttaaggctctgtcagtcttagattaggaagaaacagcaagaagtagtgggttttttggaagcgaataaaatcgactttaaggaattagatattgctggagatgaagacaacaggaggtggatgagagagaatgttcctggagagaaaaaacctcaaaatgggattcctttgcctccccagatcttcaatgaggagcagtactgtggggattttgactctttcttctctgcaaaagaagagaatattatttattccttccttggtttggctcctcctccagactcaaaggaagaagaaggagagacagccacagaagagacggaagaaatagccatggagggtgcggaaggggaagccgaggaggaggaagaaactgcagaaggagaagaagagcctggagaagacgaagattcctaggccttttcatgcttcatttcttccacttctccagaaaatggaagctatgaagcaacatttcaaatgtctctccacaaaccaaactcaacagaatactttggcttgaagccggcacacccagggttactgaggacttatgctgcctgacctggttagatgtacatggaggtatctcccgaatcatacaaaattaaatgtgaagaccgtttatgcataccttcatgtgcctgacagtcttggcttttgaagatttttttttcttttttgctctgcatagctagaccatcttattaataatactctgaaaaaaatgatttcaaggcatggaagttctctgtgatacaacaatagtatttcttcaaatgcgccttatgctacttatctcagaaacaggttttaaaatgaagtgctttccagagaaccatcatataaataaagattaatagaaaaataaaaaa

SEQ ID NO: 315475 - DNA, 930 bp, Homo sapiens
cacttcatgtctattttcttctagcaattgaatctttccagcatcaagattttttatttactgttgaaacgtgcatcaaacactactggcaatagtataaagccctttttaaaaaaagtttttatagcatctaggatctgtgcagtatcttaaattgtgtaattatttttgtagtatgcacagaatagtattgtctctacattcagtttgtggattgtgattgtcctctttgtggaaattcaaacagaaaagcaatgatcaaagaaacaaagagcttaattggctttccatgtgtggtaatttgtatgtctttatgcagtttgtgagttccaaatcttttcagattgaagaaggagagacagccacagaagagacggaagaaatagccatggagggtgcggaaggggaagccgaggaggaggaagaaactgcagaaggagaagaagagcctggagaagacgaagattcctaggccttttcatgcttcatttcttccacttctccagaaaatggaagctatgaagcaacatttcaaatgtctctccacaaaccaaactcaacagaatactttggcttgaagccggcacacccagggttactgaggacttatgctgcctgacctggttagatgtacatggaggtatctcccgaatcatacaaaattaaatgtgaagaccgtttatgcataccttcatgtgcctgacagtcttggcttttgaagatttttttttcttttttgctctgcatagctagaccatcttattaataatactctgaaaaaaatgatttcaaggcatggaagttctctgtgatacaacaatagtatttcttcaaatgcgccttatgctacttatctcagaaacaggttttaaaatgaagtgctttccagagaaccatcatataaataaagattaatagaaaaataaaaaa

SEQ ID NO: 315476 - DNA, 962 bp, Homo sapiens
cagcaggagccgcggcggggaggggcgtcttgggcctggaggtcagtgtggcctcgcgtttgtcttcggtgacgggaaattaggaagaaacagcaagaagtagtgggttttttggaagcgaataaaatcgactttaaggaattagatattgctggagatgaagacaacaggaggtggatgagagagaatgttcctggagagaaaaaacctcaaaatgggattcctttgcctccccagatcttcaatgaggagcagtactgtggggattttgactctttcttctctgcaaaagaagagaatattatttattccttccttggtttggctcctcctccagactcaaagggatcagagaaggctgaagaaggtggagaaactgaggcacaaaaagagggcagtgaagatacggaagaaatagccatggagggtgcggaaggggaagccgaggaggaggaagaaactgcagaaggagaagaagagcctggagaagacgaagattcctaggccttttcatgcttcatttcttccacttctccagaaaatggaagctatgaagcaacatttcaaatgtctctccacaaaccaaactcaacagaatactttggcttgaagccggcacacccagggttactgaggacttatgctgcctgacctggttagatgtacatggaggtatctcccgaatcatacaaaattaaatgtgaagaccgtttatgcataccttcatgtgcctgacagtcttggcttttgaagatttttttttcttttttgctctgcatagctagaccatcttattaataatactctgaaaaaaatgatttcaaggcatggaagttctctgtgatacaacaatagtatttcttcaaatgcgccttatgctacttatctcagaaacaggttttaaaatgaagtgctttccagagaaccatcatataaataaagattaatagaaaaataaaaaa

SEQ ID NO: 315477 - DNA, 1224 bp, Homo sapiens
ggaaagggtccagtggctgcttttatcgaccaatcaaatattttcctgacagatcccaaaatattcctgggccaacggagggaggagcccaagatgcctctgctgctccttggagagacagagcctcttaagttggagcgggactgccggagcccagtggacccctgggctgctgccagccccgacctggcacttgcttgcctgtgtcactgtcaggatttgtctagcggcgcattccctaacaggggtgtgttggggggagtcctctttccaactgtcgaaatggttatcaaagtgtttgttgctacatcttctgggtccatagcgattaggaagaaacagcaagaagtagtgggttttttggaagcgaataaaatcgactttaaggaattagatattgctggagatgaagacaacaggaggtggatgagagagaatgttcctggagagaaaaaacctcaaaatgggattcctttgcctccccagatcttcaatgaggagcagtactgtggggattttgactctttcttctctgcaaaagaagagaatattatttattccttccttggtttggctcctcctccagactcaaagggatcagagaaggctgaagaaggtggagaaactgaggcacaaaaagagggcagtgaagatgtgggcaacctccctgaagcccaggagaagaatgaagaagaaggagagacagccacagaagagacggaagaaatagccatggagggtgcggaaggggaagccgaggaggaggaagaaactgcagaaggagaagaagagcctggagaagacgaagattcctaggccttttcatgcttcatttcttccacttctccagtcaacagaatactttggcttgaagccggcacacccagggttactgaggacttatgctgcctgacctggttagatgtacatggaggtatctcccgaatcatacaaaattaaatgtgaagaccgtttatgcataccttcatgtgcctgacagtcttggcttttgaagatttttttttcttttttgctctgcatagctagaccatcttattaataatactctgaaaaaaatgatttcaaggcatggaagttctctgtgatacaacaatagtatttcttcaaatgcgccttatgctacttatctcagaaacaggttttaaaatgaagtgctttccagagaaccatcatataaataaagattaatagaaaaataaaaaa

SEQ ID NO: 315478 - DNA, 382 bp, Homo sapiens
ggaaagggtccagtggctgcttttatcgaccaatcaaatattttcctgacagatcccaaaatattcctgggccaacggagggaggagcccaagatgcctctgctgctccttggagagacagagcctcttaagttggagcgggactgccggagcccagtggacccctgggctgctgccagccccgacctggcacttgcttgcctgtgtcactgtcaggatttgtctagcggcgcattccctaacaggggtgtgttggggggagtcctctttccaactgtcgaaatggttatcaagggcatcagagaggctgagaaggtgagaacttaggcacaaaagaggcagttagatcggcacccccttagccagagagattagagaggga

SEQ ID NO: 315479 - DNA, 1321 bp, Homo sapiens
  misc_feature (1282)..(1282): n is a, c, g, or t
  misc_feature (1293)..(1293): n is a, c, g, or t
ggaaagggtccagtggctgcttttatcgaccaatcaaatattttcctgacagatcccaaaatattcctgggccaacggagggaggagcccaagatgcctctgctgctccttggagagacagagcctcttaagttggagcgggactgccggagcccagtggacccctgggctgctgccagccccgacctggcacttgcttgcctgtgtcactgtcaggatttgtctagcggcgcattccctaacaggggtgtgttggggggagtcctctttccaactgtcgaaatggttatcaaagtgtttgttgctacatcttctgggtccatagcgattaggaagaaacagcaagaagtagtgggttttttggaagcgaataaaatcgactttaaggaattagatattgctggagatgaagacaacaggaggtggatgagagagaatgttcctggagagaaaaaacctcaaaatgggattcctttgcctccccagatcttcaatgaggagcagtactgtggggattttgactctttcttctctgcaaaagaagagaatattatttattccttccttggtttggctcctcctccagactcaaagggatcagagaaggctgaagaaggtggagaaactgaggcacaaaaagagggcagtgaagatgtgggcaacctccctgaagcccaggagaagaatgaagaagaaggagagacagccacagaagagacggaagaaatagccatggagggtgcggaaggggaagccgaggaggaggaagaaactgcagaaggagaagaagagcctggagaagacgaagattcctaggccttttcatgcttcatttcttccacttctccagaaaatggaagctatgaagcaacatttcaaatgtctctccacaaaccaaactcaacagaatactttggcttgaagccggcacacccagggttactgaggacttatgctgcctgacctggttagatgtacatggaggtatctcccgaatcatacaaaattaaatgtgaagaccgtttatgcataccttcatgtgcctgacagtcttggcttttgaagatttttttttcttttttgctctgcatagctagaccatcttattaataatactctgaaaaaaatgatttcaaggcatggaagttctctgtgatacaacaatagtatttcttcaaatgcgccttatgctacttatctcagaaacaggttttaaaatgaagtgctttccagagaaccatcatataaataaagcacggcaggcgtgcccggcccatccctncccctctccanacacctcccctctccaccgcctctcaca

SEQ ID NO: 315480 - DNA, 1177 bp, Homo sapiens
cagcaggagccgcggcggggaggggcgtcttgggcctggaggtcagtgtggcctcgcgtttgtcttcggtgacgggaagtgagtttcttgtgtagacgtctgtaaacgatcctcctgccgtccctgttcggcgcccgggaccctgccttcccgcgtggccgcaccgagacgagggagcctgtcacgcgctctggcgctctcctgacctcttaaggctctgtcagtcttagattaggaagaaacagcaagaagtagtgggttttttggaagcgaataaaatcgactttaaggaattagatattgctggagatgaagacaacaggaggtggatgagagagaatgttcctggagagaaaaaacctcaaaatgggattcctttgcctccccagatcttcaatgaggagcagtactgtggggattttgactctttcttctctgcaaaagaagagaatattatttattccttccttggtttggctcctcctccagactcaaagggatcagagaaggctgaagaaggtggagaaactgaggcacaaaaagagggcagtgaagatgtgggcaacctccctgaagcccaggagaagaatgaagaagaaggagagacagccacagaagagacggaagaaatagccatggagggtgcggaaggggaagccgaggaggaggaagaaactgcagaaggagaagaagagcctggagaagacgaagattcctaggccttttcatgcttcatttcttccacttctccagaaaatggaagctatgaagcaacatttcaaatgtctctccacaaaccaaactcaacagaatactttggcttgaagccggcacacccagggttactgaggacttatgctgcctgacctggttagatgtacatggaggtatctcccgaatcatacaaaattaaatgtgaagaccgtttatgcataccttcatgtgcctgacagtcttggcttttgaagatttttttttcttttttgctctgcatagctagaccatcttattaataatactctgaaaaaaatgatttcaaggcatggaagttctctgtgatacaacaatagtatttcttcaaatgcgccttatgctacttatctcagaaacaggttttaaaatgaagtgctttccagagaaccatcatataaataaagattaatagaaaaataaaaaa

SEQ ID NO: 315481 - DNA, 1291 bp, Homo sapiens
  misc_feature (1252)..(1252): n is a, c, g, or t
  misc_feature (1263)..(1263): n is a, c, g, or t
ggaaagggtccagtggctgcttttatcgaccaatcaaatattttcctgacagatcccaaaatattcctgggccaacggagggaggagcccaagatgcctctgctgctccttggagagacagagcctcttaagttggagcgggactgccggagcccagtggacccctgggctgctgccagccccgacctggcacttgcttgcctgtgtcactgtcaggatttgtctagcggcgcattccctaacaggggtgtgttggggggagtcctctttccaactgtcgaaatggttatcaaagtgtttgttgctacatcttctgggtccatagcgattaggaagaaacagcaagaagtagtgggttttttggaagcgaataaaatcgactttaaggaattagatattgctggagatgaagacaacaggaggtggatgagagagaatgttcctggagagaaaaaacctcaaaatgggattcctttgcctccccagatcttcaatgaggagcagtactgtggggattttgactctttcttctctgcaaaagaagagaatattatttattccttccttggtttggctcctcctccagactcaaagggatcagagaaggctgaagaaggtggagaaactgaggcacaaaaagagggcagtgaagatgtgggcaacctccctgaagcccaggagaagaatgaagaagaaggagagacagccacagaagagacggaagaaatagccatggagggtgcggaaggggaagccgaggaggaggaagaaactgcagaaggagaagaagagcctggagaagacgaagattcctaggccttttcatgcttcatttcttccacttctccagaaaatggaagctatgaagcaacatttcaaatgtctctccacaaaccaaactcaacagaatactttggcttgaagccggcacacccagggttactgaggacttatgctgcctgacctggttagatgtacatggaggtatctcccgaatcaataccttcatgtgcctgacagtcttggcttttgaagatttttttttcttttttgctctgcatagctagaccatcttattaataatactctgaaaaaaatgatttcaaggcatggaagttctctgtgatacaacaatagtatttcttcaaatgcgccttatgctacttatctcagaaacaggttttaaaatgaagtgctttccagagaaccatcatataaataaagcacggcaggcgtgcccggcccatccctncccctctccanacacctcccctctccaccgcctctcaca

SEQ ID NO: 315482 - DNA, 1111 bp, Homo sapiens
ggaaagggtccagtggctgcttttatcgaccaatcaaatattttcctgacagatcccaaaatattcctgggccaacggagggaggagcccaagatgcctctgctgctccttggagagacagagcctcttaagttggagcgggactgccggagcccagtggacccctgggctgctgccagccccgacctggcacttgcttgcctgtgtcactgtcaggatttgtctagcggcgcattccctaacaggggtgtgttggggggagtcctctttccaactgtcgaaatggttatcaaagtgtttgttgctacatcttctgggtccatagcgattaggaagaaacagcaagaagtagtgggttttttggaagcgaataaaatcgactttaaggaattagatattgctggagatgaagacaacaggaggtggatgagagagaatgttcctggagagaaaaaacctcaaaatgggattcctttgcctccccagatcttcaatgaggagcagtactgtggggattttgactctttcttctctgcaaaagaagagaatattatttattccttccttggtttggctcctcctccagactcaaagggatcagagaaggctgaagaaggtggagaaactgaggcacaaaaagagggcagtgaagatgtgggcaacctccctgaagcccaggagaagaataaaatggaagctatgaagcaacatttcaaatgtctctccacaaaccaaactcaacagaatactttggcttgaagccggcacacccagggttactgaggacttatgctgcctgacctggttagatgtacatggaggtatctcccgaatcatacaaaattaaatgtgaagaccgtttatgcataccttcatgtgcctgacagtcttggcttttgaagatttttttttcttttttgctctgcatagctagaccatcttattaataatactctgaaaaaaatgatttcaaggcatggaagttctctgtgatacaacaatagtatttcttcaaatgcgccttatgctacttatctcagaaacaggttttaaaatgaagtgctttccagagaaccatcatataaataaagattaatagaaaaataaaaaa

SEQ ID NO: 315483 - DNA, 979 bp, Homo sapiens
ggaaagggtccagtggctgcttttatcgaccaatcaaatattttcctgacagatcccaaaatattcctgggccaacggagggaggagcccaagatgcctctgctgctccttggagagacagagcctcttaagttggagcgggactgccggagcccagtggacccctgggctgctgccagccccgacctggcacttgcttgcctgtgtcactgtcaggatttgtctagcggcgcattccctaacaggggtgtgttggggggagtcctctttccaactgtcgaaatggttatcaaagtgtttgttgctacatcttctgggtccatagcgattaggaagaaacagcaagaagtagtgggttttttggaagcgaataaaatcgactttaaggaattagatattgctggagatgaagacaacaggaggtggatgagagagaatgttcctggagagaaaaaacctcaaaatgggattcctttgcctccccagatcttcaatgaggagcagtactgtggggattttgactctttcttctctgcaaaagaagagaatattatttattccttccttggtttggctcctcctccagactcaaagggatcagagaaggctgaagaaggtggagaaactgaggcacaaaaagagggcagtgaagatgtgggcaacctccctgaagcccaggagaagaatgaagaagaaggagagacagccacagaagagacggaagaaatagccatggagggtgcggaaggggaagccgaggaggaggaagaaactgcagaaggagaagaagagcctggagaagacgaagattcctaggccttttcatgcttcatttcttccacttctccagggtagctacaggattctggggtggaaaagctgctagttaccgtactgtatgctatctgcggcacattttgcttagtaacaggagaaagggaattccaattcagggctgtctgtctccttccaaagccct

SEQ ID NO: 315484 - DNA, 644 bp, Homo sapiens
gaatgccagccttaagagtgtggggtcacagaagtccacagtgtttcaatgcagggacccgctgaatgcagctgagcatttatttacattttccaagatgagagctgacatatcttttattgtatttagcaagagcagctttgttgaggtggtagaagtgtaactagattggagtgggtcgaagatgaatgatgaatgggagaggacaaaatggaaacaagaatgtatgattttccagaagtttggctgtgaaggagtagagggtgatactggagggagtgatatagggtcaagggaagactttttacattttttattttttaaggtggaaaagtctagatcctgacccacttagggttgtacctgatgaaaccgggatcatttacttacacagctagtgtattaggaaactgttcttggtgaggattgaatgaaagaatgcatatcagcactccatacatggaaagcacttaaatgttggctctgttggcagaatcaggctgagtggtccagagcccccatggatctggtcctgttccaagctctttagtaaggctgctctcctgcaacccctcctcattttttggtcaggtagaatcgggaaagtccacactgtctcctaatacttaaatcccaagcttctt

SEQ ID NO: 315485 - DNA, 1137 bp, Homo sapiens
ggacgcgtgggtccggacgcgtgggcccaactaggcgcaatttacattgacgcgtcatgccttacgtgggaaggacaacagttccaggggaaagctgccattgtggagaagttgtctagccttccgttccagaaaattcagcacagcatcaccgcccagacattgatttgttcagatgtttcaatgcctcatgatacaataaaaccacaaaaattttcttaacagttaaaaaacaaaaaaaaaaaaaaaaaaaaaaaacaaaaaaaaaaaaaaaaacaaacaaaaaaaacaccaaaccacacaaaaacaaaaaagaacacaaaaaacacaaaacagaaccaaaaaacaacaacaagaacaacaaaaccagcacaacacactaaaaaacacgcacacaacaaaaaaacaactagaacgcgtggggcgggaaggtaaatatagcgagtaccgatagtgaaccggggtaacggctcgcgcgcatacgaactaataaggacgggcacaagaagccactcgaatacggcagtacaacaagatgcgaacagccaacgactggggagcggcgcaaacactaagagcacgcaggaaggctaagaagtacctacgacaatagagtcaaacagctagcagcaacgaccagaacgcgtctggaggtcaaagacgcgaggcgccgttccaccacacagcgcaagatcaatgacggtccggcacgagacaataaaacaacgcaagcagtgaagagcgagtcagatccagacgcgacgcagcatcagtaccgcgcgaaggagaaaagagaaagacggacagactataagtagactaactactaaatggagggacgacgctacatcaacaccacggaccccagcatcatgacaaacccagagcggaccccaacggagccgacgcgagcagaccgtcacgagcccagcgacggacgcggagccgaaagcaccgcccaaggccgacgcaccgccaactgcgaccacgacccagacacgccagccagaggacacacgcgcagagcaacacacgaccgagactccaccacaccccagactgagtcgaccgcaccgcaacgaacgaccgcaccggacaggccgaccgaccgagaaacccgacggccctgcagacgac

SEQ ID NO: 315486 - DNA, 2146 bp, Homo sapiens
ggaaggcaggggggaagggacagtcggccgcagaccgcgctgggttgccgctgccgctgccgccatcgtgccagcccctcgggtctccgtgaggccgggtgacgctccagaatgggagacaagccaatttgggagcagattggatccagcttcattcaacattactaccagttatttgataatgatagaacccaactaggcgcaatttacattgacgcgtcatgccttacgtgggaaggacaacagttccaggggaaagctgccattgtggagaagttgtctagccttccgttccagaaaattcagcacagcatcaccgcgcaggaccatcagcccactccagatagctgcatcatcagcatggttgtgggccagcttaaggcggatgaagaccccatcatggggttccaccagatgttcctattaaagaacatcaacgatgcttgggtttgcaccaatgacatgttcaggctcgccctgcacaactttggctgacctcctctcagctaggcactcacgctgtttcctcctccctcctcttcccaatactattcccactcctccagatgctccaaatatcatgcacaaatgagcagggccgcggtgggagtgggcgcagtgcgctgctgccactgaggtgttgtgcatgatgtttggatgctagactagttgcatctgacgggagaagtttgtgttgtaccagcgcatgccttggaaagacttaagtaatgcaaaaggttgtcctttttttttttttttttttttaatctactgacaagttgctctagtaacccaaagaagtgaaggagaaagcagctgcctcaccgcccagacattgatttgttcagatgtttcaatgcctcatgatacaataaaaccacaaaaattttcttaacagtttaaattgttttaattagtttactagttggctgggcatcagaagctacccagacccgttgtctctctcatgtttcaccctcccacttctgccccaactctgaatacctgttgcagggagaaactgctgaagcagcactcccagctagcctctcagaagccgtgtagggcagttctctcccactccacagggcgactggtctttggaaagcaggcaggaagagctcaggtctggcctgaagcttctctcactgaagcctgtgcagtcagttctgatacctcctgtgacttctgctctgggtaggttcagggccctagtagcaggagagatgatcctgaatcctgttgaagctggagaggccttggcaaaatggctcatcacgttcaggccctccgggctgagttgtcagcagtatcaagggaggggcctgctctatccccagaaggatcaggatcatatccaggatgccccacatacaccaagccaggcagagggcagctcagctcctgtcccatctgctttggatatctttacccaaaggcaggtaacccgaagagccagcctccactgcccacagagccaggcccagttgtgttggagtataggtcaggagctgtggaaggaggcagtctgtgagggactcatgctttaggagtcctcacccctcagactgctgcaggacattgccaggcctctctccacttccttcctcagcatacagacttcatgctatcttccaattccggggagtcttagctattagggcagtttctgcttctccattttggggacaaaggccttgcccagtacaaatctagccccttgtcccacagacttctggatggtataaacctagtggcaatgtagcaaccataggctagaaccaaacccaagatttgggtcagtgccctgttaagggttttaggattggtaaggacaccacagctaaatctgacatgtaaaaggatacccttcccctgtcccactacgggtggaggctaaggacctcctcagatcccacagattgcctggtgacattgggcacagggctggatggtgtgctgtttgagaggacagcatgctcaggagatttcagtgggaatgatctctaggctgatgtgtatttggggaagtgggggtggggaagaggtaggtgcctgctgcctcaaaccaccttgtgtaaaatctgcaatacggcttcttccatgtacctgtgcctgaactgtctgcaataaagaagaatttgta

SEQ ID NO: 315487 - DNA, 894 bp, Homo sapiens
ggaaggcaggggggaagggacagtcggccgcagaccgcgctgggttgccgctgccgctgccgccatcgtgccagcccctcgggtctccgtgaggccgggtgacgctccagaatgggagacaagccaatttgggagcagattggatccagcttcattcaacattactaccagttatttgataatgatagaacccaactaggcgcaatttacattgacgcgtcatgccttacgtgggaaggacaacagttccaggggaaagctgccattgtggagaagttgtctagccttccgttccagaaaattcagcacagcatcaccgcgcaggaccatcagcccactccagatagctgcatcatcagcatggttgtgggccagcttaaggcggatgaagaccccatcatggggttccaccagatgttcctattaaagaacatcaacgatgcttgggtttgcaccaatgacatgttcaggctcgccctgcacaactttggctgacctcctctcagctaggcactcacgctgtttcctcctccctcctcttcccaatactattcccactcctccagatgctccaaatatcatgcacaaatgagcagggccgcggtgggagtgggcgcagtgcgctgctgccactgaggtgttgtgcatgatgtttggatgctagactagttgcatctgacgggagaagtttgtgttgtaccagcgcatgccttggaaagacttaagtaatgcaaaaggttgtcctttttttttttttttttttttaatctactgacaagttgctctagtaacccaaagaagtgaaggagaaagcagctgcctcaccgcccagacattgatttgttcagatgtttcaatgcctcatgtccccgtacatcgttagaagcttgaatt

SEQ ID NO: 315488 - DNA, 887 bp, Homo sapiens
  misc_feature (41)..(41): n is a, c, g, or t
cgaggggaccaaccttaggctaggtacgaggctgggtgtgngctgcgctgcgcatcgtgcagccctcgggtctccgtgaggccgggtgacgctccagaatgggagacaagccaatttgggagcagattggatccagcttcattcaacattactaccagttatttgataatgatagaacccaactaggcgcaatttacattgacgcgtcatgccttacgtgggaaggacaacagttccaggggaaagctgccattgtggagaagttgtctagccttccgttccagaaaattcagcacagcatcaccgcgcaggaccatcagcccactccagatagctgcatcatcagcatggttgtgggccagcttaaggcggatgaagaccccatcatggggttccaccagatgttcctattaaagaacatcaacgatgcttgggtttgcaccaatgacatgttcaggctcgccctgcacaactttggctgacctcctctcagctaggcactcacgctgtttcctcctccctcctcttcccaatactattcccactcctccagatgctccaaatatcatgcacaaatgagcagggccgcggtgggagtgggcgcagtgcgctgctgccactgaggtgttgtgcatgatgtttggatgctagactagttgcatctgacgggagaagtttgtgttgtaccagcgcatgccttggaaagacttaagtaatgcaaaaggttgtcctttttttttttttttttttttaatctactgacaagttgctctagtaacccaaagaagtgaaggagaaagcagctgcctcaccgcccagacattgatttgttcagatgtttcaatgcctcatgatacaataaaaccacaaaaattttcttaacagtt

SEQ ID NO: 315489 - DNA, 878 bp, Homo sapiens
gctggtacaggtcccgagttcgttgggattgccgctgccgccatcgtgccagcccctcgggtctccgtgaggccgggtgacgctccagaatgggagacaagccaatttgggagcagattggatccagcttcattcaacattactaccagttatttgataatgatagaacccaactaggcgcaatttacattgacgcgtcatgccttacgtgggaaggacaacagttccaggggaaagctgccattgtggagaagttgtctagccttccgttccagaaaattcagcacagcatcaccgcgcaggaccatcagcccactccagatagctgcatcatcagcatggttgtgggccagcttaaggcggatgaagaccccatcatggggttccaccagatgttcctattaaagaacatcaacgatgcttgggtttgcaccaatgacatgttcaggctcgccctgcacaactttggctgacctcctctcagctaggcactcacgctgtttcctcctccctcctcttcccaatactattcccactcctccagatgctccaaatatcatgcacaaatgagcagggccgcggtgggagtgggcgcagtgcgctgctgccactgaggtgttgtgcatgatgtttggatgctagactagttgcatctgacgggagaagtttgtgttgtaccagcgcatgccttggaaagacttaagtaatgcaaaaggttgtcctttttttttttttttttttttaatctactgacaagttgctctagtaacccaaagaagtgaaggagaaagcagctgcctcaccgcccagacattgatttgttcagatgtttcaatgcctcatgatacaataaaaccacaaaaattttcttaacagtt

SEQ ID NO: 315490 - DNA, 879 bp, Homo sapiens
tcttgtctccaggcccacgttgtcactagaagtcctgactctggagaggcctccaaatctggtctccgtgaggccgggtgacgctccagaatgggagacaagccaatttgggagcagattggatccagcttcattcaacattactaccagttatttgataatgatagaacccaactaggcgcaatttacattgacgcgtcatgccttacgtgggaaggacaacagttccaggggaaagctgccattgtggagaagttgtctagccttccgttccagaaaattcagcacagcatcaccgcgcaggaccatcagcccactccagatagctgcatcatcagcatggttgtgggccagcttaaggcggatgaagaccccatcatggggttccaccagatgttcctattaaagaacatcaacgatgcttgggtttgcaccaatgacatgttcaggctcgccctgcacaactttggctgacctcctctcagctaggcactcacgctgtttcctcctccctcctcttcccaatactattcccactcctccagatgctccaaatatcatgcacaaatgagcagggccgcggtgggagtgggcgcagtgcgctgctgccactgaggtgttgtgcatgatgtttggatgctagactagttgcatctgacgggagaagtttgtgttgtaccagcgcatgccttggaaagacttaagtaatgcaaaaggttgtcctttttttttttttttttttttaatctactgacaagttgctctagtaacccaaagaagtgaaggagaaagcagctgcctcaccgcccagacattgatttgttcagatgtttcaatgcctcatgatacaataaaaccacaaaaattttcttaacagtt

SEQ ID NO: 315491 - DNA, 2148 bp, Homo sapiens
gaagggctggcctctcagcccaggctctgacacactcatgcacttagtcaacaaatagtttgtttgagggctgggccaggtctccgtgaggccgggtgacgctccagaatgggagacaagccaatttgggagcagattggatccagcttcattcaacattactaccagttatttgataatgatagaacccaactaggcgcaatttacattgacgcgtcatgccttacgtgggaaggacaacagttccaggggaaagctgccattgtggagaagttgtctagccttccgttccagaaaattcagcacagcatcaccgcgcaggaccatcagcccactccagatagctgcatcatcagcatggttgtgggccagcttaaggcggatgaagaccccatcatggggttccaccagatgttcctattaaagaacatcaacgatgcttgggtttgcaccaatgacatgttcaggctcgccctgcacaactttggctgacctcctctcagctaggcactcacgctgtttcctcctccctcctcttcccaatactattcccactcctccagatgctccaaatatcatgcagtgcgctgctgccactgaggtgttgtgcatgatgtttggatgctagactagttgcatctgacgggagaagtttgtgttgtaccagcgcatgccttggaaagacttaagtaatgcaaaaggttgtcctttttttttttttttttttttaatctactgacaagttgctctagtaacccaaagaagtgaaggagaaagcagctgcctcaccgcccagacattgatttgttcagatgtttcaatgcctcatgatacaataaaaccacaaaaattttcttaacagtttaaattgttttaattagtttactagttggctgggcatcagaagctacccagacccgttgtctctctcatgtttcaccctcccacttctgccccaactctgaatacctgttgcagggagaaactgctgaagcagcactcccagctagcctctcagaagccgtgtagggcagttctctcccactccacagggcgactggtctttggaaagcaggcaggaagagctcaggtctggcctgaagcttctctcactgaagcctgtgcagtcagttctgatacctcctgtgacttctgctctgggtaggttcagggccctagtagcaggagagatgatcctgaatcctgttgaagctggagaggccttggcaaaatggctcatcacgttcaggccctccgggctgagttgtcagcagtatcaagggaggggcctgctctatccccagaaggatcaggatcatatccaggatgccccacatacaccaagccaggcagagggcagctcagctcctgtcccatctgctttggatatctttacccaaaggcaggtaacccgaagagccagcctccactgcccacagagccaggcccagttgtgttggagtataggtcaggagctgtggaaggaggcagtctgtgagggactcatgctttaggagtcctcacccctcagactgctgcaggacattgccaggcctctctccacttccttcctcagcatacagacttcatgctatcttccaattccggggagtcttagctattagggcagtttctgcttctccattttggggacaaaggccttgcccagtacaaatctagccccttgtcccacagacttctggatggtataaacctagtggcaatgtagcaaccataggctagaaccaaacccaagatttgggtcagtgccctgttaagggttttaggattggtaaggacaccacagctaaatctgacatgtaaaaggatacccttcccctgtcccactacgggtggaggctaaggacctcctcagatcccacagattgcctggtgacattgggcacagggctggatggtgtgctgtttgagaggacagcatgctcaggagatttcagtgggaatgatctctaggctgatgtgtatttggggaagtgggggtggggaagaggtaggtgcctgctgcctcaaaccaccttgtgtaaaatctgcaatacggcttcttccatgtacctgtgcctgaactgtctgcaataaagaagaatttgtaactgtggtttctttcttccaacctgagggtgccaggtg

SEQ ID NO: 315492 - DNA, 2186 bp, Homo sapiens
cagtttttttgatactctataagttacttggtaaatactatgggattcgtttcaaaattgtgatcacttgtgtctggagatatgtgcttggaggcaggtacatcctctgctcttttgctgtagctaagggtgaattattgtgcagtttaagcacacatagcacacataggcgtggctgattgttggcctacatgtgcccagggcattgtttcatacattacatcaattcacattcacaagtaccccttggctacactgggatttgagttcaggacagtagggcctgatcctaaagtcaacatttttttgccctcttctcctaccactgaattcccttcctgtttcttgatccccttactgaatcctcttttctctcctcataggcggatgaagaccccatcatggggttccaccagatgttcctattaaagaacatcaacgatgcttgggtttgcaccaatgacatgttcaggctcgccctgcacaactttggctgacctcctctcagctaggcactcacgctgtttcctcctccctcctcttcccaatactattcccactcctccagatgctccaaatatcatgcacaaatgagcagggccgcggtgggagtgggcgcagtgcgctgctgccactgaggtgttgtgcatgatgtttggatgctagactagttgcatctgacgggagaagtttgtgttgtaccagcgcatgccttggaaagacttaagtaatgcaaaaggttgtcctttttttttttttttttttttaatctactgacaagttgctctagtaacccaaagaagtgaaggagaaagcagctgcctcaccgcccagacattgatttgttcagatgtttcaatgcctcatgatacaataaaaccacaaaaattttcttaacagtttaaattgttttaattagtttactagttggctgggcatcagaagctacccagacccgttgtctctctcatgtttcaccctcccacttctgccccaactctgaatacctgttgcagggagaaactgctgaagcagcactcccagctagcctctcagaagccgtgtagggcagttctctcccactccacagggcgactggtctttggaaagcaggcaggaagagctcaggtctggcctgaagcttctctcactgaagcctgtgcagtcagttctgatacctcctgtgacttctgctctgggtaggttcagggccctagtagcaggagagatgatcctgaatcctgttgaagctggagaggccttggcaaaatggctcatcacgttcaggccctccgggctgagttgtcagcagtatcaagggaggggcctgctctatccccagaaggatcaggatcatatccaggatgccccacatacaccaagccaggcagagggcagctcagctcctgtcccatctgctttggatatctttacccaaaggcaggtaacccgaagagccagcctccactgcccacagagccaggcccagttgtgttggagtataggtcaggagctgtggaaggaggcagtctgtgagggactcatgctttaggagtcctcacccctcagactgctgcaggacattgccaggcctctctccacttccttcctcagcatacagacttcatgctatcttccaattccggggagtcttagctattagggcagtttctgcttctccattttggggacaaaggccttgcccagtacaaatctagccccttgtcccacagacttctggatggtataaacctagtggcaatgtagcaaccataggctagaaccaaacccaagatttgggtcagtgccctgttaagggttttaggattggtaaggacaccacagctaaatctgacatgtaaaaggatacccttcccctgtcccactacgggtggaggctaaggacctcctcagatcccacagattgcctggtgacattgggcacagggctggatggtgtgctgtttgagaggacagcatgctcaggagatttcagtgggaatgatctctaggctgatgtgtatttggggaagtgggggtggggaagaggtaggtgcctgctgcctcaaaccaccttgtgtaaaatctgcaatacggcttcttccatgtacctgtgcctgaactgtctgcaataaagaagaatttgtaactgtggtttctttcttccaacctgagggtgccaggtg

SEQ ID NO: 315493 - DNA, 671 bp, Homo sapiens
ggaaggcaggggggaagggacagtcggccgcagaccgcgctgggttgccgctgccgctgccgccatcgtgccagcccctcgggtctccgtgaggccgggtgacgctccagaatgggagacaagccaatttgggagcagattggatccagcttcattcaacattactaccagttatttgataatgatagaacccaactaggcgcaatttacattgacgcgtcatgccttacgtgggaaggacaacagttccaggggaaagctgccattgtggagaagttgtctagccttccgttccagaaaattcagcacagcatcaccgcgcaggaccatcagcccactccagatagctgcatcatcagcatggttgtgggccagcttaaggcggatgaagaccccatcatggggttccaccagatgttcctattaaagaacatcaacgatgcttgggtttgcaccaatgacatgttcaggctcgccctgcacaactttggctgacctcctctcagctaggcactcacgctgtttcctcctccctccactcccgggagtggagagagaatgcccagtgaccagtcactgaccctgtgcagaacctcctggaagcgagctttgctgggagagggggtagctagcctgagagggaacctctagggacctcaaagggattgtgc

SEQ ID NO: 315494 - DNA, 784 bp, Homo sapiens
ggaaggcaggggggaagggacagtcggccgcagaccgcgctgggttgccgctgccgctgccgccatcgtgccagcccctcgggtgagtgtcggggccagcacgccggggcgggggctgggccgcaggagccgctctctgggctgccgggaggctccgctgagagtccccgggcggcccctcccctcccccccccccggcggcccgaagccgcgcggggcccgggccatgtgtcgcgcgcggctccgcctcccgccggtcctgtgaggcggcggccgggggtaacgcacagagagccagccgggcgcctatctgggccgtaccgtgctggtggctggtgcaccggcctgcgccatggccaggcctttttctctagtcaggaccgtccggatggggccttagggccccgccccgtctagcctggcccggcctgcgcgagccccgcaagctctgcaggctggctagcgggcagaccccagccccacgtcctgctacccacctacgaaggatccggggatgggcagcgccacccggcccgctccagagtcagcatgggtaagggcgcccgcctgccgcagccggggcttgggcccctcaccctgttcccgaccatagcccggccggggtgtaggtgaacgccccctccttgtctgcccctcggaagtgtacgtttcttaccgcgccctttgtggagcccggactggagttctcgcagggagggcagggtcagggaatatgaggcgggaggggattccacgggagactttatccctgtcttgtcttaga

SEQ ID NO: 315495 - DNA, 900 bp, Homo sapiens
ggaaggcaggggggaagggacagtcggccgcagaccgcgctgggttgccgctgccgctgccgccatcgtgccagcccctcgggtctccgtgaggccgggtgacgctccagaatgggagacaagccaatttgggagcagattggatccagcttcattcaacattactaccagttatttgataatgatagaacccaactaggcgcaatttacattgacgcgtcatgccttacgtgggaaggacaacagttccaggggaaagctgccattgtggagaagttgtctagccttccgttccagaaaattcagcacagcatcaccgcgcaggaccatcagcccactccagatagctgcatcatcagcatggttgtgggccagcttaaggcggatgaagaccccatcatggggttccaccagatgttcctattaaagaacatcaacgatgcttgggtttgcaccaatgacatgttcaggctcgccctgcacaactttggctgacctcctctcagctaggcactcacgctgtttcctcctccctcctcttcccaatactattcccactcctccagatgctccaaatatcatgcacaaatgagcagggccgcggtgggagtgggcgcagtgcgctgctgccactgaggtgttgtgcatgatgtttggatgctagactagttgcatctgacgggagaagtttgtgttgtaccagcgcatgccttggaaagacttaagtaatgcaaaaggttgtcctttttttttttttttttttttaatctactgacaagttgctctagtaacccaaagaagtgaaggagaaagcagctgcctcaccgcccagacattgatttgttcagatgtttcaatgcctcatgatacaataaaaccacaaaaattttcttaacagtt

SEQ ID NO: 315496 - DNA, 2184 bp, Homo sapiens
ggaaggcaggggggaagggacagtcggccgcagaccgcgctgggttgccgctgccgctgccgccatcgtgccagcccctcgggtctccgtgaggccgggtgacgctccagaatgggagacaagccaatttgggagcagattggatccagcttcattcaacattactaccagttatttgataatgatagaacccaactaggcgcaatttacattgacgcgtcatgccttacgtgggaaggacaacagttccaggggaaagctgccattgtggagaagttgtctagccttccgttccagaaaattcagcacagcatcaccgcgcaggaccatcagcccactccagatagctgcatcatcagcatggttgtgggccagcttaaggcggatgaagaccccatcatggggttccaccagatgttcctattaaagaacatcaacgatgcttgggtttgcaccaatgacatgttcaggctcgccctgcacaactttggctgacctcctctcagctaggcactcacgctgtttcctcctccctcctcttcccaatactattcccactcctccagatgctccaaatatcatgcacaaatgagcagggccgcggtgggagtgggcgcagtgcgctgctgccactgaggtgttgtgcatgatgtttggatgctagactagttgcatctgacgggagaagtttgtgttgtaccagcgcatgccttggaaagacttaagtaatgcaaaaggttgtcctttttttttttttttttttttaatctactgacaagttgctctagtaacccaaagaagtgaaggagaaagcagctgcctcaccgcccagacattgatttgttcagatgtttcaatgcctcatgatacaataaaaccacaaaaattttcttaacagtttaaattgttttaattagtttactagttggctgggcatcagaagctacccagacccgttgtctctctcatgtttcaccctcccacttctgccccaactctgaatacctgttgcagggagaaactgctgaagcagcactcccagctagcctctcagaagccgtgtagggcagttctctcccactccacagggcgactggtctttggaaagcaggcaggaagagctcaggtctggcctgaagcttctctcactgaagcctgtgcagtcagttctgatacctcctgtgacttctgctctgggtaggttcagggccctagtagcaggagagatgatcctgaatcctgttgaagctggagaggccttggcaaaatggctcatcacgttcaggccctccgggctgagttgtcagcagtatcaagggaggggcctgctctatccccagaaggatcaggatcatatccaggatgccccacatacaccaagccaggcagagggcagctcagctcctgtcccatctgctttggatatctttacccaaaggcaggtaacccgaagagccagcctccactgcccacagagccaggcccagttgtgttggagtataggtcaggagctgtggaaggaggcagtctgtgagggactcatgctttaggagtcctcacccctcagactgctgcaggacattgccaggcctctctccacttccttcctcagcatacagacttcatgctatcttccaattccggggagtcttagctattagggcagtttctgcttctccattttggggacaaaggccttgcccagtacaaatctagccccttgtcccacagacttctggatggtataaacctagtggcaatgtagcaaccataggctagaaccaaacccaagatttgggtcagtgccctgttaagggttttaggattggtaaggacaccacagctaaatctgacatgtaaaaggatacccttcccctgtcccactacgggtggaggctaaggacctcctcagatcccacagattgcctggtgacattgggcacagggctggatggtgtgctgtttgagaggacagcatgctcaggagatttcagtgggaatgatctctaggctgatgtgtatttggggaagtgggggtggggaagaggtaggtgcctgctgcctcaaaccaccttgtgtaaaatctgcaatacggcttcttccatgtacctgtgcctgaactgtctgcaataaagaagaatttgtaactgtggtttctttcttccaacctgagggtgccaggtg

SEQ ID NO: 315497 - DNA, 938 bp, Homo sapiens
ggaaggcaggggggaagggacagtcggccgcagaccgcgctgggttgccgctgccgctgccgccatcgtgccagcccctcgggtctccgtgaggccgggtgacgctccagaatgggagacaagccaatttgggagcagattggatccagcttcattcaacattactaccagttatttgataatgatagaacccaactaggcgcaatttacattgacgcgtcatgccttacgtgggaaggacaacagttccaggggaaagctgccattgtggagaagttgtctagccttccgttccagaaaattcagcacagcatcaccgcgcaggaccatcagcccactccagatagctgcatcatcagcatggttgtgggccagcttaaggcggatgaagaccccatcatggggttccaccagatgttcctattaaagaacatcaacgatgcttgggtttgcaccaatgacatgttcaggctcgccctgcacaactttggctgacctcctctcagctaggcactcacgctgtttcctcctccctcctcttcccaatactattcccactcctccagatgctccaaatatcatgcacaaatgagcagggccgcggtgggagtgggcgcagtgcgctgctgccactgaggtgttgtgcatgatgtttggatgctagactagttgcatctgacgggagaagtttgtgttgtaccagcgcatgccttggaaagacttaagtaatgcaaaaggttgtcctttttttttttttttttttttaatctactgacaagttgctctagtaacccaaagaagtgaaggagaaagcagctgcctcaccgcccagacattgatttgttcagatgtttcaatgcctcatgatacaataaaaccacaaaaattttcttaacagttcaaaacaagaaacaaataacaaataaacaagaggggcg

SEQ ID NO: 315498 - DNA, 1371 bp, Homo sapiens
ggaaggcaggggggaagggacagtcggccgcagaccgcgctgggttgccgctgccgctgccgccatcgtgccagcccctcgggtgagtgtcggggccagcacgccggggcgggggctgggccgcaggagccgctctctgggctgccgggaggctccgctgagagtccccgggcggcccctcccctcccccccccccggcggcccgaagccgcgcggggcccgggccatgtgtcgcgcgcggctccgcctcccgccggtcctgtgaggcggcggccgggggtaacgcacagagagccagccgggcgcctatctgggccgtaccgtgctggtggctggtgcaccggcctgcgccatggccaggcctttttctctagtcaggaccgtccggatggggccttagggccccgccccgtctagcctggcccggcctgcgcgagccccgcaagctctgcaggctggctagcgggcagaccccagccccacgtcctgctacccacctacgaaggatccggggatgggcagcgccacccggcccgctccagagtcagcatgggtctccgtgaggccgggtgacgctccagaatgggagacaagccaatttgggagcagattggatccagcttcattcaacattactaccagttatttgataatgatagaacccaactaggcgcaatttacattgacgcgtcatgccttacgtgggaaggacaacagttccaggggaaagctgccattgtggagaagttgtctagccttccgttccagaaaattcagcacagcatcaccgcgcaggaccatcagcccactccagatagctgcatcatcagcatggttgtgggccagcttaaggcggatgaagaccccatcatggggttccaccagatgttcctattaaagaacatcaacgatgcttgggtttgcaccaatgacatgttcaggctcgccctgcacaactttggctgacctcctctcagctaggcactcacgctgtttcctcctccctcctcttcccaatactattcccactcctccagatgctccaaatatcatgcacaaatgagcagggccgcggtgggagtgggcgcagtgcgctgctgccactgaggtgttgtgcatgatgtttggatgctagactagttgcatctgacgggagaagtttgtgttgtaccagcgcatgccttggaaagacttaagtaatgcaaaaggttgtcctttttttttttttttttttttaatctactgacaagttgctctagtaacccaaagaagtgaaggagaaagcagctgcctcaccgcccagacattgatttgttcagatgtttcaatgcctcatgatacaataaaaccacaaaaattttcttaacagtt

SEQ ID NO: 315499 - DNA, 890 bp, Homo sapiens
taggtcagtagcgaggcggtgtgaattcggcaccgagggccgtgcgctgccgccatcgtgccagcccctcgggtctccgtgaggccgggtgacgctccagaatgggagacaagccaatttgggagcagattggatccagcttcattcaacattactaccagttatttgataatgatagaacccaactaggcgcaatttacattgacgcgtcatgccttacgtgggaaggacaacagttccaggggaaagctgccattgtggagaagttgtctagccttccgttccagaaaattcagcacagcatcaccgcgcaggaccatcagcccactccagatagctgcatcatcagcatggttgtgggccagcttaaggcggatgaagaccccatcatggggttccaccagatgttcctattaaagaacatcaacgatgcttgggtttgcaccaatgacatgttcaggctcgccctgcacaactttggctgacctcctctcagctaggcactcacgctgtttcctcctccctcctcttcccaatactattcccactcctccagatgctccaaatatcatgcacaaatgagcagggccgcggtgggagtgggcgcagtgcgctgctgccactgaggtgttgtgcatgatgtttggatgctagactagttgcatctgacgggagaagtttgtgttgtaccagcgcatgccttggaaagacttaagtaatgcaaaaggttgtcctttttttttttttttttttttaatctactgacaagttgctctagtaacccaaagaagtgaaggagaaagcagctgcctcaccgcccagacattgatttgttcagatgtttcaatgcctcatgatacaataaaaccacaaaaattttcttaacagtt

SEQ ID NO: 315500 - DNA, 786 bp, Homo sapiens
cgagctcggtaccccactatggtgattggatccagcttcattcaacattactaccagttatttgataatgatagaacccaactaggcgcaatttacattgacgcgtcatgccttacgtgggaaggacaacagttccaggggaaagctgccattgtggagaagttgtctagccttccgttccagaaaattcagcacagcatcaccgcgcaggaccatcagcccactccagatagctgcatcatcagcatggttgtgggccagcttaaggcggatgaagaccccatcatggggttccaccagatgttcctattaaagaacatcaacgatgcttgggtttgcaccaatgacatgttcaggctcgccctgcacaactttggctgacctcctctcagctaggcactcacgctgtttcctcctccctcctcttcccaatactattcccactcctccagatgctccaaatatcatgcacaaatgagcagggccgcggtgggagtgggcgcagtgcgctgctgccactgaggtgttgtgcatgatgtttggatgctagactagttgcatctgacgggagaagtttgtgttgtaccagcgcatgccttggaaagacttaagtaatgcaaaaggttgtcctttttttttttttttttttttaatctactgacaagttgctctagtaacccaaagaagtgaaggagaaagcagctgcctcaccgcccagacattgatttgttcagatgtttcaatgcctcatgatacaataaaaccacaaaaattttcttaacagtt

SEQ ID NO: 315501 - DNA, 916 bp, Homo sapiens
gctggtacaggtcccgagttcgttgggattgccgctgccgccatcgtgccagcccctcgggtctccgtgaggccgggtgacgctccagaatgggagacaagccaatttgggagcagattggatccagcttcattcaacattactaccagttatttgataatgatagaacccaactaggcgcaatttacattgacgcgtcatgccttacgtgggaaggacaacagttccaggggaaagctgccattgtggagaagttgtctagccttccgttccagaaaattcagcacagcatcaccgcgcaggaccatcagcccactccagatagctgcatcatcagcatggttgtgggccagcttaaggcggatgaagaccccatcatggggttccaccagatgttcctattaaagaacatcaacgatgcttgggtttgcaccaatgacatgttcaggctcgccctgcacaactttggctgacctcctctcagctaggcactcacgctgtttcctcctccctcctcttcccaatactattcccactcctccagatgctccaaatatcatgcacaaatgagcagggccgcggtgggagtgggcgcagtgcgctgctgccactgaggtgttgtgcatgatgtttggatgctagactagttgcatctgacgggagaagtttgtgttgtaccagcgcatgccttggaaagacttaagtaatgcaaaaggttgtcctttttttttttttttttttttaatctactgacaagttgctctagtaacccaaagaagtgaaggagaaagcagctgcctcaccgcccagacattgatttgttcagatgtttcaatgcctcatgatacaataaaaccacaaaaattttcttaacagttcaaaacaagaaacaaataacaaataaacaagaggggcg

SEQ ID NO: 315502 - DNA, 754 bp, Homo sapiens
ttaccaaggctgagtggttcctgagtctaggcaattgtgctggcctctgctcccagcccctggggaagttgccggtggctcctgccccacagagcctggcccccccccagagctgcctgggtcacctcaaccctctcaacagtgcccttcccaccccaccctgcaggacaaggtgctgcggatgctgtacgtgtgggcgctctgccgagaccaggacgagctcaacccctacgcggcctggcggctcctggacatctcggcctccagcaccgagcagattctctgagtgtggtgccggagccaggtagccccggcctgggtcatcaggcacagaggcaccgcaacaccacctgcggcaactccagacctctgggaacaagactgcgggctctgcccccagctctgccaggacggctgcaagaccagctggcccgggaggggacaacgggctgttgcgggtgcgcggcagctggagacactcccccgcagggccaacccctgccctgttgctctgccctgcaggggtcccggcgcctggtcacctggggtgcacacaggtcacacagtgccaagaggccccagggcccagggactccccccacagcagggtgggacccgggacccgcggctcagtggcccgctagccacgtcagccaagccactttaggtccattttttaattttaacagtgctcttccatcttgtgcataagcctgagatttggaaagaataaaacaccgaattgcagaagagc

SEQ ID NO: 315503 - DNA, 3323 bp, Homo sapiens
gcttttctcaggcttgcgcggctctaggccgaagcggcggatgacgcaaccgggccgcgccgcgagaaggtcacacgattctccaacatggcggcggcggccctgcggagtggctggtgccgctgtccacggagatgcctcggcagtggaatccaatttctttccagccacaacctaccccatgggtcgacctatcagatgcgccggccgggcggagagctgccactgtccaaatcatattcttctggaaacagaaaaggctttctgtccggcttgctagataatgtcaaacaagaattagccaaaaacaaagaaatgaaagaaagtataaaaaaattccgtgacgaggccagaaggctagaagaatcagacgtgctccaggaggccagaaggaaatacaaaaccatcgagtcagaaaccgtgcggacgagcgaggtgctacggaagaagcttggggagctgacgggcaccgtgaaggagagccttcacgaagtcagtaaaagtgatctcggccggaaaatcaaggagggcgtggaggaagcagccaagacggccaagcagtcggccgagtcggtatccaaaggcggggagaagctgggcaggacagcggccttcagagccctctcccagggggtggagtccgtgaagaaggaaattgacgacagcgtcctgggacagaccgggccctaccggaggccccagcgactccggaagagaacggagtttgcgggagataagttcaaggaggagaaagtgtttgagccaaacgaggaggccctgggggtcgtgctgcacaaggactccaagtggtaccagcagtggaaggacttcaaggagaacaacgtggtgtttaaccggttcttcgagatgaagatgaagtatgacgaaagcgacaacgcgttcatccgggcatcccgggcccttacggacaaggtcaccgacttgctggggggcctgttctccaagacagagatgtcggaggtgctcacggagatcctccgggtggacccggcctttgacaaggaccggtttctgaaacagtgcgagaacgacatcatccccaatgtcctggaggccatgatttctggagagcttgacattctcaaagactggtgctatgaagctacttacagccagctggcccaccccatccagcaggccaaggcactgggtctccagttccattctcgcatcctagacattgacaacgtcgacctggccatgggcaagatgatggagcaggggccggtgctgatcatcaccttccaggcacagctggtgatggtggtcaggaaccccaaaggcgaggtggtggagggtgacccggacaaggtgctgcggatgctgtacgtgtgggcgctctgccgagaccaggacgagctcaacccctacgcggcctggcggctcctggacatctcggcctccagcaccgagcagattctctgagtgtggtgccggagccaggtagccccggcctgggtcatcaggcacagaggcaccgcaacaccacctgcggcaactccagacctctgggaacaagactgcgggctctgcccccagctctgccaggacggctgcaagaccagctggcccgggaggggacaacgggctgttgcgggtgcgcggcagctggagacactcccccgcagggccaacccctgccctgttgctctgccctgcaggggtcccggcgcctggtcacctggggtgcacacaggtcacacagtgccaagaggccccagggcccagggactccccccacagcagggtgggacccgggacccgcggctcagtggcccgctagccacgtcagccaagccactttaggtccattttttaattttaacagtgctcttccatcttgtgcataagcctgagatttggaaagaataaaacaccgaattgcagaagagcagctacggagtctgaagtgtcttctctggcgcgggagtggccgaggcgatggtgggggtgggagcaggcggctgctgtgggaggcggtcaaggtcgagtgaggaactgcagccgcagtgggtggacgccttgcccagggctggaccctgcctcggtctccgccgctccaggggcgggtggggtgggctgagccggagcccgggccgccgccgccgccgccggggagaggccgaacgcgcagccggcgcgggtccctgagagagcgcggccgccgggcggtcggtccccgtccgggtcgaagccaggggcgcgcggcgatgtgagccatgagcgcgacgtggacgctgtcgccggagcccctgccgccgtcgacggggcccccggtgggcgcgggcctggacgcggagcagcgcacggtgttcgccttcgtgctctgcctgctcgtggtgctggtgctgttgatggtgcgctgcgtgcgcatcctgctcgacccctacagccgcatgcccgcctcgtcctggaccgaccacaaggaggcgctcgagcgcgggcagttcgactacgcgttggtgtgaggggcgcggcgccccctagccggccctgcgccggggtctcagagggccggcccggcggggggcgccgcgggggccaggactgcgctcaggatcccgccccggagcccccagcccgggggagagggggagggagttgggagaagcccagcccctcgccctcgagacccctcccatgtcccttcctggcctggccggagccccacctcgtgcctttatccgccctgtcccttcctctctgcgcatctcacccgcccggctggcccccacccccgactctgaatcccgggcgggaggaggacccccgcaccgccccctccccagcgtgtaagtggctctgctattgtgcgtccctggaagtggggacccccttgtccctcctccctcccctgttgtctggccgtcgtcaaccccaccttgactgagtgttgagcccgtccttgggctctggtccctgcggggcaggctctcccgggcccacggggcggacgctgcataccaatttgccctgcaccgcctgtcccggagacggagcccgaaggcctgccatggcggctgtgtcgaggatgcgtggcgcctgccgtggcgggacagcgtgggcaggctcatttctgcccccaacccgggccccaggacaggtcagcgcgccctgccccggtgcccaccgctgccccccatccgccctcctgccacttgcccctgacccccctgccgtgcctcccgcagccctcccatgccgttccactcctccctgcctctgagccgaacatgataataaaagctattattgagcgcttactgcatgccaagtagcgtgctgagttggcacctcctgtt

SEQ ID NO: 315504 - DNA, 1914 bp, Homo sapiens
gcttttctcaggcttgcgcggctctaggccgaagcggcggatgacgcaaccgggccgcgccgcgagaaggtcacacgattctccaacatggcggcggcggccctgcggagtggctggtgccgctgtccacggagatgcctcggcagtggaatccaatttctttccagccacaacctaccccatgggtcgacctatcagatgcgccggccgggcggagagctgccactgtccaaatcatattcttctggaaacagaaaaggctttctgtccggcttgctagataatgtcaaacaagaattagccaaaaacaaagaaatgaaagaaagtataaaaaaattccgtgacgaggccagaaggctagaagaatcagacgtgctccaggaggccagaaggaaatacaaaaccatcgagtcagaaaccgtgcggacgagcgaggtgctacggaagaagcttggggagctgacgggcaccgtgaaggagagccttcacgaagtcagtaaaagtgatctcggccggaaaatcaaggagggcgtggaggaagcagccaagacggccaagcagtcggccgagtcggtatccaaaggcggggagaagctgggcaggacagcggccttcagagccctctcccagggggtggagtccgtgaagaaggaaattgacgacagcgtcctgggacagaccgggccctaccggaggccccagcgactccggaagagaacggagtttgcgggagataagttcaaggaggagaaagtgtttgagccaaacgaggaggccctgggggtcgtgctgcacaaggactccaagtggtaccagcagtggaaggacttcaaggagaacaacgtggtgtttaaccggttcttcgagatgaagatgaagtatgacgaaagcgacaacgcgttcatccgggcatcccgggcccttacggacaaggtcaccgacttgctggggggcctgttctccaagacagagatgtcggaggtgctcacggagatcctccgggtggacccggcctttgacaaggaccggtttctgaaacagtgcgagaacgacatcatccccaatgtcctggaggccatgatttctggagagcttgacattctcaaagactggtgctatgaagctacttacagccagctggcccaccccatccagcaggccaaggcactgggtctccagttccattctcgcatcctagacattgacaacgtcgacctggccatgggcaagatgatggagcaggggccggtgctgatcatcaccttccaggcacagctggtgatggtggtcaggaaccccaaaggcgaggtggtggagggtgacccggacaaggtgctgcggatgctgtacgtgtgggcgctctgccgagaccaggacgagctcaacccctacgcggcctggcggctcctggacatctcggcctccagcaccgagcagattctctgagtgtggtgccggagccaggtagccccggcctgggtcatcaggcacagaggcaccgcaacaccacctgcggcaactccagacctctgggaacaagactgcgggctctgcccccagctctgccaggacggctgcaagaccagctggcccgggaggggacaacgggctgttgcgggtgcgcggcagctggagacactcccccgcagggccaacccctgccctgttgctctgccctgcaggggtcccggcgcctggtcacctggggtgcacacaggtcacacagtgccaagaggccccagggcccagggactccccccacagcagggtgggacccgggacccgcggctcagtggcccgctagccacgtcagccaagccactttaggtccattttttaattttaacagtgctcttccatcttgtgcataagcctgagatttggaaagaataaaacaccgaattgcagaagagc

SEQ ID NO: 315505 - DNA, 3379 bp, Homo sapiens
  misc_feature (6)..(6): n is a, c, g, or t
aagcanaacctgtggcttaagactgggtgaaactcgcttggaagctggacactggcggacccggcctgctccctggtaagaaggttgcattgactgtggcccggtgcccgaagagggcttctccttgttcttggatagggtgcacattcgcgtggcctccgtttaagctgccaactagatcctctccttttttcgtgttttctttggagaagtccaaggaggtatccaaggaggaggatagagatgttatctttctctcggtctctcccatggaggggacggtggtcacaggctcgtgccgaattcggcacgagctaggccgaagcggcggatgacgcaaccgggccgcgccgcgagaaggtcacacgattctccaacatggcggcggcggccctgcggagtggctggtgccgctgtccacggagatgcctcggcagtggaatccaatttctttccagccacaacctaccccatgggtcgacctatcagatgcgccggccgggcggagagctgccactgtccaaatcatattcttctggaaacagaaaaggctttctgtccggcttgctagataatgtcaaacaagaattagccaaaaacaaagaaatgaaagaaagtataaaaaaattccgtgacgaggccagaaggctagaagaatcagacgtgctccaggaggccagaaggaaatacaaaaccatcgagtcagaaaccgtgcggacgagcgaggtgctacggaagaagcttggggagctgacgggcaccgtgaaggagagccttcacgaagtcagtaaaagtgatctcggccggaaaatcaaggagggcgtggaggaagcagccaagacggccaagcagtcggccgagtcggtatccaaaggcggggagaagctgggcaggacagcggccttcagagccctctcccagggggtggagtccgtgaagaaggaaattgacgacagcgtcctgggacatcccgggcccttacggacaaggtcaccgacttgctggggggcctgttctccaagacagagatgtcggaggtgctcacggagatcctccgggtggacccggcctttgacaaggaccggtttctgaaacagtgcgagaacgacatcatccccaatgtcctggaggccatgatttctggagagcttgacattctcaaagactggtgctatgaagctacttacagccagctggcccaccccatccagcaggccaaggcactgggtctccagttccattctcgcatcctagacattgacaacgtcgacctggccatgggcaagatgatggagcaggggccggtgctgatcatcaccttccaggcacagctggtgatggtggtcaggaaccccaaaggcgaggtggtggagggtgacccggacaaggtgctgcggatgctgtacgtgtgggcgctctgccgagaccaggacgagctcaacccctacgcggcctggcggctcctggacatctcggcctccagcaccgagcagattctctgagtgtggtgccggagccaggtagccccggcctgggtcatcaggcacagaggcaccgcaacaccacctgcggcaactccagacctctgggaacaagactgcgggctctgcccccagctctgccaggacggctgcaagaccagctggcccgggaggggacaacgggctgttgcgggtgcgcggcagctggagacactcccccgcagggccaacccctgccctgttgctctgccctgcaggggtcccggcgcctggtcacctggggtgcacacaggtcacacagtgccaagaggccccagggcccagggactccccccacagcagggtgggacccgggacccgcggctcagtggcccgctagccacgtcagccaagccactttaggtccattttttaattttaacagtgctcttccatcttgtgcataagcctgagatttggaaagaataaaacaccgaattgcagaagagcagctacggagtctgaagtgtcttctctggcgcgggagtggccgaggcgatggtgggggtgggagcaggcggctgctgtgggaggcggtcaaggtcgagtgaggaactgcagccgcagtgggtggacgccttgcccagggctggaccctgcctcggtctccgccgctccaggggcgggtggggtgggctgagccggagcccgggccgccgccgccgccgccggggagaggccgaacgcgcagccggcgcgggtccctgagagagcgcggccgccgggcggtcggtccccgtccgggtcgaagccaggggcgcgcggcgatgtgagccatgagcgcgacgtggacgctgtcgccggagcccctgccgccgtcgacggggcccccggtgggcgcgggcctggacgcggagcagcgcacggtgttcgccttcgtgctctgcctgctcgtggtgctggtgctgttgatggtgcgctgcgtgcgcatcctgctcgacccctacagccgcatgcccgcctcgtcctggaccgaccacaaggaggcgctcgagcgcgggcagttcgactacgcgttggtgtgaggggcgcggcgccccctagccggccctgcgccggggtctcagagggccggcccggcggggggcgccgcgggggccaggactgcgctcaggatcccgccccggagcccccagcccgggggagagggggagggagttgggagaagcccagcccctcgccctcgagacccctcccatgtcccttcctggcctggccggagccccacctcgtgcctttatccgccctgtcccttcctctctgcgcatctcacccgcccggctggcccccacccccgactctgaatcccgggcgggaggaggacccccgcaccgccccctccccagcgtgtaagtggctctgctattgtgcgtccctggaagtggggacccccttgtccctcctccctcccctgttgtctggccgtcgtcaaccccaccttgactgagtgttgagcccgtccttgggctctggtccctgcggggcaggctctcccgggcccacggggcggacgctgcataccaatttgccctgcaccgcctgtcccggagacggagcccgaaggcctgccatggcggctgtgtcgaggatgcgtggcgcctgccgtggcgggacagcgtgggcaggctcatttctgcccccaacccgggccccaggacaggtcagcgcgccctgccccggtgcccaccgctgccccccatccgccctcctgccacttgcccctgacccccctgccgtgcctcccgcagccctcccatgccgttccactcctccctgcctctgagccgaacatgataataaaagctattattgagcgcttactgcatgccaagtagcgtgctgagttggcacctcctgtt

SEQ ID NO: 315506 - DNA, 1356 bp, Homo sapiens
gcttttctcaggcttgcgcggctctaggccgaagcggcggatgacgcaaccgggccgcgccgcgagaaggtcacacgattctccaacatggcggcggcggccctgcggagtggctggtgccgctgtccacggagatgcctcggcagtggaatccaatttctttccagccacaacctaccccatgggtcgacctatcagatgcgccggccgggcggagagctgccactgtccaaatcatattcttctggaaacagaaaaggctttctgtccggcttgctagataatgtcaaacaagaattagccaaaaacaaagaaatgaaagaaagtataaaaaaattccgtgacgaggccagaaggctagaagaatcagacgtgctccaggaggccagaaggaaatacaaaaccatcgagtcagaaaccgtgcggacgagcgaggtgctacggaagaagcttggggagctgacgggcaccgtgaaggagagccttcacgaagtcagtaaaagtgatctcggccggaaaatcaaggagggcgtggaggaagcagccaagacggccaagcagtcggccgagtcggtatccaaaggcggggagaagctgggcaggacagcggccttcagagccctctcccagggggtggagtccgtgaagaaggaaattgacgacagcgtcctgggacagaccgggccctaccggaggccccagcgactccggaagagaacggagtttgcgggagataagttcaaggaggagaaagtgtttgagccaaacgaggaggccctgggggtcgtgctgcacaaggactccaagtggtaccagcagtggaaggacttcaaggagaacaacgtggtgtttaaccggttcttcgagatgaagatgaagtatgacgaaagcgacaacgcgttcatccgggcatcccgggcccttacggacaaggtcaccgacttgctggggggcctgttctccaagacagagatgtcggaggtgctcacggagatcctccgggtggacccggcctttgacaaggaccggtttctgaaacagtgcgagaacgacatcatccccaatgtcctggaggccatgatttctggagagcttgacattctcaaagactggtgctatgaagctacttacagccttctccactggccggagtcagtgccaggtccttgccctttgtggaaagtcacaggtcacacgaggggccccgtgtcctgcctgtctgaagccaatgctgtctggttgcgccatttttgtgcttttatgtttaattttatgagggccacgggtctgtgttcgactcagcctcagggacgactctgacctcttggccacagaggactcacttgcccacaccga

SEQ ID NO: 315507 - DNA, 3478 bp, Homo sapiens
  misc_feature (6)..(6): n is a, c, g, or t
aagcanaacctgtggcttaagactgggtgaaactcgcttggaagctggacactggcggacccggcctgctccctggtaagaaggttgcattgactgtggcccggtgcccgaagagggcttctccttgttcttggatagggtgcacattcgcgtggcctccgtttaagctgccaactagatcctctccttttttcgtgttttctttggagaagtccaaggaggtatccaaggaggaggatagagatgttatctttctctcggtctctcccatggaggggacggtggtcacaggctcgtgccgaattcggcacgagctaggccgaagcggcggatgacgcaaccgggccgcgccgcgagaaggtcacacgattctccaacatggcggcggcggccctgcggagtggctggtgccgctgtccacggagatgcctcggcagtggaatccaatttctttccagccacaacctaccccatgggtcgacctatcagatgcgccggccgggcggagagctgccactgtccaaatcatattcttctggaaacagaaaaggctttctgtccggcttgctagataatgtcaaacaagaattagccaaaaacaaagaaatgaaagaaagtataaaaaaattccgtgacgaggccagaaggctagaagaatcagaccgctccaggcacctccctccccctcatcggatccggcccaggctccaggatcctgtggaagcagctcccagcccaggcacgccccctgcagcccacccctccctctcgctgcccccagcagttaggaggcagccggtcccatggtgggccttgcagtccgaaatgtggtcccctggggggacagaggacatgggctcactgcgggagccggagttgggtcctcatctccctggcttggattcctgaccaggctgaaagctgggtccccagccacctttctcttcctccaccaggttccaggggggtccccctgtggggtgcctcctgggtggtcgcccgcaggccgccctccgcctgtgcctaggccagagccaggcactgacaccagcagggacgggcctgggggggacacccagtgccacagctccacccgcgccccacaggtggcagccgggggtgtctgaggaaactccccaccccgcaccactggagaatgttcccaggacctcgcctgctgcctgaaaagcccactctcgttctggtgcttattttcccttcctttttaggccatgatttctggagagcttgacattctcaaagactggtgctatgaagctacttacagccagctggcccaccccatccagcaggccaaggcactgggtctccagttccattctcgcatcctagacattgacaacgtcgacctggccatgggcaagatgatggagcaggggccggtgctgatcatcaccttccaggcacagctggtgatggtggtcaggaaccccaaaggcgaggtggtggagggtgacccggacaaggtgctgcggatgctgtacgtgtgggcgctctgccgagaccaggacgagctcaacccctacgcggcctggcggctcctggacatctcggcctccagcaccgagcagattctctgagtgtggtgccggagccaggtagccccggcctgggtcatcaggcacagaggcaccgcaacaccacctgcggcaactccagacctctgggaacaagactgcgggctctgcccccagctctgccaggacggctgcaagaccagctggcccgggaggggacaacgggctgttgcgggtgcgcggcagctggagacactcccccgcagggccaacccctgccctgttgctctgccctgcaggggtcccggcgcctggtcacctggggtgcacacaggtcacacagtgccaagaggccccagggcccagggactccccccacagcagggtgggacccgggacccgcggctcagtggcccgctagccacgtcagccaagccactttaggtccattttttaattttaacagtgctcttccatcttgtgcataagcctgagatttggaaagaataaaacaccgaattgcagaagagcagctacggagtctgaagtgtcttctctggcgcgggagtggccgaggcgatggtgggggtgggagcaggcggctgctgtgggaggcggtcaaggtcgagtgaggaactgcagccgcagtgggtggacgccttgcccagggctggaccctgcctcggtctccgccgctccaggggcgggtggggtgggctgagccggagcccgggccgccgccgccgccgccggggagaggccgaacgcgcagccggcgcgggtccctgagagagcgcggccgccgggcggtcggtccccgtccgggtcgaagccaggggcgcgcggcgatgtgagccatgagcgcgacgtggacgctgtcgccggagcccctgccgccgtcgacggggcccccggtgggcgcgggcctggacgcggagcagcgcacggtgttcgccttcgtgctctgcctgctcgtggtgctggtgctgttgatggtgcgctgcgtgcgcatcctgctcgacccctacagccgcatgcccgcctcgtcctggaccgaccacaaggaggcgctcgagcgcgggcagttcgactacgcgttggtgtgaggggcgcggcgccccctagccggccctgcgccggggtctcagagggccggcccggcggggggcgccgcgggggccaggactgcgctcaggatcccgccccggagcccccagcccgggggagagggggagggagttgggagaagcccagcccctcgccctcgagacccctcccatgtcccttcctggcctggccggagccccacctcgtgcctttatccgccctgtcccttcctctctgcgcatctcacccgcccggctggcccccacccccgactctgaatcccgggcgggaggaggacccccgcaccgccccctccccagcgtgtaagtggctctgctattgtgcgtccctggaagtggggacccccttgtccctcctccctcccctgttgtctggccgtcgtcaaccccaccttgactgagtgttgagcccgtccttgggctctggtccctgcggggcaggctctcccgggcccacggggcggacgctgcataccaatttgccctgcaccgcctgtcccggagacggagcccgaaggcctgccatggcggctgtgtcgaggatgcgtggcgcctgccgtggcgggacagcgtgggcaggctcatttctgcccccaacccgggccccaggacaggtcagcgcgccctgccccggtgcccaccgctgccccccatccgccctcctgccacttgcccctgacccccctgccgtgcctcccgcagccctcccatgccgttccactcctccctgcctctgagccgaacatgataataaaagctattattgagcgcttactgcatgccaagtagcgtgctgagttggcacctcctgtt

SEQ ID NO: 315508 - DNA, 2842 bp, Homo sapiens
gccagggagctgctggtgccctggaaacacagctgaagttccagccacgtccacagaagtctctcccctccgcggatcagtcatttccataaaaagtagatgctatcagaacatcttttctctcatggtttcatgccaagcccagagaaacctccagcgaaaacgtgtctcgggggctgcttcctgtgcctggcacaggcgcagggggttgagggtgacactgggggctggtcagtgacagaggcagcctcaggctgaggacagatcctagaagaggcgtttgatctcaggccaagattcagagtgcggcgaatatggaagtattaaagatcagccaaggggccgccagcttagccctgggagtagatttgggattttgttccaagagaatcacccactttgctgattaatcctgttttcattgggtcatctggatagagtgttgttcccaggagtgggaagcgtgtgatctgggccagtaagtgggtggcacctgcctccccacttggacctgggttcttggcctctgccattgctggctggcggcagggcacctgggcgccagggtgtgtgggcagcagctctgtgtggcgtggtgcccaccctgggtggcatcacgcaggcgtgtcggcctctcattgcagacttacagccagctggcccaccccatccagcaggccaaggcactgggtctccagttccattctcgcatcctagacattgacaacgtcgacctggccatgggcaagatgatggagcaggggccggtgctgatcatcaccttccaggcacagctggtgatggtggtcaggaaccccaaaggcgaggtggtggagggtgacccggacaaggtgctgcggatgctgtacgtgtgggcgctctgccgagaccaggacgagctcaacccctacgcggcctggcggctcctggacatctcggcctccagcaccgagcagattctctgagtgtggtgccggagccaggtagccccggcctgggtcatcaggcacagaggcaccgcaacaccacctgcggcaactccagacctctgggaacaagactgcgggctctgcccccagctctgccaggacggctgcaagaccagctggcccgggaggggacaacgggctgttgcgggtgcgcggcagctggagacactcccccgcagggccaacccctgccctgttgctctgccctgcaggggtcccggcgcctggtcacctggggtgcacacaggtcacacagtgccaagaggccccagggcccagggactccccccacagcagggtgggacccgggacccgcggctcagtggcccgctagccacgtcagccaagccactttaggtccattttttaattttaacagtgctcttccatcttgtgcataagcctgagatttggaaagaataaaacaccgaattgcagaagagcagctacggagtctgaagtgtcttctctggcgcgggagtggccgaggcgatggtgggggtgggagcaggcggctgctgtgggaggcggtcaaggtcgagtgaggaactgcagccgcagtgggtggacgccttgcccagggctggaccctgcctcggtctccgccgctccaggggcgggtggggtgggctgagccggagcccgggccgccgccgccgccgccggggagaggccgaacgcgcagccggcgcgggtccctgagagagcgcggccgccgggcggtcggtccccgtccgggtcgaagccaggggcgcgcggcgatgtgagccatgagcgcgacgtggacgctgtcgccggagcccctgccgccgtcgacggggcccccggtgggcgcgggcctggacgcggagcagcgcacggtgttcgccttcgtgctctgcctgctcgtggtgctggtgctgttgatggtgcgctgcgtgcgcatcctgctcgacccctacagccgcatgcccgcctcgtcctggaccgaccacaaggaggcgctcgagcgcgggcagttcgactacgcgttggtgtgaggggcgcggcgccccctagccggccctgcgccggggtctcagagggccggcccggcggggggcgccgcgggggccaggactgcgctcaggatcccgccccggagcccccagcccgggggagagggggagggagttgggagaagcccagcccctcgccctcgagacccctcccatgtcccttcctggcctggccggagccccacctcgtgcctttatccgccctgtcccttcctctctgcgcatctcacccgcccggctggcccccacccccgactctgaatcccgggcgggaggaggacccccgcaccgccccctccccagcgtgtaagtggctctgctattgtgcgtccctggaagtggggacccccttgtccctcctccctcccctgttgtctggccgtcgtcaaccccaccttgactgagtgttgagcccgtccttgggctctggtccctgcggggcaggctctcccgggcccacggggcggacgctgcataccaatttgccctgcaccgcctgtcccggagacggagcccgaaggcctgccatggcggctgtgtcgaggatgcgtggcgcctgccgtggcgggacagcgtgggcaggctcatttctgcccccaacccgggccccaggacaggtcagcgcgccctgccccggtgcccaccgctgccccccatccgccctcctgccacttgcccctgacccccctgccgtgcctcccgcagccctcccatgccgttccactcctccctgcctctgagccgaacatgataataaaagctattattgagcgcttactgcatgccaagtagcgtgctgagttggcacctcctgtt

SEQ ID NO: 315509 - DNA, 2163 bp, Homo sapiens
ttaccaaggctgagtggttcctgagtctaggcaattgtgctggcctctgctcccagcccctggggaagttgccggtggctcctgccccacagagcctggcccccccccagagctgcctgggtcacctcaaccctctcaacagtgcccttcccaccccaccctgcaggacaaggtgctgcggatgctgtacgtgtgggcgctctgccgagaccaggacgagctcaacccctacgcggcctggcggctcctggacatctcggcctccagcaccgagcagattctctgagtgtggtgccggagccaggtagccccggcctgggtcatcaggcacagaggcaccgcaacaccacctgcggcaactccagacctctgggaacaagactgcgggctctgcccccagctctgccaggacggctgcaagaccagctggcccgggaggggacaacgggctgttgcgggtgcgcggcagctggagacactcccccgcagggccaacccctgccctgttgctctgccctgcaggggtcccggcgcctggtcacctggggtgcacacaggtcacacagtgccaagaggccccagggcccagggactccccccacagcagggtgggacccgggacccgcggctcagtggcccgctagccacgtcagccaagccactttaggtccattttttaattttaacagtgctcttccatcttgtgcataagcctgagatttggaaagaataaaacaccgaattgcagaagagcagctacggagtctgaagtgtcttctctggcgcgggagtggccgaggcgatggtgggggtgggagcaggcggctgctgtgggaggcggtcaaggtcgagtgaggaactgcagccgcagtgggtggacgccttgcccagggctggaccctgcctcggtctccgccgctccaggggcgggtggggtgggctgagccggagcccgggccgccgccgccgccgccggggagaggccgaacgcgcagccggcgcgggtccctgagagagcgcggccgccgggcggtcggtccccgtccgggtcgaagccaggggcgcgcggcgatgtgagccatgagcgcgacgtggacgctgtcgccggagcccctgccgccgtcgacggggcccccggtgggcgcgggcctggacgcggagcagcgcacggtgttcgccttcgtgctctgcctgctcgtggtgctggtgctgttgatggtgcgctgcgtgcgcatcctgctcgacccctacagccgcatgcccgcctcgtcctggaccgaccacaaggaggcgctcgagcgcgggcagttcgactacgcgttggtgtgaggggcgcggcgccccctagccggccctgcgccggggtctcagagggccggcccggcggggggcgccgcgggggccaggactgcgctcaggatcccgccccggagcccccagcccgggggagagggggagggagttgggagaagcccagcccctcgccctcgagacccctcccatgtcccttcctggcctggccggagccccacctcgtgcctttatccgccctgtcccttcctctctgcgcatctcacccgcccggctggcccccacccccgactctgaatcccgggcgggaggaggacccccgcaccgccccctccccagcgtgtaagtggctctgctattgtgcgtccctggaagtggggacccccttgtccctcctccctcccctgttgtctggccgtcgtcaaccccaccttgactgagtgttgagcccgtccttgggctctggtccctgcggggcaggctctcccgggcccacggggcggacgctgcataccaatttgccctgcaccgcctgtcccggagacggagcccgaaggcctgccatggcggctgtgtcgaggatgcgtggcgcctgccgtggcgggacagcgtgggcaggctcatttctgcccccaacccgggccccaggacaggtcagcgcgccctgccccggtgcccaccgctgccccccatccgccctcctgccacttgcccctgacccccctgccgtgcctcccgcagccctcccatgccgttccactcctccctgcctctgagccgaacatgataataaaagctattattgagcgcttactgcatgccaagtagcgtgctgagttggcacctcctgtt

SEQ ID NO: 315510 - DNA, 1301 bp, Homo sapiens
aggaacagccgcggcggcccggctcgcgcgctgcttgcctgcctcggtctccgccgctccaggggcgggtggggtgggctgagccggagcccgggccgccgccgccgccgccggggagaggccgaacgcgcagccggcgcgggtccctgagagagcgcggccgccgggcggtcggtccccgtccgggtcgaagccaggggcgcgcggcgatgtgagccatgagcgcgacgtggacgctgtcgccggagcccctgccgccgtcgacggggcccccggtgggcgcgggcctggacgcggagcagcgcacggtgttcgccttcgtgctctgcctgctcgtggtgctggtgctgttgatggtgcgctgcgtgcgcatcctgctcgacccctacagccgcatgcccgcctcgtcctggaccgaccacaaggaggcgctcgagcgcgggcagttcgactacgcgttggtgtgaggggcgcggcgccccctagccggccctgcgccggggtctcagagggccggcccggcggggggcgccgcgggggccaggactgcgctcaggatcccgccccggagcccccagcccgggggagagggggagggagttgggagaagcccagcccctcgccctcgagacccctcccatgtcccttcctggcctggccggagccccacctcgtgcctttatccgccctgtcccttcctctctgcgcatctcacccgcccggctggcccccacccccgactctgaatcccgggcgggaggaggacccccgcaccgccccctccccagcgtgtaagtggctctgctattgtgcgtccctggaagtggggacccccttgtccctcctccctcccctgttgtctggccgtcgtcaaccccaccttgactgagtgttgagcccgtccttgggctctggtccctgcggggcaggctctcccgggcccacggggcggacgctgcataccaatttgccctgcaccgcctgtcccggagacggagcccgaaggcctgccatggcggctgtgtcgaggatgcgtggcgcctgccgtggcgggacagcgtgggcaggctcatttctgcccccaacccgggccccaggacaggtcagcgcgccctgccccggtgcccaccgctgccccccatccgccctcctgccacttgcccctgacccccctgccgtgcctcccgcagccctcccatgccgttccactcctccctgcctctgagccgaacatgataataaaagctattattgagcgcttactgcatgccaagtagcgtgctgagttggcacctcctgtt

SEQ ID NO: 315511 - DNA, 1342 bp, Homo sapiens
cggctctcagcgcccccacctgcgcgcacggccagagttgggtccccgcgtggtggtggcggcgatccggcgggccgggcatgggcgtagcccggggaccgaggcgcgggcgggggatggggtcgggcacgttaagggaggcggcggcggcggcggcaggagggggcgaagcggaggaggcgcgggagggagggcgcagcctcatccccggcgcccggggcgggtcccctcctccgcagggcgcgcggcgatgtgagccatgagcgcgacgtggacgctgtcgccggagcccctgccgccgtcgacggggcccccggtgggcgcgggcctggacgcggagcagcgcacggtgttcgccttcgtgctctgcctgctcgtggtgctggtgctgttgatggtgcgctgcgtgcgcatcctgctcgacccctacagccgcatgcccgcctcgtcctggaccgaccacaaggaggcgctcgagcgcgggcagttcgactacgcgttggtgtgaggggcgcggcgccccctagccggccctgcgccggggtctcagagggccggcccggcggggggcgccgcgggggccaggactgcgctcaggatcccgccccggagcccccagcccgggggagagggggagggagttgggagaagcccagcccctcgccctcgagacccctcccatgtcccttcctggcctggccggagccccacctcgtgcctttatccgccctgtcccttcctctctgcgcatctcacccgcccggctggcccccacccccgactctgaatcccgggcgggaggaggacccccgcaccgccccctccccagcgtgtaagtggctctgctattgtgcgtccctggaagtggggacccccttgtccctcctccctcccctgttgtctggccgtcgtcaaccccaccttgactgagtgttgagcccgtccttgggctctggtccctgcggggcaggctctcccgggcccacggggcggacgctgcataccaatttgccctgcaccgcctgtcccggagacggagcccgaaggcctgccatggcggctgtgtcgaggatgcgtggcgcctgccgtggcgggacagcgtgggcaggctcatttctgcccccaacccgggccccaggacaggtcagcgcgccctgccccggtgcccaccgctgccccccatccgccctcctgccacttgcccctgacccccctgccgtgcctcccgcagccctcccatgccgttccactcctccctgcctctgagccgaacatgataataaaagctattattgagcgcttactgcatgccaagtagcgtgctgagttggcacctcctgtt

SEQ ID NO: 315512 - DNA, 1006 bp, Homo sapiens
  misc_feature (6)..(6): n is a, c, g, or t
aagcanaacctgtggcttaagactgggtgaaactcgcttggaagctggacactggcggacccggcctgctccctggtaagaaggttgcattgactgtggcccggtgcccgaagagggcttctccttgttcttggatagggtgcacattcgcgtggcctccgtttaagctgccaactagatcctctccttttttcgtgttttctttggagaagtccaaggaggtatccaaggaggaggatagagatgttatctttctctcggtctctcccatggaggggacggtggtcacaggctcgtgccgaattcggcacgagctaggccgaagcggcggatgacgcaaccgggccgcgccgcgagaaggtcacacgattctccaacatggcggcggcggccctgcggagtggctggtgccgctgtccacggagatgcctcggcagtggaatccaatttctttccagccacaacctaccccatgggtcgacctatcagatgcgccggccgggcggagagctgccactgtccaaatcatattcttctggaaacagaaaaggctttctgtccggcttgctagataatgtcaaacaagaattagccaaaaacaaagaaatgaaagaaagtataaaaaaattccgtgacgaggccagaaggctagaagaatcagacgtgctccaggaggccagaaggaaatacaaaaccatcgagtcagaaaccgtgcggacgagcgaggtgctacggaagaagcttggggagctgacgggcaccgtgaaggagagccttcacgaagtcagtaaaagtgatctcggccggaaaatcaaggagggcgtggaggaagcagccaagacggccaagcagtcggccgagtcggtatccaaaggcggggagaagctgggcaggacagcggccttcagagccctctcccagttatgactccctaaagcccatgtcgaagcccccatcgctgggtcaatagtacttgccgcagtacttttaaaactaggcggctata

SEQ ID NO: 315513 - DNA, 3614 bp, Homo sapiens
  misc_feature (6)..(6): n is a, c, g, or t
aagcanaacctgtggcttaagactgggtgaaactcgcttggaagctggacactggcggacccggcctgctccctggtaagaaggttgcattgactgtggcccggtgcccgaagagggcttctccttgttcttggatagggtgcacattcgcgtggcctccgtttaagctgccaactagatcctctccttttttcgtgttttctttggagaagtccaaggaggtatccaaggaggaggatagagatgttatctttctctcggtctctcccatggaggggacggtggtcacaggctcgtgccgaattcggcacgagctaggccgaagcggcggatgacgcaaccgggccgcgccgcgagaaggtcacacgattctccaacatggcggcggcggccctgcggagtggctggtgccgctgtccacggagatgcctcggcagtggaatccaatttctttccagccacaacctaccccatgggtcgacctatcagatgcgccggccgggcggagagctgccactgtccaaatcatattcttctggaaacagaaaaggctttctgtccggcttgctagataatgtcaaacaagaattagccaaaaacaaagaaatgaaagaaagtataaaaaaattccgtgacgaggccagaaggctagaagaatcagacgtgctccaggaggccagaaggaaatacaaaaccatcgagtcagaaaccgtgcggacgagcgaggtgctacggaagaagcttggggagctgacgggcaccgtgaaggagagccttcacgaagtcagtaaaagtgatctcggccggaaaatcaaggagggcgtggaggaagcagccaagacggccaagcagtcggccgagtcggtatccaaaggcggggagaagctgggcaggacagcggccttcagagccctctcccagggggtggagtccgtgaagaaggaaattgacgacagcgtcctgggacagaccgggccctaccggaggccccagcgactccggaagagaacggagtttgcgggagataagttcaaggaggagaaagtgtttgagccaaacgaggaggccctgggggtcgtgctgcacaaggactccaagtggtaccagcagtggaaggacttcaaggagaacaacgtggtgtttaaccggttcttcgagatgaagatgaagtatgacgaaagcgacaacgcgttcatccgggcatcccgggcccttacggacaaggtcaccgacttgctggggggcctgttctccaagacagagatgtcggaggtgctcacggagatcctccgggtggacccggcctttgacaaggaccggtttctgaaacagtgcgagaacgacatcatccccaatgtcctggaggccatgatttctggagagcttgacattctcaaagactggtgctatgaagctacttacagccagctggcccaccccatccagcaggccaaggcactgggtctccagttccattctcgcatcctagacattgacaacgtcgacctggccatgggcaagatgatggagcaggggccggtgctgatcatcaccttccaggcacagctggtgatggtggtcaggaaccccaaaggcgaggtggtggagggtgacccggacaaggtgctgcggatgctgtacgtgtgggcgctctgccgagaccaggacgagctcaacccctacgcggcctggcggctcctggacatctcggcctccagcaccgagcagattctctgagtgtggtgccggagccaggtagccccggcctgggtcatcaggcacagaggcaccgcaacaccacctgcggcaactccagacctctgggaacaagactgcgggctctgcccccagctctgccaggacggctgcaagaccagctggcccgggaggggacaacgggctgttgcgggtgcgcggcagctggagacactcccccgcagggccaacccctgccctgttgctctgccctgcaggggtcccggcgcctggtcacctggggtgcacacaggtcacacagtgccaagaggccccagggcccagggactccccccacagcagggtgggacccgggacccgcggctcagtggcccgctagccacgtcagccaagccactttaggtccattttttaattttaacagtgctcttccatcttgtgcataagcctgagatttggaaagaataaaacaccgaattgcagaagagcagctacggagtctgaagtgtcttctctggcgcgggagtggccgaggcgatggtgggggtgggagcaggcggctgctgtgggaggcggtcaaggtcgagtgaggaactgcagccgcagtgggtggacgccttgcccagggctggaccctgcctcggtctccgccgctccaggggcgggtggggtgggctgagccggagcccgggccgccgccgccgccgccggggagaggccgaacgcgcagccggcgcgggtccctgagagagcgcggccgccgggcggtcggtccccgtccgggtcgaagccaggggcgcgcggcgatgtgagccatgagcgcgacgtggacgctgtcgccggagcccctgccgccgtcgacggggcccccggtgggcgcgggcctggacgcggagcagcgcacggtgttcgccttcgtgctctgcctgctcgtggtgctggtgctgttgatggtgcgctgcgtgcgcatcctgctcgacccctacagccgcatgcccgcctcgtcctggaccgaccacaaggaggcgctcgagcgcgggcagttcgactacgcgttggtgtgaggggcgcggcgccccctagccggccctgcgccggggtctcagagggccggcccggcggggggcgccgcgggggccaggactgcgctcaggatcccgccccggagcccccagcccgggggagagggggagggagttgggagaagcccagcccctcgccctcgagacccctcccatgtcccttcctggcctggccggagccccacctcgtgcctttatccgccctgtcccttcctctctgcgcatctcacccgcccggctggcccccacccccgactctgaatcccgggcgggaggaggacccccgcaccgccccctccccagcgtgtaagtggctctgctattgtgcgtccctggaagtggggacccccttgtccctcctccctcccctgttgtctggccgtcgtcaaccccaccttgactgagtgttgagcccgtccttgggctctggtccctgcggggcaggctctcccgggcccacggggcggacgctgcataccaatttgccctgcaccgcctgtcccggagacggagcccgaaggcctgccatggcggctgtgtcgaggatgcgtggcgcctgccgtggcgggacagcgtgggcaggctcatttctgcccccaacccgggccccaggacaggtcagcgcgccctgccccggtgcccaccgctgccccccatccgccctcctgccacttgcccctgacccccctgccgtgcctcccgcagccctcccatgccgttccactcctccctgcctctgagccgaacatgataataaaagctattattgagcgcttactgcatgccaagtagcgtgctgagttggcacctcctgtt

SEQ ID NO: 315514 - DNA, 2755 bp, Homo sapiens
gcttttctcaggcttgcgcggctctaggccgaagcggcggatgacgcaaccgggccgcgccgcgagaaggtcacacgattctccaacatggcggcggcggccctgcggagtggctggtgccgctgtccacggagatgcctcggcagtggaatccaatttctttccagccacaacctaccccatgggtcgacctatcagatgcgccggccgggcggagagctgccactgtccaaatcatattcttctggaaacagaaaaggctttctgtccggcttgctagataatgtcaaacaagaattagccaaaaacaaagaaatgaaagaaagtataaaaaaattccgtgacgaggccagaaggctagaagaatcagacgtgctccaggaggccagaaggaaatacaaaaccatcgagtcagaaaccgtgcggacgagcgaggtgctacggaagaagcttggggagctgacgggcaccgtgaaggagagccttcacgaagtcagtaaaagtgatctcggccggaaaatcaaggagggcgtggaggaagcagccaagacggccaagcagtcggccgagtcggtatccaaaggcggggagaagctgggcaggacagcggccttcagagccctctcccagggggtggagtccgtgaagaaggaaattgacgacagcgtcctgggacagaccgggccctaccggaggccccagcgactccggaagagaacggagtttgcgggagataagttcaaggaggagaaagtgtttgagccaaacgaggaggccctgggggtcgtgctgcacaaggactccaagtggtaccagcagtggaaggacttcaaggagaacaacgtggtgtttaaccggttcttcgagatgaagatgaagtatgacgaaagcgacaacgcgttcatccgggcatcccgggcccttacggacaaggtcaccgacttgctggggggcctgttctccaagacagagatgtcggaggtgctcacggagatcctccgggtggacccggcctttgacaaggaccggtttctgaaacagtgcgagaacgacatcatccccaatgtcctggaggccatgatttctggagagcttgacattctcaaagactggtgctatgaagctacttacagccagctggcccaccccatccagcaggccaaggcactgggtctccagttccattctcgcatcctagacattgacaacgtcgacctggccatgggcaagatgatggagcaggggccggtgctgatcatcaccttccaggcacagctggtgatggtggtcaggaaccccaaaggcgaggtggtggagggtgacccggacaaggtgctgcggatgctgtacgtgtgggcgctctgccgagaccaggacgagctcaacccctacgcggcctggcggctcctggacatctcggcctccagcaccgagcagattctctgagtgtggtgccggagccaggtagccccggcctgggtcatcaggcacagaggcaccgcaacaccacctgcggcaactccagacctctgggaacaagactgcgggctctgcccccagctctgccaggacggctgcaagaccagctggcccgggaggggacaacgggctgttgcgggtgcgcggcagctggagacactcccccgcagggccaacccctgccctgttgctctgccctgcaggggtcccggcgcctggtcacctggggtgcacacaggtcacacagtgccaagaggccccagggcccagggactccccccacagcagggtgggacccgggacccgcggctcagtggcccgctagccacgtcagccaagccactttaggtccattttttaattttaacagtgctcttccatcttgtgcataagcctgagatttggaaagaataaaacaccgaattgcagaagagcagctacggagtctgaagtgtcttctctggcgcgggagtggccgaggcgatggtgggggtgggagcaggcggctgctgtgggaggcggtcaaggtcgagtgaggaactgcagccgcagtgggtggacgccttgcccagggctggaccctgcctcggtctccgccgctccaggggcgggtggggtgggctgagccggagcccgggccgccgccgccgccgccggggagaggccgaacgcgcagccggcgcgggtccctgagagagcgcggccgccgggcggtcggtccccgtccgggtcgaagccaggggcgcgcggcgatgtgagccatgagcgcgacgtggacgctgtcgccggagcccctgccgccgtcgacggggcccccggtgggcgcgggcctggacgcggagcagcgcacggtgttcgccttcgtgctctgcctgctcgtggtgctggtgctgttgatggtgcgctgcgtgcgcatcctgctcgacccctacagccgcatgcccgcctcgtcctggaccgaccacaaggaggcgctcgagcgcgggcagttcgactacgcgttggtgtgaggggcgcggcgccccctagccggccctgcgccggggtgatccagggaccggtccgggcgaggcggcggcgttgtggtgggtgactgagcctcaggattgagcaccgagagctctccacggagggcatcatgatggtgaagctaggctaccatatgcgctgtgtaacacagattctcctctgccgctatgtggacattggcatcccatgcaaccaacaagggagctcactcagtggcgtttaatgtggtggatgcgtggctcgggaa

SEQ ID NO: 315515 - DNA, 1312 bp, Homo sapiens
gcttttctcaggcttgcgcggctctaggccgaagcggcggatgacgcaaccgggccgcgccgcgagaaggtcacacgattctccaacatggcggcggcggccctgcggagtggctggtgccgctgtccacggagatgcctcggcagtggaatccaatttctttccagccacaacctaccccatgggtcgacctatcagatgcgccggccgggcggagagctgccactgtccaaatcatattcttctggaaacagaaaaggctttctgtccggcttgctagataatgtcaaacaagaattagccaaaaacaaagaaatgaaagaaagtataaaaaaattccgtgacgaggccagaaggctagaagaatcagacgtgctccaggaggccagaaggaaatacaaaaccatcgagtcagaaaccgtgcggacgagcgaggtgctacggaagaagcttggggagctgacgggcaccgtgaaggagagccttcacgaagtcagtaaaagtgatctcggccggaaaatcaaggagggcgtggaggaagcagccaagacggccaagcagtcggccgagtcggtatccaaaggcggggagaagctgggcaggacagcggccttcagagccctctcccagggggtggagtccgtgaagaaggaaattgacgacagcgtcctgggacagaccgggccctaccggaggccccagcgactccggaagagaacggagtttgcgggagataagttcaaggaggagaaagtgtttgagccaaacgaggaggccctgggggtcgtgctgcacaaggactccaagtggtaccagcagtggaaggacttcaaggagaacaacgtggtgtttaaccggttcttcgagatgaagatgaagtatgacgaaagcgacaacgcgttcatccgggcatcccgggcccttacggacaaggtcaccgacttgctggggggcctgttctccaagacagagatgtcggaggtgctcacggagatcctccgggtggacccggcctttgacaaggaccggtttctgaaacagtgcgagaacgacatcatccccaatgtcctggaggtgggtgccacacccccaggacccctcccaggcggcaggtcctggctccaccacctcccccgccgcagccggcaccctgggtgctgccagggaactctgctgccgaggctgttttctgaggaggctggttgcacacgggctcctgcccggctgcagctgccccatgagctgtgcccgaagcccttcctgggccttaccggcacctccggtacctccaggtctgtttccctcactcctc

SEQ ID NO: 315516 - DNA, 3136 bp, Homo sapiens
gcagcccccaggatgcaggaggagcctggacaccttcggcccagtcgggccaggcctctggaaggcccttcatgggactctccatccttggccccgccggcctccgcccaacgtcctcttcctcctccagtttcccgtatccttcccgccacttcgggcagggctgggaggtggtgcggatgggcgccatgccccaaaacagcagcctgagcaccgcagtgccttccgggatgggtgatgggtgccaagtgttctggccacccgccccctgccgctcacagctttcaccaccagcatccggctccttcccgctcttctccccgctccaggcacctccctccccctcatcggatccggcccaggctccaggatcctgtggaagcagctcccagcccaggcacgccccctgcagcccacccctccctctcgctgcccccagcagttaggaggcagccggtcccatggtgggccttgcagtccgaaatgtggtcccctggggggacagaggacatgggctcactgcgggagccggagttgggtcctcatctccctggcttggattcctgaccaggctgaaagctgggtccccagccacctttctcttcctccaccaggttccaggggggtccccctgtggggtgcctcctgggtggtcgcccgcaggccgccctccgcctgtgcctaggccagagccaggcactgacaccagcagggacgggcctgggggggacacccagtgccacagctccacccgcgccccacaggtggcagccgggggtgtctgaggaaactccccaccccgcaccactggagaatgttcccaggacctcgcctgctgcctgaaaagcccactctcgttctggtgcttattttcccttcctttttaggccatgatttctggagagcttgacattctcaaagactggtgctatgaagctacttacagccagctggcccaccccatccagcaggccaaggcactgggtctccagttccattctcgcatcctagacattgacaacgtcgacctggccatgggcaagatgatggagcaggggccggtgctgatcatcaccttccaggcacagctggtgatggtggtcaggaaccccaaaggcgaggtggtggagggtgacccggacaaggtgctgcggatgctgtacgtgtgggcgctctgccgagaccaggacgagctcaacccctacgcggcctggcggctcctggacatctcggcctccagcaccgagcagattctctgagtgtggtgccggagccaggtagccccggcctgggtcatcaggcacagaggcaccgcaacaccacctgcggcaactccagacctctgggaacaagactgcgggctctgcccccagctctgccaggacggctgcaagaccagctggcccgggaggggacaacgggctgttgcgggtgcgcggcagctggagacactcccccgcagggccaacccctgccctgttgctctgccctgcaggggtcccggcgcctggtcacctggggtgcacacaggtcacacagtgccaagaggccccagggcccagggactccccccacagcagggtgggacccgggacccgcggctcagtggcccgctagccacgtcagccaagccactttaggtccattttttaattttaacagtgctcttccatcttgtgcataagcctgagatttggaaagaataaaacaccgaattgcagaagagcagctacggagtctgaagtgtcttctctggcgcgggagtggccgaggcgatggtgggggtgggagcaggcggctgctgtgggaggcggtcaaggtcgagtgaggaactgcagccgcagtgggtggacgccttgcccagggctggaccctgcctcggtctccgccgctccaggggcgggtggggtgggctgagccggagcccgggccgccgccgccgccgccggggagaggccgaacgcgcagccggcgcgggtccctgagagagcgcggccgccgggcggtcggtccccgtccgggtcgaagccaggggcgcgcggcgatgtgagccatgagcgcgacgtggacgctgtcgccggagcccctgccgccgtcgacggggcccccggtgggcgcgggcctggacgcggagcagcgcacggtgttcgccttcgtgctctgcctgctcgtggtgctggtgctgttgatggtgcgctgcgtgcgcatcctgctcgacccctacagccgcatgcccgcctcgtcctggaccgaccacaaggaggcgctcgagcgcgggcagttcgactacgcgttggtgtgaggggcgcggcgccccctagccggccctgcgccggggtctcagagggccggcccggcggggggcgccgcgggggccaggactgcgctcaggatcccgccccggagcccccagcccgggggagagggggagggagttgggagaagcccagcccctcgccctcgagacccctcccatgtcccttcctggcctggccggagccccacctcgtgcctttatccgccctgtcccttcctctctgcgcatctcacccgcccggctggcccccacccccgactctgaatcccgggcgggaggaggacccccgcaccgccccctccccagcgtgtaagtggctctgctattgtgcgtccctggaagtggggacccccttgtccctcctccctcccctgttgtctggccgtcgtcaaccccaccttgactgagtgttgagcccgtccttgggctctggtccctgcggggcaggctctcccgggcccacggggcggacgctgcataccaatttgccctgcaccgcctgtcccggagacggagcccgaaggcctgccatggcggctgtgtcgaggatgcgtggcgcctgccgtggcgggacagcgtgggcaggctcatttctgcccccaacccgggccccaggacaggtcagcgcgccctgccccggtgcccaccgctgccccccatccgccctcctgccacttgcccctgacccccctgccgtgcctcccgcagccctcccatgccgttccactcctccctgcctctgagccgaacatgataataaaagctattattgagcgcttactgcatgccaagtagcgtgctgagttggcacctcctgtt

SEQ ID NO: 315517 - DNA, 547 bp, Homo sapiens
cgcagcttgttggctcgctatataaaggagagaagcgggcggaccggacggctggagctgcagccggtggcggcagcggcggcgcagggagcggtgaccggtggtggtttccctccttggcgcggggtggggagcgggcaacgccccccggacccctgaagggtcgtggctttttttttttttttaaggcgattctcgaggttttcagctgcgggaggagtgcccccctcctcctcctctctccgctctcccctactccttcaggattgattttgtttaaaattttttccccaatcttgcggtgatttgggtcaccctccgggtgttaatagtttttttttttttggttttgtttttatcttgttttcttggggttgccccctcttgtttgtgttgtgtgtggaaatggcgaactcggcaaatacaaacaccgtggtaaggacgtggttcggtggccggcgggggcttcgttcaggctgcagcaacggccggaccgggcgggggcggggacggcggcgactcccggcctcgactcttcagccgcccg

SEQ ID NO: 315518 - DNA, 3701 bp, Homo sapiens
cgcagcttgttggctcgctatataaaggagagaagcgggcggaccggacggctggagctgcagccggtggcggcagcggcggcgcagggagcggtgaccggtggtggtttccctccttggcgcggggtggggagcgggcaacgccccccggacccctgaagggtcgtggctttttttttttttttaaggcgattctcgaggttttcagctgcgggaggagtgcccccctcctcctcctctctccgctctcccctactccttcaggattgattttgtttaaaattttttccccaatcttgcggtgatttgggtcaccctccgggtgttaatagtttttttttttttggttttgtttttatcttgttttcttggggttgccccctcttgtttgtgttgtgtgtggaaatggcgaactcggcaaatacaaacaccgtgcctaaattatacagatctgtgattgaagatgtcattaatgatgtgagagacatctttctggatgatggagtggatgaacaagtactgatggaactaaaaactttatgggaaaacaaactaatgcagtccagggcagtagatggatttcattcagaagagcagcagcttctactgcaagttcaacagcagcatcaaccccagcagcagcagcatcaccaccatcaccatcatcagcaagctcagcctcagcagacagtacctcagcaagcgcagacccagcaggttcttattcctgcatcacagcaagccacagcaccacaagttattgttccagattctaagttgatacagcatatgaatgcatcaaacatgagtgctgctgctacagctgctaccttagcactccctgcaggtgtgactcctgttcagcagatattaacaaattcaggccagcttcttcaggtggtcagagcagccaatggtgcccaatatatctttcagcctcagcagtcagtggttctacaacaacaggttataccacaaatgcagcctggtggagtacaagctcctgttatacagcaggtgctggctcctcttcctggagggatttcaccacagacaggtgtcatcatccagcctcagcaaatcttatttacaggaaataagactcaagttatacctacgacagtggcagcacctacaccagcccaagcacagataactgcaactggccagcagcaaccgcaggcccagcctgctcaaacacaagctccattggtcttacaagttgatggaactggggatacatcatctgaagaagatgaagatgaagaagaagactatgatgatgatgaggaggaagacaaagagaaagatggagctgaagatgggcaggtggaagaagagcccctcaatagtgaagatgatgtgagtgatgaggaaggacaggaactctttgacacagaaaatgttgttgtatgccaatatgataagatacacagaagtaaaaacaaatggaaatttcatctcaaggatggcattatgaatcttaatggaagagattatatattttccaaagccattggagatgcagaatggtgaagagttgctttttttcttttataaataaaagaaacttaaaaaaaatgtaaagcggacagtttgaaacttggggcatatgccaaccaaaacttcgtttctgcatgtcagaaaagtgcagtagaagcaaagctatgaaacttggattactgtatgatattcagcttgtcttgggccctctatgtagacaaacattcatattcatagtagtgttgtatactggcctgtttttataactttatttttcaaatattaacaaccactgctttcagagtggttattttgttatttttgaagcaggaaataaccatttgtatttgcacctgcgtattgcatatgaattatggtatacttggcaaatgcttttcttttacctgtgaaaattctgaaagctggtccaagctacattgcataccaaattgtgctcttatatattatttgcatcgtgtcctttttaatcaaatagcatgttttagttttattatagtagcttttgctgtaagaatgtcacttgcttatcttttattgtacttgaattcttaatcatgcttttaacattgtatttaacaaatcatttcgtattaggttccattaaaatgtcattcctttgaaaaggcaagggatttccactttcagaatttgaaaatgaaagtagcatgtttatctaaaggcagaaaatagttcggacttggtattatgaaaataagtaatggtttctggagaggatttgtttagatttgcacagatggcgatggcaccttttacttaaattaacattaatcaacagtgctaaggaaaatttacacaaaattacaagataaaacatggaaatgtgtgcctttcagtatacaaactcttgcttggtggccatttgggtaatcagaccatttgaatgcctgagagcatgtttaatttctgtggagtgccacatatggctaaaacaactctttaatgtgcaattaatttctagagtaaaatgtctgttatgtgagggggatctttatgttgggcttttctattttttaaatgttcacatttctttctgttaattaaaatgccatcataatgtcacatttacactgttgcctcttttaaaagcaaagccactttcttgttctaagattacatcaagacttgagcagtgtgtagtaattaaaatgtgtgcttaatgagcataatagattctggttttaggaaataacatatagcttttatatgaatattttcttttgctataatgaaagtcacagattttttttttcctggcttttatggaggaatgaaaagagttgtctccctctaagagtatactatttttgattctcatagcaataatgtcaccattcttatcagagggtaaataccccttgtataggaaaacagacataatttcctcttgggagttctctttatgacttagcattttcttctacttgagaaaattcctgtttttccgattatttcatcttgaactttcttttttttaagcttttgtgcaatgtaatagtttgttgatccatctttgtacattttcattttatttcatgtctttctctcacctacctgtcagaatcagctatagcagattttgaattctttagttaaaaaatagttgctttacttgtttcctcatgagtttgttaaatagctttgcattttagtcctctattatgctatgaaaattattacgaagtttatattgttccctttttaagcctgccttactcttgtcttttgtcattgtctatggtttaatgaagaacacaccaaactaacatttttgtttattttgaggaacaaaaaaacttttctcttttaagggaagttactacacattgagttagtaactactctttcagtcaaggttccttaatcagtccagtctacatcaggactatgacttggggggcggggctaatcctttttgctgttctgagctactattgtcaactgctgttgtacatactgttatgtgtaatggcgtaaatatatttattatgtttgtaaaattcattgcagatcaaggttgctcttctgtgatatatgggatattatgttttaaagaccatcttggaatacaattagagaacttagtattttgatgtactaagacctattttaagtttaatattctactttgcaaaaactttaattaaagatgttattta

SEQ ID NO: 315519 - DNA, 4546 bp, Homo sapiens
tggggttttgtgtaggaaaaccataattgttgattttaaatacaggtacctgccaccggtaattagcatgtaaagctttgtctatattccttcctccaacttgggttcaatcagaagatacttgttggaatgaactgaagaaacttcccttttgatagattgaactgaaactgcttattgtatgtggttatatttggtaaaagttgcgtgtgagctttttacaaaagggtaagaattgtgttgaattttaattcacttgtataagaaaacaatttaaaactctcataataggtcttaaatatttttacttgctattctccctcagtgatatatacctcttcctttccagctttatgaaacatctatttaagatttaaagttatcagtgatcatagtttggagataaaatttgacccaggaatgaatatttattttaattaggttttcatacttattaaatgtaattaaagacttgggtcttgtctgagttcagtggaattgaaaccacaactttaatttccttacagaaaaacttaatttgtttcttttagtgccacaccttaaaaagaaaccccaaactagctcctcaggaatatagttttattttgcaagcataccatctagctgaaattgtatacacatgaatatatgtagacttttcctgttgggctgaagtgtgtgcttataaatgtgtttagtttttaagctaaacattcagttaacagtctgtgcattgattagcatagggcaggtggtgaggacctggatttttattaaacagtttagtaattataaaagtttcttgtgtttactagtaaagaattttaaaaatctattctaattcaacaagtttttaaaatcaactttgtaatttgaggggaaaatttggggggaagaggtgggtgggccactaagttacctctctttcatttggtggcccttccaggccattgaaaataaagacgttggctccagtttgcacattgggaagaaagcatagaaatttgacttgtatattaaaaataatagaaatgtaatatgtatattaagaatgcataggtctgtattctgtaaggggctctgaagaacaatatggcactgctgtgttcagtgtgaattcactgcctgggagaactgcaggaatgcttgtcttcaccattgtgttcttacaacgaattcaactttccatggtttatcttgacaaaatttacatgtgtttaggttacttgtatattgatatatttttttaatcttcagtttttgtcttccttttgcctttgtgttttcagaagtaacacatgaacactttttaaagtacattacagagaagaaaactgtgagctattatatagtgtttcttttttaacacaaatcttttaactttaaaaaaaggcaaaaatttttttttctacttcccacccagcttaccaccttgatctctttaacttatgttctaaactttggtgttaatggtggtgtctagcatgctagtagttagattttatttagatgccataactggtaatacagcttttattttgactatattaatttagtttttgaggggaagtttgtttattctgtgactctcaaagcacacagaggttttaaaatatatattattaagactgagagaagaggaaatgggagggagtaacatcacagaagtgctgttgttcaactgttcttcaatatagttgctagtaggtttgtatttactcagtaaggaagtcagtgacctgaactacctataaaaattcagcagtgctgcagtgttgcttaagtgaaaccctttggctatctagtagtttttatgctactgaaacttggattactgtatgatattcagcttgtcttgggccctctatgtagacaaacattcatattcatagtagtgttgtatactggcctgtttttataactttatttttcaaatattaacaaccactgctttcagagtggttattttgttatttttgaagcaggaaataaccatttgtatttgcacctgcgtattgcatatgaattatggtatacttggcaaatgcttttcttttacctgtgaaaattctgaaagctggtccaagctacattgcataccaaattgtgctcttatatattatttgcatcgtgtcctttttaatcaaatagcatgttttagttttattatagtagcttttgctgtaagaatgtcacttgcttatcttttattgtacttgaattcttaatcatgcttttaacattgtatttaacaaatcatttcgtattaggttccattaaaatgtcattcctttgaaaaggcaagggatttccactttcagaatttgaaaatgaaagtagcatgtttatctaaaggcagaaaatagttcggacttggtattatgaaaataagtaatggtttctggagaggatttgtttagatttgcacagatggcgatggcaccttttacttaaattaacattaatcaacagtgctaaggaaaatttacacaaaattacaagataaaacatggaaatgtgtgcctttcagtatacaaactcttgcttggtggccatttgggtaatcagaccatttgaatgcctgagagcatgtttaatttctgtggagtgccacatatggctaaaacaactctttaatgtgcaattaatttctagagtaaaatgtctgttatgtgagggggatctttatgttgggcttttctattttttaaatgttcacatttctttctgttaattaaaatgccatcataatgtcacatttacactgttgcctcttttaaaagcaaagccactttcttgttctaagattacatcaagacttgagcagtgtgtagtaattaaaatgtgtgcttaatgagcataatagattctggttttaggaaataacatatagcttttatatgaatattttcttttgctataatgaaagtcacagattttttttttcctggcttttatggaggaatgaaaagagttgtctccctctaagagtatactatttttgattctcatagcaataatgtcaccattcttatcagagggtaaataccccttgtataggaaaacagacataatttcctcttgggagttctctttatgacttagcattttcttctacttgagaaaattcctgtttttccgattatttcatcttgaactttcttttttttaagcttttgtgcaatgtaatagtttgttgatccatctttgtacattttcattttatttcatgtctttctctcacctacctgtcagaatcagctatagcagattttgaattctttagttaaaaaatagttgctttacttgtttcctcatgagtttgttaaatagctttgcattttagtcctctattatgctatgaaaattattacgaagtttatattgttccctttttaagcctgccttactcttgtcttttgtcattgtctatggtttaatgaagaacacaccaaactaacatttttgtttattttgaggaacaaaaaaacttttctcttttaagggaagttactacacattgagttagtaactactctttcagtcaaggttccttaatcagtccagtctacatcaggactatgacttggggggcggggctaatcctttttgctgttctgagctactattgtcaactgctgttgtacatactgttatgtgtaatggcgtaaatatatttattatgtttgtaaaattcattgcagatcaaggttgctcttctgtgatatatgggatattatgttttaaagaccatcttggaatacaattagagaacttagtattttgatgtactaagacctattttaagtttaatattctactttgcaaaaactttaattaaagatgttatttaaaaaaaaatgttgcttgctttgcttactagtatatggcattgttatagataattgaataaaatacaatttagaaaggaaaatgctttacattgttaatgagaattccatttaacaacaacaaaaagatgctaaattctgtaccttaaagataagtagattgagatgtcaatttgaattagtaaactgtgttacaaatgattaatactagcttttaaaaagttgtattttccaggcacacaggaatttaggttgggcgaattcacactaacaaattataactaaaaattggtataattaacattgtttttcaaaataaagattactccttgtgaaatattaataattaacatattgtattaaataagtatttctactccaaagtatagattacttaggataaaaacattgttatttctctgtttagtcaaaccacttcctcttagttcagaggttataaataattgcatattaggagaattggattactgaggtttgtattgcgtattgaatatattttgtgttattttagaagataataattagcaggtattttaattttatagttaattcagctgaatcattaagaagctcgcctttttgtatttttttatcctgttaacagactatctagaaaacatgcaaattttaactattaacataatcataataaagatatcttatttattgccagc

SEQ ID NO: 315520 - DNA, 3853 bp, Homo sapiens
tggggttttgtgtaggaaaaccataattgttgattttaaatacaggtacctgccaccggtaattagcatgtaaagctttgtctatattccttcctccaacttgggttcaatcagaagatacttgttggaatgaactgaagaaacttcccttttgatagattgaactgaaactgcttattgtatgtggttatatttggtaaaagttgcgtgtgagctttttacaaaagggtaagaattgtgttgaattttaattcacttgtataagaaaacaatttaaaactctcataataggtcttaaatatttttacttgctattctccctcagtgatatatacctcttcctttccagctttatgaaacatctatttaagatttaaagttatcagtgatcatagtttggagataaaatttgacccaggaatgaatatttattttaattaggttttcatacttattaaatgtaattaaagacttgggtcttgtctgagttcagtggaattgaaaccacaactttaatttccttacagaaaaacttaatttgtttcttttagtgccacaccttaaaaagaaaccccaaactagctcctcaggaatatagttttattttgcaagcataccatctagctgaaattgtatacacatgaatatatgtagacttttcctgttgggctgaagtgtgtgcttataaatgtgtttagtttttaagctaaacattcagttaacagtctgtgcattgattagcatagggcaggtggtgaggacctggatttttattaaacagtttagtaattataaaagtttcttgtgtttactagtaaagaattttaaaaatctattctaattcaacaagtttttaaaatcaactttgtaatttgaggggaaaatttggggggaagaggtgggtgggccactaagttacctctctttcatttggtggcccttccaggccattgaaaataaagacgttggctccagtttgcacattgggaagaaagcatagaaatttgacttgtatattaaaaataatagaaatgtaatatgtatattaagaatgcataggtctgtattctgtaaggggctctgaagaacaatatggcactgctgtgttcagtgtgaattcactgcctgggagaactgcaggaatgcttgtcttcaccattgtgttcttacaacgaattcaactttccatggtttatcttgacaaaatttacatgtgtttaggttacttgtatattgatatatttttttaatcttcagtttttgtcttccttttgcctttgtgttttcagaagtaacacatgaacactttttaaagtacattacagagaagaaaactgtgagctattatatagtgtttcttttttaacacaaatcttttaactttaaaaaaaggcaaaaatttttttttctacttcccacccagcttaccaccttgatctctttaacttatgttctaaactttggtgttaatggtggtgtctagcatgctagtagttagattttatttagatgccataactggtaatacagcttttattttgactatattaatttagtttttgaggggaagtttgtttattctgtgactctcaaagcacacagaggttttaaaatatatattattaagactgagagaagaggaaatgggagggagtaacatcacagaagtgctgttgttcaactgttcttcaatatagttgctagtaggtttgtatttactcagtaaggaagtcagtgacctgaactacctataaaaattcagcagtgctgcagtgttgcttaagtgaaaccctttggctatctagtagtttttatgctactgaaacttggattactgtatgatattcagcttgtcttgggccctctatgtagacaaacattcatattcatagtagtgttgtatactggcctgtttttataactttatttttcaaatattaacaaccactgctttcagagtggttattttgttatttttgaagcaggaaataaccatttgtatttgcacctgcgtattgcatatgaattatggtatacttggcaaatgcttttcttttacctgtgaaaattctgaaagctggtccaagctacattgcataccaaattgtgctcttatatattatttgcatcgtgtcctttttaatcaaatagcatgttttagttttattatagtagcttttgctgtaagaatgtcacttgcttatcttttattgtacttgaattcttaatcatgcttttaacattgtatttaacaaatcatttcgtattaggttccattaaaatgtcattcctttgaaaaggcaagggatttccactttcagaatttgaaaatgaaagtagcatgtttatctaaaggcagaaaatagttcggacttggtattatgaaaataagtaatggtttctggagaggatttgtttagatttgcacagatggcgatggcaccttttacttaaattaacattaatcaacagtgctaaggaaaatttacacaaaattacaagataaaacatggaaatgtgtgcctttcagtatacaaactcttgcttggtggccatttgggtaatcagaccatttgaatgcctgagagcatgtttaatttctgtggagtgccacatatggctaaaacaactctttaatgtgcaattaatttctagagtaaaatgtctgttatgtgagggggatctttatgttgggcttttctattttttaaatgttcacatttctttctgttaattaaaatgccatcataatgtcacatttacactgttgcctcttttaaaagcaaagccactttcttgttctaagattacatcaagacttgagcagtgtgtagtaattaaaatgtgtgcttaatgagcataatagattctggttttaggaaataacatatagcttttatatgaatattttcttttgctataatgaaagtcacagattttttttttcctggcttttatggaggaatgaaaagagttgtctccctctaagagtatactatttttgattctcatagcaataatgtcaccattcttatcagagggtaaataccccttgtataggaaaacagacataatttcctcttgggagttctctttatgacttagcattttcttctacttgagaaaattcctgtttttccgattatttcatcttgaactttcttttttttaagcttttgtgcaatgtaatagtttgttgatccatctttgtacattttcattttatttcatgtctttctctcacctacctgtcagaatcagctatagcagattttgaattctttagttaaaaaatagttgctttacttgtttcctcatgagtttgttaaatagctttgcattttagtcctctattatgctatgaaaattattacgaagtttatattgttccctttttaagcctgccttactcttgtcttttgtcattgtctatggtttaatgaagaacacaccaaactaacatttttgtttattttgaggaacaaaaaaacttttctcttttaagggaagttactacacattgagttagtaactactctttcagtcaaggttccttaatcagtccagtctacatcaggactatgacttggggggcggggctaatcctttttgctgttctgagctactattgtcaactgctgttgtacatactgttatgtgtaatggcgtaaatatatttattatgtttgtaaaattcattgcagatcaaggttgctcttctgtgatatatgggatattatgttttaaagaccatcttggaatacaattagagaacttagtattttgatgtactaagacctattttaagtttaatattctactttgcaaaaactttaattaaagatgttattta

SEQ ID NO: 315521 - DNA, 3997 bp, Homo sapiens
ggaagcaataatgaaatagccatttcatatattgtacagcattgttaatgtgggtattgtctaaaaatgtgtaggttagattgagtataggaaggcttggtaccttaaagaagattgatgggacaagaaggaaaaaaaaactgcagtacctgtgagatttacttagagcaccttctctaggggaaaaaacccaattatattgttgtatttaactgcttaaaataatttagtaggttggaggctaggttggtcagtcttgtaccattttataaaatgggatttagccttactagattttttaaattttggtatattctaaacaaaaagtttcatacactattaaaatatgctagagagaaacagtattatacatgtatgtggttttgatattttttctttgtttttttcagagtgctgctgctacagctgctaccttagcactccctgcaggtgtgactcctgttcagcagatattaacaaattcaggccagcttcttcaggtggtcagagcagccaatggtgcccaatatatctttcagcctcagcagtcagtggttctacaacaacaggttataccacaaatgcagcctggtggagtacaagctcctgttatacagcaggtgctggctcctcttcctggagggatttcaccacagacaggtgtcatcatccagcctcagcaaatcttatttacaggaaataagactcaagttatacctacgacagtggcagcacctacaccagcccaagcacagataactgcaactggccagcagcaaccgcaggcccagcctgctcaaacacaagctccattggtcttacaagttgatggaactggggatacatcatctgaagaagatgaagatgaagaagaagactatgatgatgatgaggaggaagacaaagagaaagatggagctgaagatgggcaggtggaagaagagcccctcaatagtgaagatgatgtgagtgatgaggaaggacaggaactctttgacacagaaaatgttgttgtatgccaatatgataagatacacagaagtaaaaacaaatggaaatttcatctcaaggatggcattatgaatcttaatggaagagattatatattttccaaagccattggagatgcagaatggtgaagagttgctttttttcttttataaataaaagaaacttaaaaaaaatgtaaagcggacagtttgaaacttggggcatatgccaaccaaaacttcgtttctgcatgtcagaaaagtgcagtagaagcaaagctatgaaacttggattactgtatgatattcagcttgtcttgggccctctatgtagacaaacattcatattcatagtagtgttgtatactggcctgtttttataactttatttttcaaatattaacaaccactgctttcagagtggttattttgttatttttgaagcaggaaataaccatttgtatttgcacctgcgtattgcatatgaattatggtatacttggcaaatgcttttcttttacctgtgaaaattctgaaagctggtccaagctacattgcataccaaattgtgctcttatatattatttgcatcgtgtcctttttaatcaaatagcatgttttagttttattatagtagcttttgctgtaagaatgtcacttgcttatcttttattgtacttgaattcttaatcatgcttttaacattgtatttaacaaatcatttcgtattaggttccattaaaatgtcattcctttgaaaaggcaagggatttccactttcagaatttgaaaatgaaagtagcatgtttatctaaaggcagaaaatagttcggacttggtattatgaaaataagtaatggtttctggagaggatttgtttagatttgcacagatggcgatggcaccttttacttaaattaacattaatcaacagtgctaaggaaaatttacacaaaattacaagataaaacatggaaatgtgtgcctttcagtatacaaactcttgcttggtggccatttgggtaatcagaccatttgaatgcctgagagcatgtttaatttctgtggagtgccacatatggctaaaacaactctttaatgtgcaattaatttctagagtaaaatgtctgttatgtgagggggatctttatgttgggcttttctattttttaaatgttcacatttctttctgttaattaaaatgccatcataatgtcacatttacactgttgcctcttttaaaagcaaagccactttcttgttctaagattacatcaagacttgagcagtgtgtagtaattaaaatgtgtgcttaatgagcataatagattctggttttaggaaataacatatagcttttatatgaatattttcttttgctataatgaaagtcacagattttttttttcctggcttttatggaggaatgaaaagagttgtctccctctaagagtatactatttttgattctcatagcaataatgtcaccattcttatcagagggtaaataccccttgtataggaaaacagacataatttcctcttgggagttctctttatgacttagcattttcttctacttgagaaaattcctgtttttccgattatttcatcttgaactttcttttttttaagcttttgtgcaatgtaatagtttgttgatccatctttgtacattttcattttatttcatgtctttctctcacctacctgtcagaatcagctatagcagattttgaattctttagttaaaaaatagttgctttacttgtttcctcatgagtttgttaaatagctttgcattttagtcctctattatgctatgaaaattattacgaagtttatattgttccctttttaagcctgccttactcttgtcttttgtcattgtctatggtttaatgaagaacacaccaaactaacatttttgtttattttgaggaacaaaaaaacttttctcttttaagggaagttactacacattgagttagtaactactctttcagtcaaggttccttaatcagtccagtctacatcaggactatgacttggggggcggggctaatcctttttgctgttctgagctactattgtcaactgctgttgtacatactgttatgtgtaatggcgtaaatatatttattatgtttgtaaaattcattgcagatcaaggttgctcttctgtgatatatgggatattatgttttaaagaccatcttggaatacaattagagaacttagtattttgatgtactaagacctattttaagtttaatattctactttgcaaaaactttaattaaagatgttatttaaaaaaaaatgttgcttgctttgcttactagtatatggcattgttatagataattgaataaaatacaatttagaaaggaaaatgctttacattgttaatgagaattccatttaacaacaacaaaaagatgctaaattctgtaccttaaagataagtagattgagatgtcaatttgaattagtaaactgtgttacaaatgattaatactagcttttaaaaagttgtattttccaggcacacaggaatttaggttgggcgaattcacactaacaaattataactaaaaattggtataattaacattgtttttcaaaataaagattactccttgtgaaatattaataattaacatattgtattaaataagtatttctactccaaagtatagattacttaggataaaaacattgttatttctctgtttagtcaaaccacttcctcttagttcagaggttataaataattgcatattaggagaattggattactgaggtttgtattgcgtattgaatatattttgtgttattttagaagataataattagcaggtattttaattttatagttaattcagctgaatcattaagaagctcgcctttttgtatttttttatcctgttaacagactatctagaaaacatgcaaattttaactattaacataatcataataaagatatcttatttattgccagc

SEQ ID NO: 315522 - DNA, 2819 bp, Homo sapiens
taccgtgctgagctgatagatgaaagccactaaggtatagtctagatagattgtttatgcggacctgaaacctcggcatcacctggtcatcgactagtgcagccttgtgctcggggcccgctcgtagtgtatgacgacacattcatagtgctctagatatgatgtagttattaccgggccgtgcggtttaaaaagtttatttttcaaatattaacaaccactgctttcagagtggttattttgttatttttgaagcaggaaataaccatttgtatttgcacctgcgtattgcatatgaattatggtatacttggcaaatgcttttcttttacctgtgaaaattctgaaagctggtccaagctacattgcataccaaattgtgctcttatatattatttgcatcgtgtcctttttaatcaaatagcatgttttagttttattatagtagcttttgctgtaagaatgtcacttgcttatcttttattgtacttgaattcttaatcatgcttttaacattgtatttaacaaatcatttcgtattaggttccattaaaatgtcattcctttgaaaaggcaagggatttccactttcagaatttgaaaatgaaagtagcatgtttatctaaaggcagaaaatagttcggacttggtattatgaaaataagtaatggtttctggagaggatttgtttagatttgcacagatggcgatggcaccttttacttaaattaacattaatcaacagtgctaaggaaaatttacacaaaattacaagataaaacatggaaatgtgtgcctttcagtatacaaactcttgcttggtggccatttgggtaatcagaccatttgaatgcctgagagcatgtttaatttctgtggagtgccacatatggctaaaacaactctttaatgtgcaattaatttctagagtaaaatgtctgttatgtgagggggatctttatgttgggcttttctattttttaaatgttcacatttctttctgttaattaaaatgccatcataatgtcacatttacactgttgcctcttttaaaagcaaagccactttcttgttctaagattacatcaagacttgagcagtgtgtagtaattaaaatgtgtgcttaatgagcataatagattctggttttaggaaataacatatagcttttatatgaatattttcttttgctataatgaaagtcacagattttttttttcctggcttttatggaggaatgaaaagagttgtctccctctaagagtatactatttttgattctcatagcaataatgtcaccattcttatcagagggtaaataccccttgtataggaaaacagacataatttcctcttgggagttctctttatgacttagcattttcttctacttgagaaaattcctgtttttccgattatttcatcttgaactttcttttttttaagcttttgtgcaatgtaatagtttgttgatccatctttgtacattttcattttatttcatgtctttctctcacctacctgtcagaatcagctatagcagattttgaattctttagttaaaaaatagttgctttacttgtttcctcatgagtttgttaaatagctttgcattttagtcctctattatgctatgaaaattattacgaagtttatattgttccctttttaagcctgccttactcttgtcttttgtcattgtctatggtttaatgaagaacacaccaaactaacatttttgtttattttgaggaacaaaaaaacttttctcttttaagggaagttactacacattgagttagtaactactctttcagtcaaggttccttaatcagtccagtctacatcaggactatgacttggggggcggggctaatcctttttgctgttctgagctactattgtcaactgctgttgtacatactgttatgtgtaatggcgtaaatatatttattatgtttgtaaaattcattgcagatcaaggttgctcttctgtgatatatgggatattatgttttaaagaccatcttggaatacaattagagaacttagtattttgatgtactaagacctattttaagtttaatattctactttgcaaaaactttaattaaagatgttatttaaaaaaaaatgttgcttgctttgcttactagtatatggcattgttatagataattgaataaaatacaatttagaaaggaaaatgctttacattgttaatgagaattccatttaacaacaacaaaaagatgctaaattctgtaccttaaagataagtagattgagatgtcaatttgaattagtaaactgtgttacaaatgattaatactagcttttaaaaagttgtattttccaggcacacaggaatttaggttgggcgaattcacactaacaaattataactaaaaattggtataattaacattgtttttcaaaataaagattactccttgtgaaatattaataattaacatattgtattaaataagtatttctactccaaagtatagattacttaggataaaaacattgttatttctctgtttagtcaaaccacttcctcttagttcagaggttataaataattgcatattaggagaattggattactgaggtttgtattgcgtattgaatatattttgtgttattttagaagataataattagcaggtattttaattttatagttaattcagctgaatcattaagaagctcgcctttttgtatttttttatcctgttaacagactatctagaaaacatgcaaattttaactattaacataatcataataaagatatcttatttattgccagc

SEQ ID NO: 315523 - DNA, 1639 bp, Homo sapiens
aaaagagttgtctccctctaagagtatactattttcattcctccataaaagccaggaatgaaaagagttgtctccctctaagagtatactatttttgattctcatagcaataatgtcaccattcttatcagagggtaaataccccttgtataggaaaacagacataatttcctcttgggagttctctttatgacttagcattttcttctacttgagaaaattcctgtttttccgattatttcatcttgaactttcttttttttaagcttttgtgcaatgtaatagtttgttgatccatctttgtacattttcattttatttcatgtctttctctcacctacctgtcagaatcagctatagcagattttgaattctttagttaaaaaatagttgctttacttgtttcctcatgagtttgttaaatagctttgcattttagtcctctattatgctatgaaaattattacgaagtttatattgttccctttttaagcctgccttactcttgtcttttgtcattgtctatggtttaatgaagaacacaccaaactaacatttttgtttattttgaggaacaaaaaaacttttctcttttaagggaagttactacacattgagttagtaactactctttcagtcaaggttccttaatcagtccagtctacatcaggactatgacttggggggcggggctaatcctttttgctgttctgagctactattgtcaactgctgttgtacatactgttatgtgtaatggcgtaaatatatttattatgtttgtaaaattcattgcagatcaaggttgctcttctgtgatatatgggatattatgttttaaagaccatcttggaatacaattagagaacttagtattttgatgtactaagacctattttaagtttaatattctactttgcaaaaactttaattaaagatgttatttaaaaaaaaatgttgcttgctttgcttactagtatatggcattgttatagataattgaataaaatacaatttagaaaggaaaatgctttacattgttaatgagaattccatttaacaacaacaaaaagatgctaaattctgtaccttaaagataagtagattgagatgtcaatttgaattagtaaactgtgttacaaatgattaatactagcttttaaaaagttgtattttccaggcacacaggaatttaggttgggcgaattcacactaacaaattataactaaaaattggtataattaacattgtttttcaaaataaagattactccttgtgaaatattaataattaacatattgtattaaataagtatttctactccaaagtatagattacttaggataaaaacattgttatttctctgtttagtcaaaccacttcctcttagttcagaggttataaataattgcatattaggagaattggattactgaggtttgtattgcgtattgaatatattttgtgttattttagaagataataattagcaggtattttaattttatagttaattcagctgaatcattaagaagctcgcctttttgtatttttttatcctgttaacagactatctagaaaacatgcaaattttaactattaacataatcataataaagatatcttatttattgccagc

SEQ ID NO: 315524 - DNA, 4394 bp, Homo sapiens
cgcagcttgttggctcgctatataaaggagagaagcgggcggaccggacggctggagctgcagccggtggcggcagcggcggcgcagggagcggtgaccggtggtggtttccctccttggcgcggggtggggagcgggcaacgccccccggacccctgaagggtcgtggctttttttttttttttaaggcgattctcgaggttttcagctgcgggaggagtgcccccctcctcctcctctctccgctctcccctactccttcaggattgattttgtttaaaattttttccccaatcttgcggtgatttgggtcaccctccgggtgttaatagtttttttttttttggttttgtttttatcttgttttcttggggttgccccctcttgtttgtgttgtgtgtggaaatggcgaactcggcaaatacaaacaccgtgcctaaattatacagatctgtgattgaagatgtcattaatgatgtgagagacatctttctggatgatggagtggatgaacaagtactgatggaactaaaaactttatgggaaaacaaactaatgcagtccagggcagtagatggatttcattcagaagagcagcagcttctactgcaagttcaacagcagcatcaaccccagcagcagcagcatcaccaccatcaccatcatcagcaagctcagcctcagcagacagtacctcagcaagcgcagacccagcaggttcttattcctgcatcacagcaagccacagcaccacaagttattgttccagattctaagttgatacagcatatgaatgcatcaaacatgagtgctgctgctacagctgctaccttagcactccctgcaggtgtgactcctgttcagcagatattaacaaattcaggccagcttcttcaggtggtcagagcagccaatggtgcccaatatatctttcagcctcagcagtcagtggttctacaacaacaggttataccacaaatgcagcctggtggagtacaagctcctgttatacagcaggtgctggctcctcttcctggagggatttcaccacagacaggtgtcatcatccagcctcagcaaatcttatttacaggaaataagactcaagttatacctacgacagtggcagcacctacaccagcccaagcacagataactgcaactggccagcagcaaccgcaggcccagcctgctcaaacacaagctccattggtcttacaagttgatggaactggggatacatcatctgaagaagatgaagatgaagaagaagactatgatgatgatgaggaggaagacaaagagaaagatggagctgaagatgggcaggtggaagaagagcccctcaatagtgaagatgatgtgagtgatgaggaaggacaggaactctttgacacagaaaatgttgttgtatgccaatatgataagatacacagaagtaaaaacaaatggaaatttcatctcaaggatggcattatgaatcttaatggaagagattatatattttccaaagccattggagatgcagaatggtgaagagttgctttttttcttttataaataaaagaaacttaaaaaaaatgtaaagcggacagtttgaaacttggggcatatgccaaccaaaacttcgtttctgcatgtcagaaaagtgcagtagaagcaaagctatgaaacttggattactgtatgatattcagcttgtcttgggccctctatgtagacaaacattcatattcatagtagtgttgtatactggcctgtttttataactttatttttcaaatattaacaaccactgctttcagagtggttattttgttatttttgaagcaggaaataaccatttgtatttgcacctgcgtattgcatatgaattatggtatacttggcaaatgcttttcttttacctgtgaaaattctgaaagctggtccaagctacattgcataccaaattgtgctcttatatattatttgcatcgtgtcctttttaatcaaatagcatgttttagttttattatagtagcttttgctgtaagaatgtcacttgcttatcttttattgtacttgaattcttaatcatgcttttaacattgtatttaacaaatcatttcgtattaggttccattaaaatgtcattcctttgaaaaggcaagggatttccactttcagaatttgaaaatgaaagtagcatgtttatctaaaggcagaaaatagttcggacttggtattatgaaaataagtaatggtttctggagaggatttgtttagatttgcacagatggcgatggcaccttttacttaaattaacattaatcaacagtgctaaggaaaatttacacaaaattacaagataaaacatggaaatgtgtgcctttcagtatacaaactcttgcttggtggccatttgggtaatcagaccatttgaatgcctgagagcatgtttaatttctgtggagtgccacatatggctaaaacaactctttaatgtgcaattaatttctagagtaaaatgtctgttatgtgagggggatctttatgttgggcttttctattttttaaatgttcacatttctttctgttaattaaaatgccatcataatgtcacatttacactgttgcctcttttaaaagcaaagccactttcttgttctaagattacatcaagacttgagcagtgtgtagtaattaaaatgtgtgcttaatgagcataatagattctggttttaggaaataacatatagcttttatatgaatattttcttttgctataatgaaagtcacagattttttttttcctggcttttatggaggaatgaaaagagttgtctccctctaagagtatactatttttgattctcatagcaataatgtcaccattcttatcagagggtaaataccccttgtataggaaaacagacataatttcctcttgggagttctctttatgacttagcattttcttctacttgagaaaattcctgtttttccgattatttcatcttgaactttcttttttttaagcttttgtgcaatgtaatagtttgttgatccatctttgtacattttcattttatttcatgtctttctctcacctacctgtcagaatcagctatagcagattttgaattctttagttaaaaaatagttgctttacttgtttcctcatgagtttgttaaatagctttgcattttagtcctctattatgctatgaaaattattacgaagtttatattgttccctttttaagcctgccttactcttgtcttttgtcattgtctatggtttaatgaagaacacaccaaactaacatttttgtttattttgaggaacaaaaaaacttttctcttttaagggaagttactacacattgagttagtaactactctttcagtcaaggttccttaatcagtccagtctacatcaggactatgacttggggggcggggctaatcctttttgctgttctgagctactattgtcaactgctgttgtacatactgttatgtgtaatggcgtaaatatatttattatgtttgtaaaattcattgcagatcaaggttgctcttctgtgatatatgggatattatgttttaaagaccatcttggaatacaattagagaacttagtattttgatgtactaagacctattttaagtttaatattctactttgcaaaaactttaattaaagatgttatttaaaaaaaaatgttgcttgctttgcttactagtatatggcattgttatagataattgaataaaatacaatttagaaaggaaaatgctttacattgttaatgagaattccatttaacaacaacaaaaagatgctaaattctgtaccttaaagataagtagattgagatgtcaatttgaattagtaaactgtgttacaaatgattaatactagcttttaaaaagttgtattttccaggcacacaggaatttaggttgggcgaattcacactaacaaattataactaaaaattggtataattaacattgtttttcaaaataaagattactccttgtgaaatattaataattaacatattgtattaaataagtatttctactccaaagtatagattacttaggataaaaacattgttatttctctgtttagtcaaaccacttcctcttagttcagaggttataaataattgcatattaggagaattggattactgaggtttgtattgcgtattgaatatattttgtgttattttagaagataataattagcaggtattttaattttatagttaattcagctgaatcattaagaagctcgcctttttgtatttttttatcctgttaacagactatctagaaaacatgcaaattttaactattaacataatcataataaagatatcttatttattgccagc

SEQ ID NO: 315525 - DNA, 4043 bp, Homo sapiens
gctttgcaagttcttcaccgcaaagaactgccgcagacttccgcctgggtgccaaccacgtgatcacgcgagcgttggagaggccctaaattatacagatctgtgattgaagatgtcattaatgatgtgagagacatctttctggatgatggagtggatgaacaagtactgatggaactaaaaactttatgggaaaacaaactaatgcagtccagggcagtagatggatttcattcagaagagcagcagcttctactgcaagttcaacagcagcatcaaccccagcagcagcagcatcaccaccatcaccatcatcagcaagctcagcctcagcagacagtacctcagcaagcgcagacccagcaggttcttattcctgcatcacagcaagccacagcaccacaagttattgttccagattctaagttgatacagcatatgaatgcatcaaacatgagtgctgctgctacagctgctaccttagcactccctgcaggtgtgactcctgttcagcagatattaacaaattcaggccagcttcttcaggtggtcagagcagccaatggtgcccaatatatctttcagcctcagcagtcagtggttctacaacaacaggttataccacaaatgcagcctggtggagtacaagctcctgttatacagcaggtgctggctcctcttcctggagggatttcaccacagacaggtgtcatcatccagcctcagcaaatcttatttacaggaaataagactcaagttatacctacgacagtggcagcacctacaccagcccaagcacagataactgcaactggccagcagcaaccgcaggcccagcctgctcaaacacaagctccattggtcttacaagttgatggaactggggatacatcatctgaagaagatgaagatgaagaagaagactatgatgatgatgaggaggaagacaaagagaaagatggagctgaagatgggcaggtggaagaagagcccctcaatagtgaagatgatgtgagtgatgaggaaggacaggaactctttgacacagaaaatgttgttgtatgccaatatgataagatacacagaagtaaaaacaaatggaaatttcatctcaaggatggcattatgaatcttaatggaagagattatatattttccaaagccattggagatgcagaatggtgaagagttgctttttttcttttataaataaaagaaacttaaaaaaaatgtaaagcggacagtttgaaacttggggcatatgccaaccaaaacttcgtttctgcatgtcagaaaagtgcagtagaagcaaagctatgaaacttggattactgtatgatattcagcttgtcttgggccctctatgtagacaaacattcatattcatagtagtgttgtatactggcctgtttttataactttatttttcaaatattaacaaccactgctttcagagtggttattttgttatttttgaagcaggaaataaccatttgtatttgcacctgcgtattgcatatgaattatggtatacttggcaaatgcttttcttttacctgtgaaaattctgaaagctggtccaagctacattgcataccaaattgtgctcttatatattatttgcatcgtgtcctttttaatcaaatagcatgttttagttttattatagtagcttttgctgtaagaatgtcacttgcttatcttttattgtacttgaattcttaatcatgcttttaacattgtatttaacaaatcatttcgtattaggttccattaaaatgtcattcctttgaaaaggcaagggatttccactttcagaatttgaaaatgaaagtagcatgtttatctaaaggcagaaaatagttcggacttggtattatgaaaataagtaatggtttctggagaggatttgtttagatttgcacagatggcgatggcaccttttacttaaattaacattaatcaacagtgctaaggaaaatttacacaaaattacaagataaaacatggaaatgtgtgcctttcagtatacaaactcttgcttggtggccatttgggtaatcagaccatttgaatgcctgagagcatgtttaatttctgtggagtgccacatatggctaaaacaactctttaatgtgcaattaatttctagagtaaaatgtctgttatgtgagggggatctttatgttgggcttttctattttttaaatgttcacatttctttctgttaattaaaatgccatcataatgtcacatttacactgttgcctcttttaaaagcaaagccactttcttgttctaagattacatcaagacttgagcagtgtgtagtaattaaaatgtgtgcttaatgagcataatagattctggttttaggaaataacatatagcttttatatgaatattttcttttgctataatgaaagtcacagattttttttttcctggcttttatggaggaatgaaaagagttgtctccctctaagagtatactatttttgattctcatagcaataatgtcaccattcttatcagagggtaaataccccttgtataggaaaacagacataatttcctcttgggagttctctttatgacttagcattttcttctacttgagaaaattcctgtttttccgattatttcatcttgaactttcttttttttaagcttttgtgcaatgtaatagtttgttgatccatctttgtacattttcattttatttcatgtctttctctcacctacctgtcagaatcagctatagcagattttgaattctttagttaaaaaatagttgctttacttgtttcctcatgagtttgttaaatagctttgcattttagtcctctattatgctatgaaaattattacgaagtttatattgttccctttttaagcctgccttactcttgtcttttgtcattgtctatggtttaatgaagaacacaccaaactaacatttttgtttattttgaggaacaaaaaaacttttctcttttaagggaagttactacacattgagttagtaactactctttcagtcaaggttccttaatcagtccagtctacatcaggactatgacttggggggcggggctaatcctttttgctgttctgagctactattgtcaactgctgttgtacatactgttatgtgtaatggcgtaaatatatttattatgtttgtaaaattcattgcagatcaaggttgctcttctgtgatatatgggatattatgttttaaagaccatcttggaatacaattagagaacttagtattttgatgtactaagacctattttaagtttaatattctactttgcaaaaactttaattaaagatgttatttaaaaaaaaatgttgcttgctttgcttactagtatatggcattgttatagataattgaataaaatacaatttagaaaggaaaatgctttacattgttaatgagaattccatttaacaacaacaaaaagatgctaaattctgtaccttaaagataagtagattgagatgtcaatttgaattagtaaactgtgttacaaatgattaatactagcttttaaaaagttgtattttccaggcacacaggaatttaggttgggcgaattcacactaacaaattataactaaaaattggtataattaacattgtttttcaaaataaagattactccttgtgaaatattaataattaacatattgtattaaataagtatttctactccaaagtatagattacttaggataaaaacattgttatttctctgtttagtcaaaccacttcctcttagttcagaggttataaataattgcatattaggagaattggattactgaggtttgtattgcgtattgaatatattttgtgttattttagaagataataattagcaggtattttaattttatagttaattcagctgaatcattaagaagctcgcctttttgtatttttttatcctgttaacagactatctagaaaacatgcaaattttaactattaacataatcataataaagatatcttatttattgccagc

SEQ ID NO: 315526 - DNA, 1581 bp, Homo sapiens
ccgacggctaccacgtgaccttcctgagcttgggtttcctcctccggaagattagagggttggcgcatactcaactctaagacctccggaacatggaatctgggcgtgcaccattattgacacctacaccagccgtccctttcttagaagacatacggtagcacttccaccctcgctcaaaactcgggaaaggaggggcggagggtggatgtcatcactccgcgcccggctgcccgcgacgcgccggcgggtggcgcagcccttcgctcgcccggcctccccctccctggttccgcgttctggttccgccatggaatccaacaaggatgaagctgagcgctgtatcagcatcgccctcaaggccatccagagcaaccagcccgaccgggcgctccgcttcctggagaaggcacagcggctgtatccgacgccgcgagttcgcgccctgattgagtccctcaaccagaaaccacagactgccggtgaccaacccccacccacagacacaacccatgccacccacaggaaagcaggtgggaccgatgccccctcggccaacggtgaagctggaggagagagcaccaaaggctacactgcagaacaggttgcagctgtgaaaagggtcaagcaatgtaaagattactatgagatcctgggggtgagcagaggggcctcggatgaggacctgaagaaggcctaccgcagactggccctcaaattccacccagacaagaaccacgcacctggtgccactgaagccttcaaagccattggcacagcatatgcggtactcagcaacccggagaagaggaagcagtatgaccagttcggcgatgacaagagccaggcggcccggcacggccatgggcatggggatttccaccgtggctttgaggccgacatctcccctgaagacctcttcaacatgttctttggcggcggcttcccttctagtaacgtccacgtctacagcaacggccgcatgcgctatacctaccagcaaaggcaggaccgcagggacaaccagggtgatggcgggctaggggtgtttgtgcagctgatgcctatcctcatcctgattctcgtgtcagctctcagccagctcatggtctccagtccaccctacagtctgagtccaagaccgtccgtgggccacatccacaggcgagtcactgaccacctgggtgtcgtctactatgtgggagacactttctccgaagagtacacaggctccagcctcaaaacagtcgagcggaatgtggaagatgattatatcgccaacctccggaacaactgctggaaggagaagcagcagaaggaaggcttgctgtaccgggcacgctactttggcgacacagatatgtaccacagagcacagaagatgggcacccccagctgcagccgactgtcagaggtgcaggcctccctgcatggatagtcctgggccagccacaccaccgaggtccaaactatgaaatccctggagaatttttggtgacatgcactgagccaaggtgatggactgtatatttgaggaaagacaaacaaagaaacaaaattaaaatggaattggaggccgaa

SEQ ID NO: 315527 - DNA, 1056 bp, Homo sapiens
ccgacggctaccacgtgaccttcctgagcttgggtttcctcctccggaagattagagggttggcgcatactcaactctaagacctccggaacatggaatctgggcgtgcaccattattgacacctacaccagccgtccctttcttagaagacatacggtagcacttccaccctcgctcaaaactcgggaaaggaggggcggagggtggatgtcatcactccgcgcccggctgcccgcgacgcgccggcgggtggcgcagcccttcgctcgcccggcctccccctccctggttccgcgttctggttccgccatggaatccaacaaggatgaagctgagcgctgtatcagcatcgccctcaaggccatccagagcaaccagcccgaccgggcgctccgcttcctggagaaggcacagcggctgtatccgacgccgcgagttcgcgccctgattgagtccctcaaccagaaaccacagactgccggtgaccaacccccacccacagacacaacccatgccacccacaggaaagcaggtgggaccgatgccccctcggccaacggtgaagctggaggagagagcaccaaaggctacactgcagaacaggttgcagctgtgaaaagggtcaagcaatgtaaagattactatgagatcctgggggtgagcagaggggcctcggatgaggacctgaagaaggcctaccgcagactggccctcaaattccacccagacaagaaccacgcacctggtgccactgaagccttcaaagccattggcacagcatatgcggtactcagcaacccggagaagaggaagcagtatgaccagttcggcgatgacaagagccaggcggcccggcacggccatgggcatggggatttccaccgtggctttgaggccgacatctcccctgaagacctcttcaacatgttctttggcggcggcttcccttctagtaacgtccacgtctacagcaacggccgcatgcgctatacctaccagcaaaggcaggaccgcagggacaaccagggtgatgtgagtgaggagggcgccaggga

SEQ ID NO: 315528 - DNA, 891 bp, Homo sapiens
gcaggctgtaccgcccggaagtatgggataccaaggacttcagaaagttcttcctccgagtcagtcagtggtgccgggaccccagggcagcctcctcgactcctgaagaaaaggcagtgcccgtggctgcctctgtcttcactcgctgttgatgtgaccgccaggcctcctctcgtaccttggacaaaggatacacctgaaccagaatagttttcttaccctcacattgaaatgaggattttgcttaaaacagcacttgccgccagtgggaggagggaggttttatttattcccacagtttctcctgggccttctggaatgaccatgttttcctgtggcggtgggtgtgtcattgcgcccgccgtcttccaaagccttacttccccaagctgccagccaggaggtgataaccaccctcccagagtttctctcggctctttttttaaaagtcccccaacaaataggattcttgctgggaaaggaagttcggtaaggaaatgtcaaatctggtttttaaacaaggtccaaccctgcaatgaagcagccacttcagcccagagagattataagaactgatgtggccagagtgcctacccactgtggccccggtgctctgcccccacgccccgaccatctggtcttggtagatgtccctagacgggctgagccatgtgcaataagaacatagatcctaaaggatcctctggaagctgtatttcttgaattagaattctcaaattgtacatctgttaatatatgtttattatgtgactggccacaccacacccagccggacaacagcgaccaaaaaacaaggggggggcgcccccaaaaaaacccccgggggggccccaaatgggcaccccgtttttttaaaaagagggcccccag

SEQ ID NO: 315529 - DNA, 471 bp, Homo sapiens
  misc_feature (18)..(18): n is a, c, g, or t
gtagtgttctagaggatncctcctctggatgcaagtgtcccaaaatgctgggattacaggtgtgaaccaccacgtccggcctgtcctgcctactcttaaggactatggctttcaagagagcagatgactgtccccccagcacccacaggcctaatcagggcaggagctggtggctttgctgggaggggaagtgagtgggaagcagcgggccgctcggcgaggcacgcagcctgcttgagcaggagctctgaatggtttccttgccttgcacagccctgattgagtccctcaaccagaaaccacagactgccggtgaccaacccccacccacagacactttgcatccagaggacactttgcatccagagacactttgcatccagagacactttgcatccagagacactttgcatccagagacactttgcatccagagacactttgcatccagagacactttgcatcgggtac

SEQ ID NO: 315530 - DNA, 4418 bp, Homo sapiens
ccgacggctaccacgtgaccttcctgagcttgggtttcctcctccggaagattagagggttggcgcatactcaactctaagacctccggaacatggaatctgggcgtgcaccattattgacacctacaccagccgtccctttcttagaagacatacggtagcacttccaccctcgctcaaaactcgggaaaggaggggcggagggtggatgtcatcactccgcgcccggctgcccgcgacgcgccggcgggtggcgcagcccttcgctcgcccggcctccccctccctggttccgcgttctggttccgccatggaatccaacaaggatgaagctgagcgctgtatcagcatcgccctcaaggccatccagagcaaccagcccgaccgggcgctccgcttcctggagaaggcacagcggctgtatccgacgccgcgagttcgcgccctgattgagtccctcaaccagaaaccacagactgccggtgaccaacccccacccacagacacaacccatgccacccacaggaaagcaggtgggaccgatgccccctcggccaacggtgaagctggaggagagagcaccaaaggctacactgcagaacaggttgcagctgtgaaaagggtcaagcaatgtaaagattactatgagatcctgggggtgagcagaggggcctcggatgaggacctgaagaaggcctaccgcagactggccctcaaattccacccagacaagaaccacgcacctggtgccactgaagccttcaaagccattggcacagcatatgcggtactcagcaacccggagaagaggaagcagtatgaccagttcggcgatgacaagagccaggcggcccggcacggccatgggcatggggatttccaccgtggctttgaggccgacatctcccctgaagacctcttcaacatgttctttggcggcggcttcccttctagtaacgtccacgtctacagcaacggccgcatgcgctatacctaccagcaaaggcaggaccgcagggacaaccagggtgatggcgggctaggggtgtttgtgcagctgatgcctatcctcatcctgattctcgtgtcagctctcagccagctcatggtctccagtccaccctacagtctgagtccaagaccgtccgtgggccacatccacaggcgagtcactgaccacctgggtgtcgtctactatgtgggagacactttctccgaagagtacacaggctccagcctcaaaacagtcgagcggaatgtggaagatgattatatcgccaacctccggaacaactgctggaaggagaagcagcagaaggaaggcttgctgtaccgggcacgctactttggcgacacagatatgtaccacagagcacagaagatgggcacccccagctgcagccgactgtcagaggtgcaggcctccctgcatggatagtcctgggccagccacaccaccgaggtccaagtatgagccagggctgcctccaccctgcaactcctggcagctttggccctggtcatgagcagaggagggagggggagaaagggaggaagcctggtgattgtggcaaagactcctgtccccagcctgacctccagcctccagagaccgagcagctgtggggcctgctgggaaaccaaggtcggtttccgccctctagcgatgctgtcctccccactcctccgctctgctccctggctccaggggtgtgggggaccccagaaccaggcagagtgggaacttgaaactgttgctgagggccacccggggcttcttggtccactccagccatcagtcagcacggccctttctccagcacagcagactattgtccgtgccctggtatttaggccatcacatatggtggggcccaagagagccccatatgcacactgcctgcctgataccaggaagaaccatgtgggaataggtgggccaagagccctcccctttctccatccctccagctaggaggaaatggagcaagatgaacaggcagccacgaggtgggtgggagctggcagtcttggtggcggcaggggccgcgggccctgaccacccccctctggtgggatctgaggcactctctcgaatgccgtcacacctggcagcctggaagccacaggcatccggccttgcccaggcatctcgcctgcggtctgaggaagggaacagaaggtcatgagttcagggtcagacgcagccgctcagcacaggaggggtggaggggaaatgagagttgctggtagcaggctccctccttctgcagcccggcgaatgggggcgctgggctctgttcccagcgtttgccagaggtggccacttcagccaagcccggagaagtgtgggcagaagcagtgaaggttcttctctgtgtgggtgccctgcccaccccctcctttgcctgtgtcctcccggcctggatccatggctgactctgcctggaggccatttgtgcctgcctctgtgctgccgcaggagggcaggccgcaagtggggttggtgggggtcgagcgggcagcacggtgcagcggtgcagtggcaaggggggctacttgtgtggcataagctagaggagccggtgccgcctgaatgccgagctaactgttgccactctcctccccagactatgaaatccctggagaatttttggtgacatgcactgagccaaggtgatggactgtatatttgaggaaagacaaacaaagaaacaaaattaaaatggaattggaggccgaacgctgcacagctgccctctctctcacccagtaaatgcagaaagctcttaggacagacagaaaacctgccatggggctgcttccctccctcgcagggctggcggaggctccgcatcgcctctctcctaggatacagaaaccatggcaacgaaagtagaatgtaaaactcgcagcagatatcagtgggaagggctgggggagggggcacccagctgcctttcctccctcacaggagccaccaccagccacctctcaggagaagccagaggccctggccaaagataggaggaagaaagagaactctccatagaatgtaatttatagatgcgtgtatatgtatatatatctatttatatgtaaataggcatatatgaagatatatatatatatagtctactttttaaactctgcagggatttggttaagttgttgagctgatttcttccatgttttagaaaatgaggcctgtttggggaaggtaccctggtgatgtttttgctagacattagctgtagctgacagcataaggagagtcgcatcagagcttttcacagccccccgaaaccccagcctggttttgatggcagcagtaatcatgatagtgtgaacccgcgaaggcctcaggattatggttaacctggagaggagcaggccatggaggcaggtgccaggtcagtattgagtcacagtagaggccccacaaggacctgcttgggtgagaccacctctcccctctcagcagcgctggtgggctctttgtcctggtgcccaggagccctccagccccctgcccacagaagggaaggcctgcagagggggccaggatctacctaaccatttccccacccctaagtccctcagtgggctttgccttataggtgccacagggcacagctccatcattgccactggtttttcctaagtcatgcaccaaggacttcagaaagttcttcctccgagtcagtcagtggtgccgggaccccagggcagcctcctcgactcctgaagaaaaggcagtgcccgtggctgcctctgtcttcactcgctgttgatgtgaccgccaggcctcctctcgtaccttggacaaaggatacacctgaaccagaatagttttcttaccctcacattgaaatgaggattttgcttaaaacagcacttgccgccagtgggaggagggaggttttatttattcccacagtttctcctgggccttctggaatgaccatgttttcctgtggcggtgggtgtgtcattgcgcccgccgtcttccaaagccttacttccccaagctgccagccaggaggtgataaccaccctcccagagtttctctcggctctttttttaaaagtcccccaacaaataggattcttgctgggaaaggaagttcggtaaggaaatgtcaaatctggtttttaaacaaggtccaaccctgcaatgaagcagccacttcagcccagagagattataagaactgatgtggccagagtgcctacccactgtggccccggtgctctgcccccacgccccgaccatctggtcttggtagatgtccctagacgggctgagccatgtgcaataagaacatagatcctaaaggatcctctggaagctgtatttcttgaattagaattctcaaattgtacatctgttaatatatgtttattatgtgactggc

SEQ ID NO: 315531 - DNA, 3202 bp, Homo sapiens
ccgacggctaccacgtgaccttcctgagcttgggtttcctcctccggaagattagagggttggcgcatactcaactctaagacctccggaacatggaatctgggcgtgcaccattattgacacctacaccagccgtccctttcttagaagacatacggtagcacttccaccctcgctcaaaactcgggaaaggaggggcggagggtggatgtcatcactccgcgcccggctgcccgcgacgcgccggcgggtggcgcagcccttcgctcgcccggcctccccctccctggttccgcgttctggttccgccatggaatccaacaaggatgaagctgagcgctgtatcagcatcgccctcaaggccatccagagcaaccagcccgaccgggcgctccgcttcctggagaaggcacagcggctgtatccgacgccgcgagttcgcgccctgattgagtccctcaaccagaaaccacagactgccggtgaccaacccccacccacagacacaacccatgccacccacaggaaagcaggtgggaccgatgccccctcggccaacggtgaagctggaggagagagcaccaaaggctacactgcagaacaggttgcagctgtgaaaagggtcaagcaatgtaaagattactatgagatcctgggggtgagcagaggggcctcggatgaggacctgaagaaggcctaccgcagactggccctcaaattccacccagacaagaaccacgcacctggtgccactgaagccttcaaagccattggcacagcatatgcggtactcagcaacccggagaagaggaagcagtatgaccagttcggcgatgacaagagccaggcggcccggcacggccatgggcatggggatttccaccgtggctttgaggccgacatctcccctgaagacctcttcaacatgttctttggcggcggcttcccttctagtaacgtccacgtctacagcaacggccgcatgcgctatacctaccagcaaaggcaggaccgcagggacaaccagggtgatggcgggctaggggtgtttgtgcagctgatgcctatcctcatcctgattctcgtgtcagctctcagccagctcatggtctccagtccaccctacagtctgagtccaagaccgtccgtgggccacatccacaggcgagtcactgaccacctgggtgtcgtctactatgtgggagacactttctccgaagagtacacaggctccagcctcaaaacagtcgagcggaatgtggaagatgattatatcgccaacctccggaacaactgctggaaggagaagcagcagaaggaaggcttgctgtaccgggcacgctactttggcgacacagatatgtaccacagagcacagaagatgggcacccccagctgcagccgactgtcagagactatgaaatccctggagaatttttggtgacatgcactgagccaaggtgatggactgtatatttgaggaaagacaaacaaagaaacaaaattaaaatggaattggaggccgaacgctgcacagctgccctctctctcacccagtaaatgcagaaagctcttaggacagacagaaaacctgccatggggctgcttccctccctcgcagggctggcggaggctccgcatcgcctctctcctaggatacagaaaccatggcaacgaaagtagaatgtaaaactcgcagcagatatcagtgggaagggctgggggagggggcacccagctgcctttcctccctcacaggagccaccaccagccacctctcaggagaagccagaggccctggccaaagataggaggaagaaagagaactctccatagaatgtaatttatagatgcgtgtatatgtatatatatctatttatatgtaaataggcatatatgaagatatatatatatatagtctactttttaaactctgcagggatttggttaagttgttgagctgatttcttccatgttttagaaaatgaggcctgtttggggaaggtaccctggtgatgtttttgctagacattagctgtagctgacagcataaggagagtcgcatcagagcttttcacagccccccgaaaccccagcctggttttgatggcagcagtaatcatgatagtgtgaacccgcgaaggcctcaggattatggttaacctggagaggagcaggccatggaggcaggtgccaggtcagtattgagtcacagtagaggccccacaaggacctgcttgggtgagaccacctctcccctctcagcagcgctggtgggctctttgtcctggtgcccaggagccctccagccccctgcccacagaagggaaggcctgcagagggggccaggatctacctaaccatttccccacccctaagtccctcagtgggctttgccttataggtgccacagggcacagctccatcattgccactggtttttcctaagtcatgcaccaaggacttcagaaagttcttcctccgagtcagtcagtggtgccgggaccccagggcagcctcctcgactcctgaagaaaaggcagtgcccgtggctgcctctgtcttcactcgctgttgatgtgaccgccaggcctcctctcgtaccttggacaaaggatacacctgaaccagaatagttttcttaccctcacattgaaatgaggattttgcttaaaacagcacttgccgccagtgggaggagggaggttttatttattcccacagtttctcctgggccttctggaatgaccatgttttcctgtggcggtgggtgtgtcattgcgcccgccgtcttccaaagccttacttccccaagctgccagccaggaggtgataaccaccctcccagagtttctctcggctctttttttaaaagtcccccaacaaataggattcttgctgggaaaggaagttcggtaaggaaatgtcaaatctggtttttaaacaaggtccaaccctgcaatgaagcagccacttcagcccagagagattataagaactgatgtggccagagtgcctacccactgtggccccggtgctctgcccccacgccccgaccatctggtcttggtagatgtccctagacgggctgagccatgtgcaataagaacatagatcctaaaggatcctctggaagctgtatttcttgaattagaattctcaaattgtacatctgttaatatatgtttattatgtgactggc

SEQ ID NO: 315532 - DNA, 4308 bp, Homo sapiens
ccgacggctaccacgtgaccttcctgagcttgggtttcctcctccggaagattagagggttggcgcatactcaactctaagacctccggaacatggaatctgggcgtgcaccattattgacacctacaccagccgtccctttcttagaagacatacggtagcacttccaccctcgctcaaaactcgggaaaggaggggcggagggtggatgtcatcactccgcgcccggctgcccgcgacgcgccggcgggtggcgcagcccttcgctcgcccggcctccccctccctggttccgcgttctggttccgccatggaatccaacaaggatgaagctgagcgctgtatcagcatcgccctcaaggccatccagagcaaccagcccgaccgggcgctccgcttcctggagaaggcacagcggctgtatccgacgccgcgagttcgcgccctgattgagtccctcaaccagaaaccacagactgccggtgaccaacccccacccacagacacaacccatgccacccacaggaaagcaggtgggaccgatgccccctcggccaacggtgaagctggaggagagagcaccaaaggctacactgcagaacaggttgcagctgtgaaaagggtcaagcaatgtaaagattactatgagatcctgggggtgagcagaggggcctcggatgaggacctgaagaaggcctaccgcagactggccctcaaattccacccagacaagaaccacgcacctggtgccactgaagccttcaaagccattggcacagcatatgcggtactcagcaacccggagaagaggaagcagtatgaccagttcggcgatgacaagagccaggcggcccggcacggccatgggcatggggatttccaccgtggctttgaggccgacatctcccctgaagacctcttcaacatgttctttggcggcggcttcccttctagtaacgtccacgtctacagcaacggccgcatgcgctatacctaccagcaaaggcaggaccgcagggacaaccagggtgatgtccgtgggccacatccacaggcgagtcactgaccacctgggtgtcgtctactatgtgggagacactttctccgaagagtacacaggctccagcctcaaaacagtcgagcggaatgtggaagatgattatatcgccaacctccggaacaactgctggaaggagaagcagcagaaggaaggcttgctgtaccgggcacgctactttggcgacacagatatgtaccacagagcacagaagatgggcacccccagctgcagccgactgtcagaggtgcaggcctccctgcatggatagtcctgggccagccacaccaccgaggtccaagtatgagccagggctgcctccaccctgcaactcctggcagctttggccctggtcatgagcagaggagggagggggagaaagggaggaagcctggtgattgtggcaaagactcctgtccccagcctgacctccagcctccagagaccgagcagctgtggggcctgctgggaaaccaaggtcggtttccgccctctagcgatgctgtcctccccactcctccgctctgctccctggctccaggggtgtgggggaccccagaaccaggcagagtgggaacttgaaactgttgctgagggccacccggggcttcttggtccactccagccatcagtcagcacggccctttctccagcacagcagactattgtccgtgccctggtatttaggccatcacatatggtggggcccaagagagccccatatgcacactgcctgcctgataccaggaagaaccatgtgggaataggtgggccaagagccctcccctttctccatccctccagctaggaggaaatggagcaagatgaacaggcagccacgaggtgggtgggagctggcagtcttggtggcggcaggggccgcgggccctgaccacccccctctggtgggatctgaggcactctctcgaatgccgtcacacctggcagcctggaagccacaggcatccggccttgcccaggcatctcgcctgcggtctgaggaagggaacagaaggtcatgagttcagggtcagacgcagccgctcagcacaggaggggtggaggggaaatgagagttgctggtagcaggctccctccttctgcagcccggcgaatgggggcgctgggctctgttcccagcgtttgccagaggtggccacttcagccaagcccggagaagtgtgggcagaagcagtgaaggttcttctctgtgtgggtgccctgcccaccccctcctttgcctgtgtcctcccggcctggatccatggctgactctgcctggaggccatttgtgcctgcctctgtgctgccgcaggagggcaggccgcaagtggggttggtgggggtcgagcgggcagcacggtgcagcggtgcagtggcaaggggggctacttgtgtggcataagctagaggagccggtgccgcctgaatgccgagctaactgttgccactctcctccccagactatgaaatccctggagaatttttggtgacatgcactgagccaaggtgatggactgtatatttgaggaaagacaaacaaagaaacaaaattaaaatggaattggaggccgaacgctgcacagctgccctctctctcacccagtaaatgcagaaagctcttaggacagacagaaaacctgccatggggctgcttccctccctcgcagggctggcggaggctccgcatcgcctctctcctaggatacagaaaccatggcaacgaaagtagaatgtaaaactcgcagcagatatcagtgggaagggctgggggagggggcacccagctgcctttcctccctcacaggagccaccaccagccacctctcaggagaagccagaggccctggccaaagataggaggaagaaagagaactctccatagaatgtaatttatagatgcgtgtatatgtatatatatctatttatatgtaaataggcatatatgaagatatatatatatatagtctactttttaaactctgcagggatttggttaagttgttgagctgatttcttccatgttttagaaaatgaggcctgtttggggaaggtaccctggtgatgtttttgctagacattagctgtagctgacagcataaggagagtcgcatcagagcttttcacagccccccgaaaccccagcctggttttgatggcagcagtaatcatgatagtgtgaacccgcgaaggcctcaggattatggttaacctggagaggagcaggccatggaggcaggtgccaggtcagtattgagtcacagtagaggccccacaaggacctgcttgggtgagaccacctctcccctctcagcagcgctggtgggctctttgtcctggtgcccaggagccctccagccccctgcccacagaagggaaggcctgcagagggggccaggatctacctaaccatttccccacccctaagtccctcagtgggctttgccttataggtgccacagggcacagctccatcattgccactggtttttcctaagtcatgcaccaaggacttcagaaagttcttcctccgagtcagtcagtggtgccgggaccccagggcagcctcctcgactcctgaagaaaaggcagtgcccgtggctgcctctgtcttcactcgctgttgatgtgaccgccaggcctcctctcgtaccttggacaaaggatacacctgaaccagaatagttttcttaccctcacattgaaatgaggattttgcttaaaacagcacttgccgccagtgggaggagggaggttttatttattcccacagtttctcctgggccttctggaatgaccatgttttcctgtggcggtgggtgtgtcattgcgcccgccgtcttccaaagccttacttccccaagctgccagccaggaggtgataaccaccctcccagagtttctctcggctctttttttaaaagtcccccaacaaataggattcttgctgggaaaggaagttcggtaaggaaatgtcaaatctggtttttaaacaaggtccaaccctgcaatgaagcagccacttcagcccagagagattataagaactgatgtggccagagtgcctacccactgtggccccggtgctctgcccccacgccccgaccatctggtcttggtagatgtccctagacgggctgagccatgtgcaataagaacatagatcctaaaggatcctctggaagctgtatttcttgaattagaattctcaaattgtacatctgttaatatatgtttattatgtgactggc

SEQ ID NO: 315533 - DNA, 3939 bp, Homo sapiens
gacgggagcagttgggggagggggaggggtggcgaggcgcggctacgcctgcgcactgaggcgcgcggtggctgctgggaggcgtagtttttccctcttgttcctctgcgggatgcgagccgtctggagactcgggcggccgggacttcagctttcggggtgctggcggagcccgctggggtttgaggtctccgagaatgaaacgcgctggcagccgggacgaagggaacttacctggaagtgaactcgaactacttttcccaaggggccgttcggtagcccaggccagtcgccggcctgggaaatattacagttcaggaaaataaacataactcctttaagggagagaatgggcgctagacagggagacatttctgttcttcgggcgccagggaaaggcgcttccgtatcttcactccctctcacctctcgggctgagggtcagggaccactctcccaaaatgcaagccggcctttgcacccaccccagtccgccgcctcggactgtcctgaagccgggcccctcactcctcccgatgatgagattcggagcgggtggcctggtgggaggtgctgacctcagccaccgccagtcctccatcgcccgcaagagtccagcggcggtcagccatgtggacgccgaggctgctgagttgccctggacaggagcctcctgagccagggagggaagagtgaagctggctttacaactcatcacctcgcttcacccgggaaccctttcttttttctttaacctaagttttccaaggagtttttcttaatccacgctagaggggagagagacaccgggtggtgcttgtgatcaccactcagtaaaccgtctgggaataacaggcactccgaagggcccagtctcatcctgacggctaccacgtgaccttcctgagcttgggtttcctcctcgggaagattagagggttggcgcagataatgtgattggcaataatacccatagggctttgcagtttaggaagctccttcacctgtgccttctcacttgagcctgccagtcagggatgcagagcaaagatcattatctttattctatgggtgaggaaaatctctgaggtaagggatgcccaggatgacacagctagaaagtaaaatgttctgtgactctgtaaatgtttatgaaggaaaagaaatgaaattgaggaacagcagtcagcctcctaaccggccctgcccgcctgatgagattgagaaagcggaacgctggtggaagaggtagcctggactgctgaactttcctccctccggactcttgcaggttgatctttggcctgtttgcctccccttggagagggtttcgggctgtatttgccaggacacctgagggtcaagcaatgtaaagattactatgagatcctgggggtgagcagaggggcctcggatgaggacctgaagaaggcctaccgcagactggccctcaaattccacccagacaagaaccacgcacctggtgccactgaagccttcaaagccattggcacagcatatgcggtactcagcaacccggagaagaggaagcagtatgaccagttcggcgatgacaagagccaggcggcccggcacggccatgggcatggggatttccaccgtggctttgaggccgacatctcccctgaagacctcttcaacatgttctttggcggcggcttcccttctagtaacgtccacgtctacagcaacggccgcatgcgctatacctaccagcaaaggcaggaccgcagggacaaccagggtgatggcgggctaggggtgtttgtgcagctgatgcctatcctcatcctgattctcgtgtcagctctcagccagctcatggtctccagtccaccctacagtctgagtccaagaccgtccgtgggccacatccacaggcgagtcactgaccacctgggtgtcgtctactatgtgggagacactttctccgaagagtacacaggctccagcctcaaaacagtcgagcggaatgtggaagatgattatatcgccaacctccggaacaactgctggaaggagaagcagcagaaggaaggcttgctgtaccgggcacgctactttggcgacacagatatgtaccacagagcacagaagatgggcacccccagctgcagccgactgtcagagactatgaaatccctggagaatttttggtgacatgcactgagccaaggtgatggactgtatatttgaggaaagacaaacaaagaaacaaaattaaaatggaattggaggccgaacgctgcacagctgccctctctctcacccagtaaatgcagaaagctcttaggacagacagaaaacctgccatggggctgcttccctccctcgcagggctggcggaggctccgcatcgcctctctcctaggatacagaaaccatggcaacgaaagtagaatgtaaaactcgcagcagatatcagtgggaagggctgggggagggggcacccagctgcctttcctccctcacaggagccaccaccagccacctctcaggagaagccagaggccctggccaaagataggaggaagaaagagaactctccatagaatgtaatttatagatgcgtgtatatgtatatatatctatttatatgtaaataggcatatatgaagatatatatatatatagtctactttttaaactctgcagggatttggttaagttgttgagctgatttcttccatgttttagaaaatgaggcctgtttggggaaggtaccctggtgatgtttttgctagacattagctgtagctgacagcataaggagagtcgcatcagagcttttcacagccccccgaaaccccagcctggttttgatggcagcagtaatcatgatagtgtgaacccgcgaaggcctcaggattatggttaacctggagaggagcaggccatggaggcaggtgccaggtcagtattgagtcacagtagaggccccacaaggacctgcttgggtgagaccacctctcccctctcagcagcgctggtgggctctttgtcctggtgcccaggagccctccagccccctgcccacagaagggaaggcctgcagagggggccaggatctacctaaccatttccccacccctaagtccctcagtgggctttgccttataggtgccacagggcacagctccatcattgccactggtttttcctaagtcatgcaccaaggacttcagaaagttcttcctccgagtcagtcagtggtgccgggaccccagggcagcctcctcgactcctgaagaaaaggcagtgcccgtggctgcctctgtcttcactcgctgttgatgtgaccgccaggcctcctctcgtaccttggacaaaggatacacctgaaccagaatagttttcttaccctcacattgaaatgaggattttgcttaaaacagcacttgccgccagtgggaggagggaggttttatttattcccacagtttctcctgggccttctggaatgaccatgttttcctgtggcggtgggtgtgtcattgcgcccgccgtcttccaaagccttacttccccaagctgccagccaggaggtgataaccaccctcccagagtttctctcggctctttttttaaaagtcccccaacaaataggattcttgctgggaaaggaagttcggtaaggaaatgtcaaatctggtttttaaacaaggtccaaccctgcaatgaagcagccacttcagcccagagagattataagaactgatgtggccagagtgcctacccactgtggccccggtgctctgcccccacgccccgaccatctggtcttggtagatgtccctagacgggctgagccatgtgcaataagaacatagatcctaaaggatcctctggaagctgtatttcttgaattagaattctcaaattgtacatctgttaatatatgtttattatgtgactggc

SEQ ID NO: 315534 - DNA, 2743 bp, Homo sapiens
ccgacggctaccacgtgaccttcctgagcttgggtttcctcctccggaagattagagggttggcgcatactcaactctaagacctccggaacatggaatctgggcgtgcaccattattgacacctacaccagccgtccctttcttagaagacatacggtagcacttccaccctcgctcaaaactcgggaaaggaggggcggagggtggatgtcatcactccgcgcccggctgcccgcgacgcgccggcgggtggcgcagcccttcgctcgcccggcctccccctccctggttccgcgttctggttccgccatggaatccaacaaggatgaagctgagcgctgtatcagcatcgccctcaaggccatccagagcaaccagcccgaccgggcgctccgcttcctggagaaggcacagcggctgtatccgacgccgcgagttcgcgccctgattgagtccctcaaccagaaaccacagactgccggtgaccaacccccacccacagacacaacccatgccacccacaggaaagcaggtgggaccgatgccccctcggccaacggtgaagctggaggagagagcaccaaaggctacactgcagaacaggttgcagctgtgaaaagggtcaagcaatgtaaagattactatgagatcctgggggtgagcagaggggcctcggatgaggacctgaagaaggcctaccgcagactggccctcaaattccacccagacaagaaccacgcacctggtgccactgaagccttcaaagccattggcacagcatatgcggtactcagcaacccggagaagaggaagcagtatgaccagttcggcgatgacaagagccaggcggcccggcacggccatgggcatggggatttccaccgtggctttgaggccgacatctcccctgaagacctcttcaacatgttctttggcggcggcttcccttctagtaacgtccacgtctacagcaacggccgcatgcgctatacctaccagcaaaggcaggaccgcagggacaaccagggtgatggcgggctaggggtgtttgtgcagctgatgcctatcctcatcctgattctcgtgtcagctctcagccagctcatggtctccagtccaccctacagtctgagtccaagaccgtccgtgggccacatccacaggcgagtcactgaccacctgggtgtcgtctactatgtgggagacactttctccgaagagtacacaggctccagcctcaaaacagtcgagcggaatgtggaagatgattatatcgccaacctccggaacaactgctggaaggagaagcagcagaaggaaggcttgctgtaccgggcacgctactttggcgacacagatatgtaccacagagcacagaagatgggcacccccagctgcagccgactgtcagaggtgcaggcctccctgcatggatagtcctgggccagccacaccaccgaggtccaagtatgagccagggctgcctccaccctgcaactcctggcagctttggccctggtcatgagcagaggagggagggggagaaagggaggaagcctggtgattgtggcaaagactcctgtccccagcctgacctccagcctccagagaccgagcagctgtggggcctgctgggaaaccaaggtcggtttccgccctctagcgatgctgtcctccccactcctccgctctgctccctggctccaggggtgtgggggaccccagaaccaggcagagtgggaacttgaaactgttgctgagggccacccggggcttcttggtccactccagccatcagtcagcacggccctttctccagcacagcagactattgtccgtgccctggtatttaggccatcacatatggtggggcccaagagagccccatatgcacactgcctgcctgataccaggaagaaccatgtgggaataggtgggccaagagccctcccctttctccatccctccagctaggaggaaatggagcaagatgaacaggcagccacgaggtgggtgggagctggcagtcttggtggcggcaggggccgcgggccctgaccacccccctctggtgggatctgaggcactctctcgaatgccgtcacacctggcagcctggaagccacaggcatccggccttgcccaggcatctcgcctgcggtctgaggaagggaacagaaggtcatgagttcagggtcagacgcagccgctcagcacaggaggggtggaggggaaatgagagttgctggtagcaggctccctccttctgcagcccggcgaatgggggcgctgggctctgttcccagcgtttgccagaggtggccacttcagccaagcccggagaagtgtgggcagaagcagtgaaggttcttctctgtgtgggtgccctgcccaccccctcctttgcctgtgtcctcccggcctggatccatggctgactctgcctggaggccatttgtgcctgcctctgtgctgccgcaggagggcaggccgcaagtggggttggtgggggtcgagcgggcagcacggtgcagcggtgcagtggcaaggggggctacttgtgtggcataagctagaggagccggtgccgcctgaatgccgagctaactgttgccactctcctccccagactatgaaatccctggagaatttttggtgacatgcactgagccaaggtgatggactgtatatttgaggaaagacaaacaaagaaacaaaattaaaatggaattggaggccgaa

SEQ ID NO: 315535 - DNA, 1527 bp, Homo sapiens
ccgacggctaccacgtgaccttcctgagcttgggtttcctcctccggaagattagagggttggcgcatactcaactctaagacctccggaacatggaatctgggcgtgcaccattattgacacctacaccagccgtccctttcttagaagacatacggtagcacttccaccctcgctcaaaactcgggaaaggaggggcggagggtggatgtcatcactccgcgcccggctgcccgcgacgcgccggcgggtggcgcagcccttcgctcgcccggcctccccctccctggttccgcgttctggttccgccatggaatccaacaaggatgaagctgagcgctgtatcagcatcgccctcaaggccatccagagcaaccagcccgaccgggcgctccgcttcctggagaaggcacagcggctgtatccgacgccgcgagttcgcgccctgattgagtccctcaaccagaaaccacagactgccggtgaccaacccccacccacagacacaacccatgccacccacaggaaagcaggtgggaccgatgccccctcggccaacggtgaagctggaggagagagcaccaaaggctacactgcagaacaggttgcagctgtgaaaagggtcaagcaatgtaaagattactatgagatcctgggggtgagcagaggggcctcggatgaggacctgaagaaggcctaccgcagactggccctcaaattccacccagacaagaaccacgcacctggtgccactgaagccttcaaagccattggcacagcatatgcggtactcagcaacccggagaagaggaagcagtatgaccagttcggcgatgacaagagccaggcggcccggcacggccatgggcatggggatttccaccgtggctttgaggccgacatctcccctgaagacctcttcaacatgttctttggcggcggcttcccttctagtaacgtccacgtctacagcaacggccgcatgcgctatacctaccagcaaaggcaggaccgcagggacaaccagggtgatggcgggctaggggtgtttgtgcagctgatgcctatcctcatcctgattctcgtgtcagctctcagccagctcatggtctccagtccaccctacagtctgagtccaagaccgtccgtgggccacatccacaggcgagtcactgaccacctgggtgtcgtctactatgtgggagacactttctccgaagagtacacaggctccagcctcaaaacagtcgagcggaatgtggaagatgattatatcgccaacctccggaacaactgctggaaggagaagcagcagaaggaaggcttgctgtaccgggcacgctactttggcgacacagatatgtaccacagagcacagaagatgggcacccccagctgcagccgactgtcagagactatgaaatccctggagaatttttggtgacatgcactgagccaaggtgatggactgtatatttgaggaaagacaaacaaagaaacaaaattaaaatggaattggaggccgaa

SEQ ID NO: 315536 - DNA, 2003 bp, Homo sapiens
ccgacggctaccacgtgaccttcctgagcttgggtttcctcctccggaagattagagggttggcgcatactcaactctaagacctccggaacatggaatctgggcgtgcaccattattgacacctacaccagccgtccctttcttagaagacatacggtagcacttccaccctcgctcaaaactcgggaaaggaggggcggagggtggatgtcatcactccgcgcccggctgcccgcgacgcgccggcgggtggcgcagcccttcgctcgcccggcctccccctccctggttccgcgttctggttccgccatggaatccaacaaggatgaagctgagcgctgtatcagcatcgccctcaaggccatccagagcaaccagcccgaccgggcgctccgcttcctggagaaggcacagcggctgtatccgacgccgcgagttcgcgccctgattgagtccctcaaccagaaaccacagactgccggtgaccaacccccacccacagacacaacccatgccacccacaggaaagcaggtgggaccgatgccccctcggccaacggtgaagctggaggagagagcaccaaaggctacactgcagaacaggttgcagctgtgaaaagggtcaagcaatgtaaagattactatgagatcctgggggtgagcagaggggcctcggatgaggacctgaagaaggcctaccgcagactggccctcaaattccacccagacaagaaccacgcacctggtgccactgaagccttcaaagccattggcacagcatatgcggtactcagcaacccggagaagaggaagcagtatgaccagttcggcgatgacaagagccaggcggcccggcacggccatgggcatggggatttccaccgtggctttgaggccgacatctcccctgaagacctcttcaacatgttctttggcggcggcttcccttctagtaacgtccacgtctacagcaacggccgcatgcgctatacctaccagcaaaggcaggaccgcagggacaaccagggtgatggcgggctaggggtgtttgtgcagctgatgcctatcctcatcctgattctcgtgtcagctctcagccagctcatggtctccagtccaccctacagtctgagtccaagaccgtccgtgggccacatccacaggcgagtcactgaccacctgggtgtcgtctactatgtgggagacactttctccgaagagtacacaggctccagcctcaaaacagtcgagcggaatgtggaagatgattatatcgccaacctccggaacaactgctggaaggagaagcagcagaaggaaggcttgctgtaccgggcacgctactttggcgacacagatatgtaccacagagcacagaagatgggcacccccagctgcagccgactgtcagagactatgaaatccctggagaatttttggtgacatgcactgagccaaggtgatggactgtatatttgaggaaagacaaacaaagaaacaaaattaaaatggaattggaggccgaaaaaaaaaaaaaaaaaaaaaaaaaaaaaaaaaaaaaaagaaaaaaaaaaaaaaaaaataaaaaaaaaaaaaaaaaaaagaaagagaaaggacagaaaaacacaacacagaaaacgagaagaataacaacattcaaaccgagaaatagccaagaaataacgatgggtcggatgttccaatagaaagcagcgatcgacagaccagaacgcctgtaaccgtcgcacgaccatccaaggtaacagcaggatactcgtcgtcggaaatgggatcccccaaaaatggtcaaagaaaagcgcgtctgtagacatcccacatcgggggacctacaaggatgggagagcaccatcaatgggaagaagcacaagccataccaggagcacttccacgcagcatccacgcagcacgtaccgggaatgtgccgccggaagcctcccacaagggaagcaggggaggcacacgcacacaagatcgcaccggt

SEQ ID NO: 315537 - DNA, 1484 bp, Homo sapiens
ccgacggctaccacgtgaccttcctgagcttgggtttcctcctccggaagattagagggttggcgcatactcaactctaagacctccggaacatggaatctgggcgtgcaccattattgacacctacaccagccgtccctttcttagaagacatacggtagcacttccaccctcgctcaaaactcgggaaaggaggggcggagggtggatgtcatcactccgcgcccggctgcccgcgacgcgccggcgggtggcgcagcccttcgctcgcccggcctccccctccctggttccgcgttctggttccgccatggaatccaacaaggatgaagctgagcgctgtatcagcatcgccctcaaggccatccagagcaaccagcccgaccgggcgctccgcttcctggagaaggcacagcggctgtatccgacgccgcgagttcgcgccctgattgagtccctcaaccagaaaccacagactgccggtgaccaacccccacccacagacacaacccatgccacccacaggaaagcaggtgggaccgatgccccctcggccaacggtgaagctggaggagagagcaccaaaggctacactgcagaacaggttgcagctgtgaaaagggtcaagcaatgtaaagattactatgagatcctgggggtgagcagaggggcctcggatgaggacctgaagaaggcctaccgcagactggccctcaaattccacccagacaagaaccacgcacctggtgccactgaagccttcaaagccattggcacagcatatgcggtactcagcaacccggagaagaggaagcagtatgaccagttcggcgatgacaagagccaggcggcccggcacggccatgggcatggggatttccaccgtggctttgaggccgacatctcccctgaagacctcttcaacatgttctttggcggcggcttcccttctagtaacgtccacgtctacagcaacggccgcatgcgctatacctaccagcaaaggcaggaccgcagggacaaccagggtgatggcgggctaggggtgtttgtgcagctgatgcctatcctcatcctgattctcgtgtcagctctcagccagctcatggtctccagtccaccctacagtctgagtccaagaccgtgagtacatgggtgaggccgggccatgggcagacaaggggctttaaattctcagccccatcaggggccttctttcccatcctgatccagccagtgtgcgatcataatgcagaaacctggcttcgaatcaagaaaatatactttctctattcaactaggactcttaagctttttaggattatggtcccctaagaaattgcagcgagagctacagaacttttccctaaaactatgcacacatgtgcacacacatacacacacacgatacacatgtacacacacacacaatacatgcacacacataatacacatgcacacatacacgcacacatatacacaca

SEQ ID NO: 315538 - DNA, 2264 bp, Homo sapiens
gacgggagcagttgggggagggggaggggtggcgaggcgcggctacgcctgcgcactgaggcgcgcggtggctgctgggaggcgtagtttttccctcttgttcctctgcgggatgcgagccgtctggagactcgggcggccgggacttcagctttcggggtgctggcggagcccgctggggtttgaggtctccgagaatgaaacgcgctggcagccgggacgaagggaacttacctggaagtgaactcgaactacttttcccaaggggccgttcggtagcccaggccagtcgccggcctgggaaatattacagttcaggaaaataaacataactcctttaagggagagaatgggcgctagacagggagacatttctgttcttcgggcgccagggaaaggcgcttccgtatcttcactccctctcacctctcgggctgagggtcagggaccactctcccaaaatgcaagccggcctttgcacccaccccagtccgccgcctcggactgtcctgaagccgggcccctcactcctcccgatgatgagattcggagcgggtggcctggtgggaggtgctgacctcagccaccgccagtcctccatcgcccgcaagagtccagcggcggtcagccatgtggacgccgaggctgctgagttgccctggacaggagcctcctgagccagggagggaagagtgaagctggctttacaactcatcacctcgcttcacccgggaaccctttcttttttctttaacctaagttttccaaggagtttttcttaatccacgctagaggggagagagacaccgggtggtgcttgtgatcaccactcagtaaaccgtctgggaataacaggcactccgaagggcccagtctcatcctgacggctaccacgtgaccttcctgagcttgggtttcctcctcgggaagattagagggttggcgcagataatgtgattggcaataatacccatagggctttgcagtttaggaagctccttcacctgtgccttctcacttgagcctgccagtcagggatgcagagcaaagatcattatctttattctatgggtgaggaaaatctctgaggtaagggatgcccaggatgacacagctagaaagtaaaatgttctgtgactctgtaaatgtttatgaaggaaaagaaatgaaattgaggaacagcagtcagcctcctaaccggccctgcccgcctgatgagattgagaaagcggaacgctggtggaagaggtagcctggactgctgaactttcctccctccggactcttgcaggttgatctttggcctgtttgcctccccttggagagggtttcgggctgtatttgccaggacacctgagggtcaagcaatgtaaagattactatgagatcctgggggtgagcagaggggcctcggatgaggacctgaagaaggcctaccgcagactggccctcaaattccacccagacaagaaccacgcacctggtgccactgaagccttcaaagccattggcacagcatatgcggtactcagcaacccggagaagaggaagcagtatgaccagttcggcgatgacaagagccaggcggcccggcacggccatgggcatggggatttccaccgtggctttgaggccgacatctcccctgaagacctcttcaacatgttctttggcggcggcttcccttctagtaacgtccacgtctacagcaacggccgcatgcgctatacctaccagcaaaggcaggaccgcagggacaaccagggtgatggcgggctaggggtgtttgtgcagctgatgcctatcctcatcctgattctcgtgtcagctctcagccagctcatggtctccagtccaccctacagtctgagtccaagaccgtccgtgggccacatccacaggcgagtcactgaccacctgggtgtcgtctactatgtgggagacactttctccgaagagtacacaggctccagcctcaaaacagtcgagcggaatgtggaagatgattatatcgccaacctccggaacaactgctggaaggagaagcagcagaaggaaggcttgctgtaccgggcacgctactttggcgacacagatatgtaccacagagcacagaagatgggcacccccagctgcagccgactgtcagagactatgaaatccctggagaatttttggtgacatgcactgagccaaggtgatggactgtatatttgaggaaagacaaacaaagaaacaaaattaaaatggaattggaggccgaa

SEQ ID NO: 315539 - DNA, 839 bp, Homo sapiens
  misc_feature (794)..(794): n is a, c, g, or t
  misc_feature (796)..(796): n is a, c, g, or t
  misc_feature (801)..(801): n is a, c, g, or t
  misc_feature (803)..(803): n is a, c, g, or t
  misc_feature (805)..(805): n is a, c, g, or t
cgctgccttttcctcagactctcctttcagggagtgtgcgggtccctgctctggtttgagagggaaccaactactcctctggtctgtgcggcacctcctgtcttggggcccatacccctagagtgccctgggcatggggacccgcacccactttgaacctggtatttctggccaggtccgtgggccacatccacaggcgagtcactgaccacctgggtgtcgtctactatgtgggagacactttctccgaagagtacacaggctccagcctcaaaacagtcgagcggaatgtggaagatgattatatcgccaacctccggaacaactgctggaaggagaagcagcagaaggaaggcttgctgtaccgggcacgctactttggcgacacagatatgtaccacagagcacagaagatgggcacccccagctgcagccgactgtcagaggtgcaggcctccctgcatggatagtcctgggccagccacaccaccgaggtccaagtatgagccagggctgcctccaccctgcaactcctggcagctttggccctggtcatgagcagaggagggagggggagaaagggaggaagcctggtgattgtggcaaagactcctgtccccagcctgacctccagcctccagagaccgagcagctgtggggcctgctgggaaaccaaggtcggtttccgccctctagcgatgctgtcctccccactcctccgctctgctccctggctccaggggtgtgggggaccccagaaccaggcagagtgggaacttgaaacgtgtgaggcncngggtntngncattcaggatagcagaggctcccacagccatctg

SEQ ID NO: 315540 - DNA, 3256 bp, Homo sapiens
ccgacggctaccacgtgaccttcctgagcttgggtttcctcctccggaagattagagggttggcgcatactcaactctaagacctccggaacatggaatctgggcgtgcaccattattgacacctacaccagccgtccctttcttagaagacatacggtagcacttccaccctcgctcaaaactcgggaaaggaggggcggagggtggatgtcatcactccgcgcccggctgcccgcgacgcgccggcgggtggcgcagcccttcgctcgcccggcctccccctccctggttccgcgttctggttccgccatggaatccaacaaggatgaagctgagcgctgtatcagcatcgccctcaaggccatccagagcaaccagcccgaccgggcgctccgcttcctggagaaggcacagcggctgtatccgacgccgcgagttcgcgccctgattgagtccctcaaccagaaaccacagactgccggtgaccaacccccacccacagacacaacccatgccacccacaggaaagcaggtgggaccgatgccccctcggccaacggtgaagctggaggagagagcaccaaaggctacactgcagaacaggttgcagctgtgaaaagggtcaagcaatgtaaagattactatgagatcctgggggtgagcagaggggcctcggatgaggacctgaagaaggcctaccgcagactggccctcaaattccacccagacaagaaccacgcacctggtgccactgaagccttcaaagccattggcacagcatatgcggtactcagcaacccggagaagaggaagcagtatgaccagttcggcgatgacaagagccaggcggcccggcacggccatgggcatggggatttccaccgtggctttgaggccgacatctcccctgaagacctcttcaacatgttctttggcggcggcttcccttctagtaacgtccacgtctacagcaacggccgcatgcgctatacctaccagcaaaggcaggaccgcagggacaaccagggtgatggcgggctaggggtgtttgtgcagctgatgcctatcctcatcctgattctcgtgtcagctctcagccagctcatggtctccagtccaccctacagtctgagtccaagaccgtccgtgggccacatccacaggcgagtcactgaccacctgggtgtcgtctactatgtgggagacactttctccgaagagtacacaggctccagcctcaaaacagtcgagcggaatgtggaagatgattatatcgccaacctccggaacaactgctggaaggagaagcagcagaaggaaggcttgctgtaccgggcacgctactttggcgacacagatatgtaccacagagcacagaagatgggcacccccagctgcagccgactgtcagaggtgcaggcctccctgcatggatagtcctgggccagccacaccaccgaggtccaaactatgaaatccctggagaatttttggtgacatgcactgagccaaggtgatggactgtatatttgaggaaagacaaacaaagaaacaaaattaaaatggaattggaggccgaacgctgcacagctgccctctctctcacccagtaaatgcagaaagctcttaggacagacagaaaacctgccatggggctgcttccctccctcgcagggctggcggaggctccgcatcgcctctctcctaggatacagaaaccatggcaacgaaagtagaatgtaaaactcgcagcagatatcagtgggaagggctgggggagggggcacccagctgcctttcctccctcacaggagccaccaccagccacctctcaggagaagccagaggccctggccaaagataggaggaagaaagagaactctccatagaatgtaatttatagatgcgtgtatatgtatatatatctatttatatgtaaataggcatatatgaagatatatatatatatagtctactttttaaactctgcagggatttggttaagttgttgagctgatttcttccatgttttagaaaatgaggcctgtttggggaaggtaccctggtgatgtttttgctagacattagctgtagctgacagcataaggagagtcgcatcagagcttttcacagccccccgaaaccccagcctggttttgatggcagcagtaatcatgatagtgtgaacccgcgaaggcctcaggattatggttaacctggagaggagcaggccatggaggcaggtgccaggtcagtattgagtcacagtagaggccccacaaggacctgcttgggtgagaccacctctcccctctcagcagcgctggtgggctctttgtcctggtgcccaggagccctccagccccctgcccacagaagggaaggcctgcagagggggccaggatctacctaaccatttccccacccctaagtccctcagtgggctttgccttataggtgccacagggcacagctccatcattgccactggtttttcctaagtcatgcaccaaggacttcagaaagttcttcctccgagtcagtcagtggtgccgggaccccagggcagcctcctcgactcctgaagaaaaggcagtgcccgtggctgcctctgtcttcactcgctgttgatgtgaccgccaggcctcctctcgtaccttggacaaaggatacacctgaaccagaatagttttcttaccctcacattgaaatgaggattttgcttaaaacagcacttgccgccagtgggaggagggaggttttatttattcccacagtttctcctgggccttctggaatgaccatgttttcctgtggcggtgggtgtgtcattgcgcccgccgtcttccaaagccttacttccccaagctgccagccaggaggtgataaccaccctcccagagtttctctcggctctttttttaaaagtcccccaacaaataggattcttgctgggaaaggaagttcggtaaggaaatgtcaaatctggtttttaaacaaggtccaaccctgcaatgaagcagccacttcagcccagagagattataagaactgatgtggccagagtgcctacccactgtggccccggtgctctgcccccacgccccgaccatctggtcttggtagatgtccctagacgggctgagccatgtgcaataagaacatagatcctaaaggatcctctggaagctgtatttcttgaattagaattctcaaattgtacatctgttaatatatgtttattatgtgactggc

SEQ ID NO: 315541 - DNA, 3104 bp, Homo sapiens
ccgacggctaccacgtgaccttcctgagcttgggtttcctcctccggaagattagagggttggcgcatactcaactctaagacctccggaacatggaatctgggcgtgcaccattattgacacctacaccagccgtccctttcttagaagacatacggtagcacttccaccctcgctcaaaactcgggaaaggaggggcggagggtggatgtcatcactccgcgcccggctgcccgcgacgcgccggcgggtggcgcagcccttcgctcgcccggcctccccctccctggttccgcgttctggttccgccatggaatccaacaaggatgaagctgagcgctgtatcagcatcgccctcaaggccatccagagcaaccagcccgaccgggcgctccgcttcctggagaaggcacagcggctgtatccgacgccgcgagttcgcgccctgattgagtccctcaaccagaaaccacagactgccggtgaccaacccccacccacagacacaacccatgccacccacaggaaagcaggtgggaccgatgccccctcggccaacggtgaagctggaggagagagcaccaaaggctacactgcagaacaggttgcagctgtgaaaagggtcaagcaatgtaaagattactatgagatcctgggggtgagcagaggggcctcggatgaggacctgaagaaggcctaccgcagactggccctcaaattccacccagacaagaaccacgcacctggtgccactgaagccttcaaagccattggcacagcatatgcggtactcagcaacccggagaagaggaagcagtatgaccagttcggcgatgacaagagccaggcggcccggcacggccatgggcatggggatttccaccgtggctttgaggccgacatctcccctgaagacctcttcaacatgttctttggcggcggcttcccttctagtaacgtccacgtctacagcaacggccgcatgcgctatacctaccagcaaaggcaggaccgcagggacaaccagggtgatggcgggctaggggtgtttgtgcagctgatgcctatcctcatcctgattctcgtgtcagctctcagccagctcatggtctccagtccaccctacagtctgagtccaagaccgtccgtgggccacatccacaggcgagtcactgaccacctgggtgtcgtctactatgtgggagacactttctccgaagagtacacaggctccagcctcaaaacagtcgagcggaatgtggaagatgattatatcgccaacctccggaacaactgctggaaggagaagcagcagaaggaaggcttgctgtaccgggcacgctactttggcgacacagatatgtaccacagagcacagaagatgggcacccccagctgcagccgactgtcagaggtgcaggcctccctgcatggatagtcctgggccagccacaccaccgaggtccaaactatgaaatccctggagaatttttggtgacatgcactgagccaaggtgatggactgtatatttgaggaaagacaaacaaagaaacaaaattaaaatggaattggaggccgaacgctgcacagctgccctctctctcacccagtaaatgcagaaagctcttaggacagacagaaaacctgccatggggctgcttcccaccaccagccacctctcaggagaagccagaggccctggccaaagataggaggaagaaagagaactctccatagaatgtaatttatagatgcgtgtatatgtatatatatctatttatatgtaaataggcatatatgaagatatatatatatatagtctactttttaaactctgcagggatttggttaagttgttgagctgatttcttccatgttttagaaaatgaggcctgtttggggaaggtaccctggtgatgtttttgctagacattagctgtagctgacagcataaggagagtcgcatcagagcttttcacagccccccgaaaccccagcctggttttgatggcagcagtaatcatgatagtgtgaacccgcgaaggcctcaggattatggttaacctggagaggagcaggccatggaggcaggtgccaggtcagtattgagtcacagtagaggccccacaaggacctgcttgggtgagaccacctctcccctctcagcagcgctggtgggctctttgtcctggtgcccaggagccctccagccccctgcccacagaagggaaggcctgcagagggggccaggatctacctaaccatttccccacccctaagtccctcagtgggctttgccttataggtgccacagggcacagctccatcattgccactggtttttcctaagtcatgcaccaaggacttcagaaagttcttcctccgagtcagtcagtggtgccgggaccccagggcagcctcctcgactcctgaagaaaaggcagtgcccgtggctgcctctgtcttcactcgctgttgatgtgaccgccaggcctcctctcgtaccttggacaaaggatacacctgaaccagaatagttttcttaccctcacattgaaatgaggattttgcttaaaacagcacttgccgccagtgggaggagggaggttttatttattcccacagtttctcctgggccttctggaatgaccatgttttcctgtggcggtgggtgtgtcattgcgcccgccgtcttccaaagccttacttccccaagctgccagccaggaggtgataaccaccctcccagagtttctctcggctctttttttaaaagtcccccaacaaataggattcttgctgggaaaggaagttcggtaaggaaatgtcaaatctggtttttaaacaaggtccaaccctgcaatgaagcagccacttcagcccagagagattataagaactgatgtggccagagtgcctacccactgtggccccggtgctctgcccccacgccccgaccatctggtcttggtagatgtccctagacgggctgagccatgtgcaataagaacatagatcctaaaggatcctctggaagctgtatttcttgaattagaattctcaaattgtacatctgttaatatatgtttattatgtgactggc

SEQ ID NO: 315542 - DNA, 2585 bp, Homo sapiens
acccacgcgtccgcggacgcgtgggtcgacccacgcgtcgggtgagcagaggggcctcggatgaggacctgaagaaggcctaccgcagactggccctcaaattccacccagacaagaaccacgcacctggtgccactgaagccttcaaagccattggcacagcatatgcggtactcagcaacccggagaagaggaagcagtatgaccagttcggcgatgacaagagccaggcggcccggcacggccatgggcatggggatttccaccgtggctttgaggccgacatctcccctgaagacctcttcaacatgttctttggcggcggcttcccttctagtaacgtccacgtctacagcaacggccgcatgcgctatacctaccagcaaaggcaggaccgcagggacaaccagggtgatggcgggctaggggtgtttgtgcagctgatgcctatcctcatcctgattctcgtgtcagctctcagccagctcatggtctccagtccaccctacagtctgagtccaagaccgtccgtgggccacatccacaggcgagtcactgaccacctgggtgtcgtctactatgtgggagacactttctccgaagagtacacaggctccagcctcaaaacagtcgagcggaatgtggaagatgattatatcgccaacctccggaacaactgctggaaggagaagcagcagaaggaaggcttgctgtaccgggcacgctactttggcgacacagatatgtaccacagagcacagaagatgggcacccccagctgcagccgactgtcagagactatgaaatccctggagaatttttggtgacatgcactgagccaaggtgatggactgtatatttgaggaaagacaaacaaagaaacaaaattaaaatggaattggaggccgaacgctgcacagctgccctctctctcacccagtaaatgcagaaagctcttaggacagacagaaaacctgccatggggctgcttccctccctcgcagggctggcggaggctccgcatcgcctctctcctaggatacagaaaccatggcaacgaaagtagaatgtaaaactcgcagcagatatcagtgggaagggctgggggagggggcacccagctgcctttcctccctcacaggagccaccaccagccacctctcaggagaagccagaggccctggccaaagataggaggaagaaagagaactctccatagaatgtaatttatagatgcgtgtatatgtatatatatctatttatatgtaaataggcatatatgaagatatatatatatatagtctactttttaaactctgcagggatttggttaagttgttgagctgatttcttccatgttttagaaaatgaggcctgtttggggaaggtaccctggtgatgtttttgctagacattagctgtagctgacagcataaggagagtcgcatcagagcttttcacagccccccgaaaccccagcctggttttgatggcagcagtaatcatgatagtgtgaacccgcgaaggcctcaggattatggttaacctggagaggagcaggccatggaggcaggtgccaggtcagtattgagtcacagtagaggccccacaaggacctgcttgggtgagaccacctctcccctctcagcagcgctggtgggctctttgtcctggtgcccaggagccctccagccccctgcccacagaagggaaggcctgcagagggggccaggatctacctaaccatttccccacccctaagtccctcagtgggctttgccttataggtgccacagggcacagctccatcattgccactggtttttcctaagtcatgcaccaaggacttcagaaagttcttcctccgagtcagtcagtggtgccgggaccccagggcagcctcctcgactcctgaagaaaaggcagtgcccgtggctgcctctgtcttcactcgctgttgatgtgaccgccaggcctcctctcgtaccttggacaaaggatacacctgaaccagaatagttttcttaccctcacattgaaatgaggattttgcttaaaacagcacttgccgccagtgggaggagggaggttttatttattcccacagtttctcctgggccttctggaatgaccatgttttcctgtggcggtgggtgtgtcattgcgcccgccgtcttccaaagccttacttccccaagctgccagccaggaggtgataaccaccctcccagagtttctctcggctctttttttaaaagtcccccaacaaataggattcttgctgggaaaggaagttcggtaaggaaatgtcaaatctggtttttaaacaaggtccaaccctgcaatgaagcagccacttcagcccagagagattataagaactgatgtggccagagtgcctacccactgtggccccggtgctctgcccccacgccccgaccatctggtcttggtagatgtccctagacgggctgagccatgtgcaataagaacatagatcctaaaggatcctctggaagctgtatttcttgaattagaattctcaaattgtacatctgttaatatatgtttattatgtgactggc

SEQ ID NO: 315543 - DNA, 3302 bp, Homo sapiens
aaaaagcgggaccactcacagagatactccacagacttcactactttaatcaccaccactgagtccacatcccacagtacaacctgccggtggccaccggcaggtagtactctttaacctaagttttccaaggagtttttcttaatccacgctagaggggagagagacaccgggtggtgcttgtgatcaccactcagtaaaccgtctgggaataacaggcactccgaagggcccagtctcatcctgacggctaccacgtgaccttcctgagcttgggtttcctcctcgggaagattagagggttggcgcagataatgtgattggcaataatacccatagggctttgcagtttaggaagctccttcacctgtgccttctcacttgagcctgccagtcagggatgcagagcaaagatcattatctttattctatgggtgaggaaaatctctgaggtaagggatgcccaggatgacacagctagaaagtaaaatgttctgtgactctgtaaatgtttatgaaggaaaagaaatgaaattgaggaacagcagtcagcctcctaaccggccctgcccgcctgatgagattgagaaagcggaacgctggtggaagaggtagcctggactgctgaactttcctccctccggactcttgcaggttgatctttggcctgtttgcctccccttggagagggtttcgggctgtatttgccaggacacctgagggtcaagcaatgtaaagattactatgagatcctgggggtgagcagaggggcctcggatgaggacctgaagaaggcctaccgcagactggccctcaaattccacccagacaagaaccacgcacctggtgccactgaagccttcaaagccattggcacagcatatgcggtactcagcaacccggagaagaggaagcagtatgaccagttcggcgatgacaagagccaggcggcccggcacggccatgggcatggggatttccaccgtggctttgaggccgacatctcccctgaagacctcttcaacatgttctttggcggcggcttcccttctagtaacgtccacgtctacagcaacggccgcatgcgctatacctaccagcaaaggcaggaccgcagggacaaccagggtgatggcgggctaggggtgtttgtgcagctgatgcctatcctcatcctgattctcgtgtcagctctcagccagctcatggtctccagtccaccctacagtctgagtccaagaccgtccgtgggccacatccacaggcgagtcactgaccacctgggtgtcgtctactatgtgggagacactttctccgaagagtacacaggctccagcctcaaaacagtcgagcggaatgtggaagatgattatatcgccaacctccggaacaactgctggaaggagaagcagcagaaggaaggcttgctgtaccgggcacgctactttggcgacacagatatgtaccacagagcacagaagatgggcacccccagctgcagccgactgtcagagactatgaaatccctggagaatttttggtgacatgcactgagccaaggtgatggactgtatatttgaggaaagacaaacaaagaaacaaaattaaaatggaattggaggccgaacgctgcacagctgccctctctctcacccagtaaatgcagaaagctcttaggacagacagaaaacctgccatggggctgcttccctccctcgcagggctggcggaggctccgcatcgcctctctcctaggatacagaaaccatggcaacgaaagtagaatgtaaaactcgcagcagatatcagtgggaagggctgggggagggggcacccagctgcctttcctccctcacaggagccaccaccagccacctctcaggagaagccagaggccctggccaaagataggaggaagaaagagaactctccatagaatgtaatttatagatgcgtgtatatgtatatatatctatttatatgtaaataggcatatatgaagatatatatatatatagtctactttttaaactctgcagggatttggttaagttgttgagctgatttcttccatgttttagaaaatgaggcctgtttggggaaggtaccctggtgatgtttttgctagacattagctgtagctgacagcataaggagagtcgcatcagagcttttcacagccccccgaaaccccagcctggttttgatggcagcagtaatcatgatagtgtgaacccgcgaaggcctcaggattatggttaacctggagaggagcaggccatggaggcaggtgccaggtcagtattgagtcacagtagaggccccacaaggacctgcttgggtgagaccacctctcccctctcagcagcgctggtgggctctttgtcctggtgcccaggagccctccagccccctgcccacagaagggaaggcctgcagagggggccaggatctacctaaccatttccccacccctaagtccctcagtgggctttgccttataggtgccacagggcacagctccatcattgccactggtttttcctaagtcatgcaccaaggacttcagaaagttcttcctccgagtcagtcagtggtgccgggaccccagggcagcctcctcgactcctgaagaaaaggcagtgcccgtggctgcctctgtcttcactcgctgttgatgtgaccgccaggcctcctctcgtaccttggacaaaggatacacctgaaccagaatagttttcttaccctcacattgaaatgaggattttgcttaaaacagcacttgccgccagtgggaggagggaggttttatttattcccacagtttctcctgggccttctggaatgaccatgttttcctgtggcggtgggtgtgtcattgcgcccgccgtcttccaaagccttacttccccaagctgccagccaggaggtgataaccaccctcccagagtttctctcggctctttttttaaaagtcccccaacaaataggattcttgctgggaaaggaagttcggtaaggaaatgtcaaatctggtttttaaacaaggtccaaccctgcaatgaagcagccacttcagcccagagagattataagaactgatgtggccagagtgcctacccactgtggccccggtgctctgcccccacgccccgaccatctggtcttggtagatgtccctagacgggctgagccatgtgcaataagaacatagatcctaaaggatcctctggaagctgtatttcttgaattagaattctcaaattgtacatctgttaatatatgtttattatgtgactggc

SEQ ID NO: 315544 - DNA, 3450 bp, Homo sapiens
cgctgccttttcctcagactctcctttcagggagtgtgcgggtccctgctctggtttgagagggaaccaactactcctctggtctgtgcggcacctcctgtcttggggcccatacccctagagtgccctgggcatggggacccgcacccactttgaacctggtatttctggccaggtccgtgggccacatccacaggcgagtcactgaccacctgggtgtcgtctactatgtgggagacactttctccgaagagtacacaggctccagcctcaaaacagtcgagcggaatgtggaagatgattatatcgccaacctccggaacaactgctggaaggagaagcagcagaaggaaggcttgctgtaccgggcacgctactttggcgacacagatatgtaccacagagcacagaagatgggcacccccagctgcagccgactgtcagaggtgcaggcctccctgcatggatagtcctgggccagccacaccaccgaggtccaagtatgagccagggctgcctccaccctgcaactcctggcagctttggccctggtcatgagcagaggagggagggggagaaagggaggaagcctggtgattgtggcaaagactcctgtccccagcctgacctccagcctccagagaccgagcagctgtggggcctgctgggaaaccaaggtcggtttccgccctctagcgatgctgtcctccccactcctccgctctgctccctggctccaggggtgtgggggaccccagaaccaggcagagtgggaacttgaaactgttgctgagggccacccggggcttcttggtccactccagccatcagtcagcacggccctttctccagcacagcagactattgtccgtgccctggtatttaggccatcacatatggtggggcccaagagagccccatatgcacactgcctgcctgataccaggaagaaccatgtgggaataggtgggccaagagccctcccctttctccatccctccagctaggaggaaatggagcaagatgaacaggcagccacgaggtgggtgggagctggcagtcttggtggcggcaggggccgcgggccctgaccacccccctctggtgggatctgaggcactctctcgaatgccgtcacacctggcagcctggaagccacaggcatccggccttgcccaggcatctcgcctgcggtctgaggaagggaacagaaggtcatgagttcagggtcagacgcagccgctcagcacaggaggggtggaggggaaatgagagttgctggtagcaggctccctccttctgcagcccggcgaatgggggcgctgggctctgttcccagcgtttgccagaggtggccacttcagccaagcccggagaagtgtgggcagaagcagtgaaggttcttctctgtgtgggtgccctgcccaccccctcctttgcctgtgtcctcccggcctggatccatggctgactctgcctggaggccatttgtgcctgcctctgtgctgccgcaggagggcaggccgcaagtggggttggtgggggtcgagcgggcagcacggtgcagcggtgcagtggcaaggggggctacttgtgtggcataagctagaggagccggtgccgcctgaatgccgagctaactgttgccactctcctccccagactatgaaatccctggagaatttttggtgacatgcactgagccaaggtgatggactgtatatttgaggaaagacaaacaaagaaacaaaattaaaatggaattggaggccgaacgctgcacagctgccctctctctcacccagtaaatgcagaaagctcttaggacagacagaaaacctgccatggggctgcttccctccctcgcagggctggcggaggctccgcatcgcctctctcctaggatacagaaaccatggcaacgaaagtagaatgtaaaactcgcagcagatatcagtgggaagggctgggggagggggcacccagctgcctttcctccctcacaggagccaccaccagccacctctcaggagaagccagaggccctggccaaagataggaggaagaaagagaactctccatagaatgtaatttatagatgcgtgtatatgtatatatatctatttatatgtaaataggcatatatgaagatatatatatatatagtctactttttaaactctgcagggatttggttaagttgttgagctgatttcttccatgttttagaaaatgaggcctgtttggggaaggtaccctggtgatgtttttgctagacattagctgtagctgacagcataaggagagtcgcatcagagcttttcacagccccccgaaaccccagcctggttttgatggcagcagtaatcatgatagtgtgaacccgcgaaggcctcaggattatggttaacctggagaggagcaggccatggaggcaggtgccaggtcagtattgagtcacagtagaggccccacaaggacctgcttgggtgagaccacctctcccctctcagcagcgctggtgggctctttgtcctggtgcccaggagccctccagccccctgcccacagaagggaaggcctgcagagggggccaggatctacctaaccatttccccacccctaagtccctcagtgggctttgccttataggtgccacagggcacagctccatcattgccactggtttttcctaagtcatgcaccaaggacttcagaaagttcttcctccgagtcagtcagtggtgccgggaccccagggcagcctcctcgactcctgaagaaaaggcagtgcccgtggctgcctctgtcttcactcgctgttgatgtgaccgccaggcctcctctcgtaccttggacaaaggatacacctgaaccagaatagttttcttaccctcacattgaaatgaggattttgcttaaaacagcacttgccgccagtgggaggagggaggttttatttattcccacagtttctcctgggccttctggaatgaccatgttttcctgtggcggtgggtgtgtcattgcgcccgccgtcttccaaagccttacttccccaagctgccagccaggaggtgataaccaccctcccagagtttctctcggctctttttttaaaagtcccccaacaaataggattcttgctgggaaaggaagttcggtaaggaaatgtcaaatctggtttttaaacaaggtccaaccctgcaatgaagcagccacttcagcccagagagattataagaactgatgtggccagagtgcctacccactgtggccccggtgctctgcccccacgccccgaccatctggtcttggtagatgtccctagacgggctgagccatgtgcaataagaacatagatcctaaaggatcctctggaagctgtatttcttgaattagaattctcaaattgtacatctgttaatatatgtttattatgtgactggc

SEQ ID NO: 315545 - DNA, 1563 bp, Homo sapiens
ccgacggctaccacgtgaccttcctgagcttgggtttcctcctccggaagattagagggttggcgcatactcaactctaagacctccggaacatggaatctgggcgtgcaccattattgacacctacaccagccgtccctttcttagaagacatacggtagcacttccaccctcgctcaaaactcgggaaaggaggggcggagggtggatgtcatcactccgcgcccggctgcccgcgacgcgccggcgggtggcgcagcccttcgctcgcccggcctccccctccctggttccgcgttctggttccgccatggaatccaacaaggatgaagctgagcgctgtatcagcatcgccctcaaggccatccagagcaaccagcccgaccgggcgctccgcttcctggagaaggcacagcggctgtatccgacgccgcgagttcgcgccctgattgagtccctcaaccagaaaccacagactgccggtgaccaacccccacccacagacacaacccatgccacccacaggaaagcaggtgggaccgatgccccctcggccaacggtgaagctggaggagagagcaccaaaggctacactgcagaacaggttgcagctgtgaaaagggtcaagcaatgtaaagattactatgagatcctgggggtgagcagaggggcctcggatgaggacctgaagaaggcctaccgcagactggccctcaaattccacccagacaagaaccacgcacctggtgccactgaagccttcaaagccattggcacagcatatgcggtactcagcaacccggagaagaggaagcagtatgaccagttcggcgatgacaagagccaggcggcccggcacggccatgggcatggggatttccaccgtggctttgaggccgacatctcccctgaagacctcttcaacatgttctttggcggcggcttcccttctagtaacgtccacgtctacagcaacggccgcatgcgctatacctaccagcaaaggcaggaccgcagggacaaccagggtgatggcgggctaggggtgtttgtgcagctgatgcctatcctcatcctgattctcgtgtcagctctcagccagctcatggtctccagtccaccctacagtctgagtccaagaccgtccgtgggccacatccacaggcgagtcactgaccacctgggtgtcgtctactatgtgggagacactttctccgaagagtacacaggctccagcctcaaaacagtcgagcggaatgtggaagatgattatatcgccaacctccggaacaactgctggaaggagaagcagcagaaggaaggcttgctgtaccgggcacgctactttggcgacacagatatgtaccacagagcacagaagatgggcacccccagctgcagccgactgtcagaggtgcaggcctccctgcatggatagtcctgggccagccacaccaccgaggtccaaactatgaaatccctggagaatttttggtgacatgcactgagccaaggtgatggactgtatatttgaggaagcgtcgcgctgggtcctcgggcagc

SEQ ID NO: 315546 - DNA, 1298 bp, Homo sapiens
ccgacggctaccacgtgaccttcctgagcttgggtttcctcctccggaagattagagggttggcgcatactcaactctaagacctccggaacatggaatctgggcgtgcaccattattgacacctacaccagccgtccctttcttagaagacatacggtagcacttccaccctcgctcaaaactcgggaaaggaggggcggagggtggatgtcatcactccgcgcccggctgcccgcgacgcgccggcgggtggcgcagcccttcgctcgcccggcctccccctccctggttccgcgttctggttccgccatggaatccaacaaggatgaagctgagcgctgtatcagcatcgccctcaaggccatccagagcaaccagcccgaccgggcgctccgcttcctggagaaggcacagcggctgtatccgacgccgcgagttcgcgccctgattgagtccctcaaccagaaaccacagactgccggtgaccaacccccacccacagacacaacccatgccacccacaggaaagcaggtgggaccgatgccccctcggccaacggtgaagctggaggagagagcaccaaaggctacactgcagaacaggttgcagctgtgaaaagggtcaagcaatgtaaagattactatgagatcctgggggtgagcagaggggcctcggatgaggacctgaagaaggcctaccgcagactggccctcaaattccacccagacaagaaccacgcacctggtgccactgaagccttcaaagccattggcacagcatatgcggtactcagcaacccggagaagaggaagcagtatgaccagttcggcgatgacaagagccaggcggcccggcacggccatgggcatggggatttccaccgtggctttgaggccgacatctcccctgaagacctcttcaacatgttctttggcggcggcttcccttctagtaacgtccacgtctacagcaacggccgcatgcgctatacctaccagcaaaggcaggaccgcagggacaaccagggtgataggaaggcttgctgtaccgggcacgctactttggcgacacagatatgtaccacagagcacagaagatgggcacccccagctgcagccgactgtcagaggtgcaggcctccctgcatggatagtcctgggccagccacaccaccgaggtccaaactatgaaatccctggagaatttttggtgacatgcactgagccaaggtgatggactgtatatttgaggaaagacaaacaaagaaacaaaattaaaatggaattggaggccgaa

SEQ ID NO: 315547 - DNA, 294 bp, Homo sapiens
tcacagaattggtgtttgtgcactgttaattaaataaacattaaatagagtgaatgcttgccgtagttagggacgtctttgcaaaaagccccctagctgttcagggataaataatgtaggagtaccagaggagtttatgtattgctggccttgctatggaatctcagtgcttcagagccaacacaatgttttatgcaagttagatccccaggcgacacttggtcctcaagtttgctgacttttcaagtagaaggagaagaaatagtgcacaatttcaaatgaagaatacttact

SEQ ID NO: 315548 - DNA, 1547 bp, Homo sapiens
ccaaattattgtatctcacagtgtggggaaaaggaagagagatcagattgttactgtgtctgtgtagaaagaagtagacataggagactccattttgttatgtactaagaaaaattcttctgccttgagattctgttaatctataaccttaccccccaaccccgtgctctctgaaacatgtgctgtgtcctctcagaattggttttttgtgctcctccgagctcgctgttcgtccgggttttttacgttttaatttccaggacttgaactgccatgtcctctgaagaaggaaagctcttcgtgggagggctcaactttaacaccgacgagcaggcactggaagaccacttcagcagtttcggacctatctctgaggtggtcgttgtcaaggaccgggagactcagcggtccaggggttttggtttcatcaccttcaccaacccagagcatgcttcagttgccatgagagccatgaacggagagtctctggatggtcgtcagatccgtgtggatcatgcaggcaagtctgctcggggaaccagaggaggtggctttggggcccatgggcgtggtcgcagctactctagaggtggtggggaccagggctatgggagtggcaggtattatgacagtcgacctggagggtatggatatggatatggacgttccagagactataatggcagaaaccagggtggttatgaccgctactcaggaggaaattacagagacaattatgacaactgaaatgagacatgcacataatatagatacacaaggaataatttctgatccaggatcgtccttccaaatggctgtatttataaaggtttttggagctgcactgaagcatcttattttatagtatatcaacctttgtttttaaattgacctgccaaggtagctgaagaccttttagacagttccatcttttttttaatttttctgcctatttaaagacaaattatgggacgtttgtagaacctgagtatttttctttttaccagttttttagtttgagctcttaggtttattggagctagcaataattggttctggcaagtttggccagactgacttcaaaaaattaatgtgtatccagggacattttaaaaacctgtacacagtgtttattgtggttaggaagcaatttcccaatgtacctataagaaatgtgcatcaagccagcctgaccaacatggtgaaaccccatctgtactaaacataaaaaaattagcctggcatggtggtgtacgcctgtaatcccagtgacttgggaggctgaggcaggagaatcgcttgaacccgggaggcggaggttgcagtgagctaagatcgcgccactgtactccagcctgggcaacagcgagactccatctcaaaaaaaaaggaaatgtgtatcaagaacatgattatccaggggtattttctaattcagatcatcaaactgattatatagaagagttggctttaaaatgtttgcaaatgtcgatgttgagaatggtatttcttcagttttattttaggatttctatagtttgatgatc

SEQ ID NO: 315549 - DNA, 727 bp, Homo sapiens
tgaaatataagaaatttccaagtaaaaacctttgaacacggcattttttttataagaaaaaggttttcccgggttggccattttgtaaaaggggcaaaacaccccaacctgttaaaggggacataaattataaggtgggcaccctcccgccctttattctcctatcaattggtaagtgaagtcttgggcccttgcggccctttgcctccttaaacaataaaggcaatgttgcttcgtgaccaagtgcttttggaaattaggctttcaattcctaaaggcgaatagacccaaacatggtgtgcctgtataaagaggattgatagatttctttccaagagaatttagacatattctctctctgtcaccaaggctggagtacagtgctgtattcagggctcaatccaagctccgcctccaaaatgctgaggcaggagaatcgcttgaacccgggaggcggaggttgcagtgagctaagatcgcgccactgtactccagcctgggcaacagcgagactccatctcaaaaaaaaaggaaatgtgtatcaagaacatgattatccaggggtattttctaattcagatcatcaaactgattatatagaagagttggctttaaaatgtttgcaaatgtctttttttttttaatactggaagaaaaaatattctgttgtgtctcatacagtgcttaggatgtctttcacagagcttattaaaaagatgaaacctga

SEQ ID NO: 315550 - DNA, 422 bp, Homo sapiens
taagatcttcctttggcaagccttctctaattaaaataggcaagtccgtggcaaaaatctgtaattcatcagataagaaaagaaaaggcccaagtataatacagtgacaaaaaaaggctgaggcaggagaatcgcttgaacccgggaggcggaggttgcagtgagctaagatcgcgccactgtactccagcctgggcaacagcgagactccatctcaaaaaaaaaggaaatgtgtatcaagaacatgattatccaggggtattttctaattcagatcatcaaactgattatatagaagagttggctttaaaatgtttgcaaatgtctttttttttttaatactggaagaaaaaatattctgttgtgtctcatacagtgcttaggatgtctttcacagagcttattaaaaagatgaaacctga

SEQ ID NO: 315551 - DNA, 422 bp, Homo sapiens
  misc_feature (15)..(15): n is a, c, g, or t
agcctcccgagtagntgagactatgggtgtgcaccaccacacctggctagtttttgtatttttttgtagagacagggtttcaccatgttgctcaggctggtcttgaactcttgagcgctgaggcaggagaatcgcttgaacccgggaggcggaggttgcagtgagctaagatcgcgccactgtactccagcctgggcaacagcgagactccatctcaaaaaaaaaggaaatgtgtatcaagaacatgattatccaggggtattttctaattcagatcatcaaactgattatatagaagagttggctttaaaatgtttgcaaatgtctttttttttttaatactggaagaaaaaatattctgttgtgtctcatacagtgcttaggatgtctttcacagagcttattaaaaagatgaaacctga

SEQ ID NO: 315552 - DNA, 412 bp, Homo sapiens
tttaaaaaattttttttattatattttatttttttgagacagggtcttgatatttttttgggacagggttacctggggctccaagtgaatccctttctcctcagccgctgaggcaggagaatcgcttgaacccgggaggcggaggttgcagtgagctaagatcgcgccactgtactccagcctgggcaacagcgagactccatctcaaaaaaaaaggaaatgtgtatcaagaacatgattatccaggggtattttctaattcagatcatcaaactgattatatagaagagttggctttaaaatgtttgcaaatgtctttttttttttaatactggaagaaaaaatattctgttgtgtctcatacagtgcttaggatgtctttcacagagcttattaaaaagatgaaacctga

SEQ ID NO: 315553 - DNA, 413 bp, Homo sapiens
  misc_feature (24)..(24): n is a, c, g, or t
gtaggctttcaagtcctaagcccnacccctcctatcccacctaggcagaaatcacttcagatccttgcttcctagtttaatttcttctctgcctcagttataacatccataaaatggaaataataatacccacctcacacaggggttaggagtgtttttttgttggttttttgtactccagcctgggcaacagcgagactccatctcaaaaaaaaaggaaatgtgtatcaagaacatgattatccaggggtattttctaattcagatcatcaaactgattatatagaagagttggctttaaaatgtttgcaaatgtctttttttttttaatactggaagaaaaaatattctgttgtgtctcatacagtgcttaggatgtctttcacagagcttattaaaaagatgaaacctga

SEQ ID NO: 315554 - DNA, 751 bp, Homo sapiens
  misc_feature (37)..(37): n is a, c, g, or t
  misc_feature (138)..(138): n is a, c, g, or t
  misc_feature (211)..(211): n is a, c, g, or t
  misc_feature (217)..(217): n is a, c, g, or t
cccccaccacacagcaaatgtgctgatctggttgggntctgtttgcttcactgcaagtttaatcctgagacatattggcttatgcattttatatttataagacttcctgttaggtatagaaagtgaacatagaatctntttgtgtatttctattaaaaaagagagaagactgtgcccccccaaaggaaaaaaaaaaggcgccttctttttnaaaggntggccatatgggtacaggataaagatatccatttaaataacccattcctatctggaacaatgcttttgttttttaaagaaacctctcacagataagacagaggcccaggggatttttgaagctgtctttattctgcccccatcccaacccagcccttattattttagtatctgcctcagaattttatagagggctgaccaagctgaaactctagaattaaaggaacctccctgaaaacatatatttcacgtgttccctcttttttttttttttttttgtgagatggggtctcggtactccagcctgggcaacagcgagactccatctcaaaaaaaaaggaaatgtgtatcaagaacatgattatccaggggtattttctaattcagatcatcaaactgattatatagaagagttggctttaaaatgtttgcaaatgtctttttttttttaatactggaagaaaaaatattctgttgtgtctcatacagtgcttaggatgtctttcacagagcttattaaaaagatgaaacctga

SEQ ID NO: 315555 - DNA, 386 bp, Homo sapiens
tgggccttaacccagagtttctggttcactggatctaggtagggccaaacaatatgcacttttttttttgtttgtttgtttgtttgttttttgagacagagtttctctatgttacccagttgcagtgagctaagatcgcgccactgtactccagcctgggcaacagcgagactccatctcaaaaaaaaaggaaatgtgtatcaagaacatgattatccaggggtattttctaattcagatcatcaaactgattatatagaagagttggctttaaaatgtttgcaaatgtctttttttttttaatactggaagaaaaaatattctgttgtgtctcatacagtgcttaggatgtctttcacagagcttattaaaaagatgaaacctga

SEQ ID NO: 315556 - DNA, 2273 bp, Homo sapiens
gctggcctcagccaatcagcacgcacgccgggacgcgcaaggggaacgttccgggacgttctcgctacgtactctttatcaatcgtcttccggcgcagccccgtccctgttttttgtgctcctccgagctcgctgttcgtccgggttttttacgttttaatttccaggacttgaactgccatgtcctctgaagaaggaaagctcttcgtgggagggctcaactttaacaccgacgagcaggcactggaagaccacttcagcagtttcggacctatctctgaggtggtcgttgtcaaggaccgggagactcagcggtccaggggttttggtttcatcaccttcaccaacccagagcatgcttcagttgccatgagagccatgaacggagagtctctggatggtcgtcagatccgtgtggatcatgcaggcaagtctgctcggggaaccagaggaggtggctttggggcccatgggcgtggtcgcagctactctagaggtggtggggaccagggctatgggagtggcaggtattatgacagtcgacctggagggtatggatatggatatggacgttccagagactataatggcagaaaccagggtggttatgaccgctactcaggaggaaattacagagacaattatgacaactgaaatgagacatgcacataatatagatacacaaggaataatttctgatccaggatcgtccttccaaatggctgtatttataaaggtttttggagctgcactgaagcatcttattttatagtatatcaacctttgtttttaaattgacctgccaaggtagctgaagaccttttagacagttccatcttttttttaatttttctgcctatttaaagacaaattatgggacgtttgtagaacctgagtatttttctttttaccagttttttagtttgagctcttaggtttattggagctagcaataattggttctggcaagtttggccagactgacttcaaaaaattaatgtgtatccagggacattttaaaaacctgtacacagtgtttattgtggttaggaagcaatttcccaatgtacctataagaaatgtgcatcaagccagcctgaccaacatggtgaaaccccatctgtactaaacataaaaaaattagcctggcatggtggtgtacgcctgtaatcccagtgacttgggaggctgaggcaggagaatcgcttgaacccgggaggcggaggttgcagtgagctaagatcgcgccactgtactccagcctgggcaacagcgagactccatctcaaaaaaaaaggaaatgtgtatcaagaacatgattatccaggggtattttctaattcagatcatcaaactgattatatagaagagttggctttaaaatgtttgcaaatgtctttttttttttaatactggaagaaaaaatattctgttgtgtctcatacagtgcttaggatgtctttcacagagcttattaaaaagatgaaacctgagaacaaactgctttattcttactcagcccattttgcaaattaaaagtgggggcagaggtgggcggatcacctgaggtcaggagttcgagaccagcctggccaacagggcaaaaccccatctctactaaaaatgcaaaagttagcggggcgtggtggcgggtgcatgtagtcccagctactcgggaggctgaggcaggagaattgcttgaacccaggaggcggaggttgcagtgagctgagattgtgccactgcactccagcctaggtgacagcaagactctgtctcaaaaaaaaaaaatggcacatcaacgagagggaggcttggagaatatttggttggtgggcgggcagggactgccagagggttaggtgtacattgaggcctgaggctgctggaattgggtttccttaactggtctcttatcttagtcccattgttctgagaacataagcacctaatctcatggcgtgagctaatccctatcataaatagtggtaccagttcattccttcccctgaaatgatgggggttgggcagagatgcactgaactcatctttgtgtatgagggccatgagagaggcctggtttgaaaacaatgctaagagctcagattccaggatttatgtaggggctcttctacttcccaggtatttgacctcaggtgagtcatttaatttcagccttatgccattttacattttctgtggagggttaggttaattggcatataaagccactgagaagagttggcaaagctctcagtcacggggatttgatc

SEQ ID NO: 315557 - DNA, 1965 bp, Homo sapiens
  misc_feature (1526)..(1526): n is a, c, g, or t
  misc_feature (1530)..(1530): n is a, c, g, or t
  misc_feature (1541)..(1541): n is a, c, g, or t
gctggcctcagccaatcagcacgcacgccgggacgcgcaaggggaacgttccgggacgttctcgctacgtactctttatcaatcgtcttccggcgcagccccgtccctgttttttgtgctcctccgagctcgctgttcgtccgggttttttacgttttaatttccaggacttgaactgccatgtcctctgaagaaggaaagctcttcgtgggagggctcaactttaacaccgacgagcaggcactggaagaccacttcagcagtttcggacctatctctgaggtggtcgttgtcaaggaccgggagactcagcggtccaggggttttggtttcatcaccttcaccaacccagagcatgcttcagttgccatgagagccatgaacggagagtctctggatggtcgtcagatccgtgtggatcatgcaggcaagtctgctcggggaaccagaggaggtggctttggggcccatgggcgtggtcgcagctactctagaggtggtggggaccagggctatgggagtggcaggtattatgacagtcgacctggagggtatggatatggatatggacgttccagagactataatggcagaaaccagggtggttatgaccgctactcaggaggaaattacagagacaattatgacaactgaaatgagacatgcacataatatagatacacaaggaataatttctgatccaggatcgtccttccaaatggctgtatttataaaggtttttggagctgcactgaagcatcttattttatagtatatcaacctttgtttttaaattgacctgccaaggtagctgaagaccttttagacagttccatcttttttttaatttttctgcctatttaaagacaaattatgggacgtttgtagaacctgagtatttttctttttaccagttttttagtttgagctcttaggtttattggagctagcaataattggttctggcaagtttggccagactgacttcaaaaaattaatgtgtatccagggacattttaaaaacctgtacacagtgtttattgtggttaggaagcaatttcccaatgtacctataagaaatgtgcatcaagccagcctgaccaacatggtgaaaccccatctgtactaaacataaaaaaattagcctggcatggtggtgtacgcctgtaatcccagtgacttgggaggctgaggcaggagaatcgcttgaacccgggaggcggaggttgcagtgagctaagatcgcgccactgtactccagcctgggcaacagcgagactccatctcaaaaaaaaaggaaatgtgtatcaagaacatgattatccaggggtattttctaattcagatcatcaaactgattatatagaagagttggctttaaaatgtttgcaaatgtctttttttttttaatactggaagaaaaaatattctgttgtgtctcatacagtgcttaggatgtctttcacagagcttattaaaaagatgaaacctgaaaaaaaaaaaaaaacaaaaaaaaaaaaaaaaanaaanaacaaacaganagtatacagaagacacagcaaaaaatagagaggggggggcgcgccgtgacaagtatcttcaccccttgggggacgcccctttttgttctggctgtcccgcgtctttttttttgattgaaaggggggcccccattaatggggaggcgctgctattttatatcctgcgcgacgtggccgccgtcttctttcgcatcccgcctcgcctcgcggtgtcgcagtagctcctgcgtcgtggcgcctctctgtggcgctccagcgcccctctcttccgttcgcgcggggtcccaatattggggggaccagctgctccgtcgagatttatagctgcgcgggggcatatcgcacttcgcgcgttttctggtggtcgtccctcgccgcatgtgcggcgggccaagaggctggtcgctccagcgtcttttcggca

SEQ ID NO: 315558 - DNA, 1586 bp, Homo sapiens
ccaaattattgtatctcacagtgtggggaaaaggaagagagatcagattgttactgtgtctgtgtagaaagaagtagacataggagactccattttgttatgtactaagaaaaattcttctgccttgagattctgttaatctataaccttaccccccaaccccgtgctctctgaaacatgtgctgtgtcctctcagaattggttttttgtgctcctccgagctcgctgttcgtccgggttttttacgttttaatttccaggacttgaactgccatgtcctctgaagaaggaaagctcttcgtgggagggctcaactttaacaccgacgagcaggcactggaagaccacttcagcagtttcggacctatctctgaggtggtcgttgtcaaggaccgggagactcagcggtccaggggttttggtttcatcaccttcaccaacccagagcatgcttcagttgccatgagagccatgaacggagagtctctggatggtcgtcagatccgtgtggatcatgcaggcaagtctgctcggggaaccagaggaggtggctttggggcccatgggcgtggtcgcagctactctagaggtggtggggaccagggctatgggagtggcaggtattatgacagtcgacctggagggtatggatatggatatggacgttccagagactataatggcagaaaccagggtggttatgaccgctactcaggaggaaattacagagacaattatgacaactgaaatgagacatgcacataatatagatacacaaggaataatttctgatccaggatcgtccttccaaatggctgtatttataaaggtttttggagctgcactgaagcatcttattttatagtatatcaacctttgtttttaaattgacctgccaaggtagctgaagaccttttagacagttccatcttttttttaatttttctgcctatttaaagacaaattatgggacgtttgtagaacctgagtatttttctttttaccagttttttagtttgagctcttaggtttattggagctagcaataattggttctggcaagtttggccagactgacttcaaaaaattaatgtgtatccagggacattttaaaaacctgtacacagtgtttattgtggttaggaagcaatttcccaatgtacctataagaaatgtgcatcaagccagcctgaccaacatggtgaaaccccatctgtactaaacataaaaaaattagcctggcatggtggtgtacgcctgtaatcccagtgacttgggaggctgaggcaggagaatcgcttgaacccgggaggcggaggttgcagtgagctaagatcgcgccactgtactccagcctgggcaacagcgagactccatctcaaaaaaaaaggaaatgtgtatcaagaacatgattatccaggggtattttctaattcagatcatcaaactgattatatagaagagttggctttaaaatgtttgcaaatgtctttttttttttaatactggaagaaaaaatattctgttgtgtctcatacagtgcttaggatgtctttcacagagcttattaaaaagatgaaacctga

SEQ ID NO: 315559 - DNA, 1376 bp, Homo sapiens
  misc_feature (31)..(31): n is a, c, g, or t
  misc_feature (33)..(33): n is a, c, g, or t
  misc_feature (39)..(39): n is a, c, g, or t
  misc_feature (41)..(41): n is a, c, g, or t
  misc_feature (43)..(43): n is a, c, g, or t
  misc_feature (46)..(46): n is a, c, g, or t
cttccgaagtgtcgcgcgtgagtgcgggttntntacgtntnanttnccaggacttgaactgccatgtcctctgaagaaggaaagctcttcgtgggagggctcaactttaacaccgacgagcaggcactggaagaccacttcagcagtttcggacctatctctgaggtggtcgttgtcaaggaccgggagactcagcggtccaggggttttggtttcatcaccttcaccaacccagagcatgcttcagttgccatgagagccatgaacggagagtctctggatggtcgtcagatccgtgtggatcatgcaggcaagtctgctcggggaaccagaggaggtggctttggggcccatgggcgtggtcgcagctactctagaggtggtggggaccagggctatgggagtggcaggtattatgacagtcgacctggagggtatggatatggatatggacgttccagagactataatggcagaaaccagggtggttatgaccgctactcaggaggaaattacagagacaattatgacaactgaaatgagacatgcacataatatagatacacaaggaataatttctgatccaggatcgtccttccaaatggctgtatttataaaggtttttggagctgcactgaagcatcttattttatagtatatcaacctttgtttttaaattgacctgccaaggtagctgaagaccttttagacagttccatcttttttttaatttttctgcctatttaaagacaaattatgggacgtttgtagaacctgagtatttttctttttaccagttttttagtttgagctcttaggtttattggagctagcaataattggttctggcaagtttggccagactgacttcaaaaaattaatgtgtatccagggacattttaaaaacctgtacacagtgtttattgtggttaggaagcaatttcccaatgtacctataagaaatgtgcatcaagccagcctgaccaacatggtgaaaccccatctgtactaaacataaaaaaattagcctggcatggtggtgtacgcctgtaatcccagtgacttgggaggctgaggcaggagaatcgcttgaacccgggaggcggaggttgcagtgagctaagatcgcgccactgtactccagcctgggcaacagcgagactccatctcaaaaaaaaaggaaatgtgtatcaagaacatgattatccaggggtattttctaattcagatcatcaaactgattatatagaagagttggctttaaaatgtttgcaaatgtctttttttttttaatactggaagaaaaaatattctgttgtgtctcatacagtgcttaggatgtctttcacagagcttattaaaaagatgaaacctga

SEQ ID NO: 315560 - DNA, 1762 bp, Homo sapiens
gctggcctcagccaatcagcacgcacgccgggacgcgcaaggggaacgttccgggacgttctcgctacgtactctttatcaatcgtcttccggcgcagccccgtccctgttttttgtgctcctccgagctcgctgttcgtccgggttttttacgttttaatttccaggacttgaactgccatgtcctctgaagaaggaaagctcttcgtgggagggctcaactttaacaccgacgagcaggcactggaagaccacttcagcagtttcggacctatctctgaggtggtcgttgtcaaggaccgggagactcagcggtccaggggttttggtttcatcaccttcaccaacccagagcatgcttcagttgccatgagagccatgaacggagagggggtggagggcagcggcagacagagcctggccgcctgggaggcgacgactggtcctgcatgaggccgagaagccacctgtggatggttgacctgccttgggcttaggtagtagagtctgcagacctgtgggcctggcccggagaggacctcgtgagtcttctgacatggactctgaagcctcaaaccaagagaggtgtctgtctagccctgatagtcgggcagcttagaggagtggggaggagaactcagcctgagttcagtcaagattctctggatggtcgtcagatccgtgtggatcatgcaggcaagtctgctcggggaaccagaggaggtggctttggggcccatgggcgtggtcgcagctactctagaggtggtggggaccagggctatgggagtggcaggtattatgacagtcgacctggagggtatggatatggatatggacgttccagagactataatggcagaaaccagggtggttatgaccgctactcaggaggaaattacagagacaattatgacaactgaaatgagacatgcacataatatagatacacaaggaataatttctgatccaggatcgtccttccaaatggctgtatttataaaggtttttggagctgcactgaagcatcttattttatagtatatcaacctttgtttttaaattgacctgccaaggtagctgaagaccttttagacagttccatcttttttttaatttttctgcctatttaaagacaaattatgggacgtttgtagaacctgagtatttttctttttaccagttttttagtttgagctcttaggtttattggagctagcaataattggttctggcaagtttggccagactgacttcaaaaaattaatgtgtatccagggacattttaaaaacctgtacacagtgtttattgtggttaggaagcaatttcccaatgtacctataagaaatgtgcatcaagccagcctgaccaacatggtgaaaccccatctgtactaaacataaaaaaattagcctggcatggtggtgtacgcctgtaatcccagtgacttgggaggctgaggcaggagaatcgcttgaacccgggaggcggaggttgcagtgagctaagatcgcgccactgtactccagcctgggcaacagcgagactccatctcaaaaaaaaaggaaatgtgtatcaagaacatgattatccaggggtattttctaattcagatcatcaaactgattatatagaagagttggctttaaaatgtttgcaaatgtctttttttttttaatactggaagaaaaaatattctgttgtgtctcatacagtgcttaggatgtctttcacagagcttattaaaaagatgaaacctga

SEQ ID NO: 315561 - DNA, 1909 bp, Homo sapiens
gctggcctcagccaatcagcacgcacgccgggacgcgcaaggggaacgttccgggacgttctcgctacgtactctttatcaatcgtcttccggcgcagccccgtccctgttttttgtgctcctccgagctcgctgttcgtccgggttttttacgttttaatttccaggacttgaactgccatgtcctctgaagaaggaaagctcttcgtgggagggctcaactttaacaccgacgagcaggcactggaagaccacttcagcagtttcggacctatctctgaggtggtcgttgtcaaggaccgggagactcagcggtccaggggttttggtttcatcaccttcaccaacccagagcatgcttcagttgccatgagagccatgaacggagaggtggggcctcctatctgcagagggaccttgtccccatctgcggcttccttcattctttttgtttttccctctgtgtctgctcggggcagcgtggccaccaagccccgcagtgcccactcacaggagcatgactgccttttgttctagggggtggagggcagcggcagacagagcctggccgcctgggaggcgacgactggtcctgcatgaggccgagaagccacctgtggatggttgacctgccttgggcttaggtagtagagtctgcagacctgtgggcctggcccggagaggacctcgtgagtcttctgacatggactctgaagcctcaaaccaagagaggtgtctgtctagccctgatagtcgggcagcttagaggagtggggaggagaactcagcctgagttcagtcaagattctctggatggtcgtcagatccgtgtggatcatgcaggcaagtctgctcggggaaccagaggaggtggctttggggcccatgggcgtggtcgcagctactctagaggtggtggggaccagggctatgggagtggcaggtattatgacagtcgacctggagggtatggatatggatatggacgttccagagactataatggcagaaaccagggtggttatgaccgctactcaggaggaaattacagagacaattatgacaactgaaatgagacatgcacataatatagatacacaaggaataatttctgatccaggatcgtccttccaaatggctgtatttataaaggtttttggagctgcactgaagcatcttattttatagtatatcaacctttgtttttaaattgacctgccaaggtagctgaagaccttttagacagttccatcttttttttaatttttctgcctatttaaagacaaattatgggacgtttgtagaacctgagtatttttctttttaccagttttttagtttgagctcttaggtttattggagctagcaataattggttctggcaagtttggccagactgacttcaaaaaattaatgtgtatccagggacattttaaaaacctgtacacagtgtttattgtggttaggaagcaatttcccaatgtacctataagaaatgtgcatcaagccagcctgaccaacatggtgaaaccccatctgtactaaacataaaaaaattagcctggcatggtggtgtacgcctgtaatcccagtgacttgggaggctgaggcaggagaatcgcttgaacccgggaggcggaggttgcagtgagctaagatcgcgccactgtactccagcctgggcaacagcgagactccatctcaaaaaaaaaggaaatgtgtatcaagaacatgattatccaggggtattttctaattcagatcatcaaactgattatatagaagagttggctttaaaatgtttgcaaatgtctttttttttttaatactggaagaaaaaatattctgttgtgtctcatacagtgcttaggatgtctttcacagagcttattaaaaagatgaaacctga

SEQ ID NO: 315562 - DNA, 1770 bp, Homo sapiens
gctggcctcagccaatcagcacgcacgccgggacgcgcaaggggaacgttccgggacgttctcgctacgtactctttatcaatcgtcttccggcgcagccccgtccctgttttttgtgctcctccgagctcgctgttcgtccgggttttttacgttttaatttccaggacttgaactgccatgtcctctgaagaaggaaagctcttcgtgggagggctcaactttaacaccgacgagcaggcactggaagaccacttcagcagtttcggacctatctctgagggtgagacgggccatactcacaatgggggttggtgagagaaagtctgggatccttgcatttcaaggagtattaactgaaaagttaggacccacgcctccaaattctttttcttcctaagcctatggtgtagactaaggatgaggggaagcgtctttgggattagtgggagcgctccgttttccctacctatgccatctccttttccggccaccctttgctacttaacctttggggtactgactggtccacattgctccatcttctctccctctcacagtggtcgttgtcaaggaccgggagactcagcggtccaggggttttggtttcatcaccttcaccaacccagagcatgcttcagttgccatgagagccatgaacggagagtctctggatggtcgtcagatccgtgtggatcatgcaggcaagtctgctcggggaaccagaggaggtggctttggggcccatgggcgtggtcgcagctactctagaggtggtggggaccagggctatgggagtggcaggtattatgacagtcgacctggagggtatggatatggatatggacgttccagagactataatggcagaaaccagggtggttatgaccgctactcaggaggaaattacagagacaattatgacaactgaaatgagacatgcacataatatagatacacaaggaataatttctgatccaggatcgtccttccaaatggctgtatttataaaggtttttggagctgcactgaagcatcttattttatagtatatcaacctttgtttttaaattgacctgccaaggtagctgaagaccttttagacagttccatcttttttttaatttttctgcctatttaaagacaaattatgggacgtttgtagaacctgagtatttttctttttaccagttttttagtttgagctcttaggtttattggagctagcaataattggttctggcaagtttggccagactgacttcaaaaaattaatgtgtatccagggacattttaaaaacctgtacacagtgtttattgtggttaggaagcaatttcccaatgtacctataagaaatgtgcatcaagccagcctgaccaacatggtgaaaccccatctgtactaaacataaaaaaattagcctggcatggtggtgtacgcctgtaatcccagtgacttgggaggctgaggcaggagaatcgcttgaacccgggaggcggaggttgcagtgagctaagatcgcgccactgtactccagcctgggcaacagcgagactccatctcaaaaaaaaaggaaatgtgtatcaagaacatgattatccaggggtattttctaattcagatcatcaaactgattatatagaagagttggctttaaaatgtttgcaaatgtctttttttttttaatactggaagaaaaaatattctgttgtgtctcatacagtgcttaggatgtctttcacagagcttattaaaaagatgaaacctga

SEQ ID NO: 315563 - DNA, 1655 bp, Homo sapiens
gctggcctcagccaatcagcacgcacgccgggacgcgcaaggggaacgttccgggacgttctcgctacgtactctttatcaatcgtcttccggcgcagccccgtccctgttttttgtgctcctccgagctcgctgttcgtccgggttttttacgttttaatttccaggacttgaactgccatgtcctctgaagaaggaaagctcttcgtgggagggctcaactttaacaccgacgagcaggcactggaagaccacttcagcagtttcggacctatctctgaggtggtcgttgtcaaggaccgggagactcagcggtccaggggttttggtttcatcaccttcaccaacccagagcatgcttcagttgccatgagagccatgaacggagaggtagtagagtctgcagacctgtgggcctggcccggagaggacctcgtgagtcttctgacatggactctgaagcctcaaaccaagagaggtgtctgtctagccctgatagtcgggcagcttagaggagtggggaggagaactcagcctgagttcagtcaagattctctggatggtcgtcagatccgtgtggatcatgcaggcaagtctgctcggggaaccagaggaggtggctttggggcccatgggcgtggtcgcagctactctagaggtggtggggaccagggctatgggagtggcaggtattatgacagtcgacctggagggtatggatatggatatggacgttccagagactataatggcagaaaccagggtggttatgaccgctactcaggaggaaattacagagacaattatgacaactgaaatgagacatgcacataatatagatacacaaggaataatttctgatccaggatcgtccttccaaatggctgtatttataaaggtttttggagctgcactgaagcatcttattttatagtatatcaacctttgtttttaaattgacctgccaaggtagctgaagaccttttagacagttccatcttttttttaatttttctgcctatttaaagacaaattatgggacgtttgtagaacctgagtatttttctttttaccagttttttagtttgagctcttaggtttattggagctagcaataattggttctggcaagtttggccagactgacttcaaaaaattaatgtgtatccagggacattttaaaaacctgtacacagtgtttattgtggttaggaagcaatttcccaatgtacctataagaaatgtgcatcaagccagcctgaccaacatggtgaaaccccatctgtactaaacataaaaaaattagcctggcatggtggtgtacgcctgtaatcccagtgacttgggaggctgaggcaggagaatcgcttgaacccgggaggcggaggttgcagtgagctaagatcgcgccactgtactccagcctgggcaacagcgagactccatctcaaaaaaaaaggaaatgtgtatcaagaacatgattatccaggggtattttctaattcagatcatcaaactgattatatagaagagttggctttaaaatgtttgcaaatgtctttttttttttaatactggaagaaaaaatattctgttgtgtctcatacagtgcttaggatgtctttcacagagcttattaaaaagatgaaacctga

SEQ ID NO: 315564 - DNA, 1456 bp, Homo sapiens
gctggcctcagccaatcagcacgcacgccgggacgcgcaaggggaacgttccgggacgttctcgctacgtactctttatcaatcgtcttccggcgcagccccgtccctgttttttgtgctcctccgagctcgctgttcgtccgggttttttacgttttaatttccaggacttgaactgccatgtcctctgaagaaggaaagctcttcgtgggagggctcaactttaacaccgacgagcaggcactggaagaccacttcagcagtttcggacctatctctgaggtggtcgttgtcaaggaccgggagactcagcggtccaggggttttggtttcatcaccttcaccaacccagatctctggatggtcgtcagatccgtgtggatcatgcaggcaagtctgctcggggaaccagaggaggtggctttggggcccatgggcgtggtcgcagctactctagaggtggtggggaccagggctatgggagtggcaggtattatgacagtcgacctggagggtatggatatggatatggacgttccagagactataatggcagaaaccagggtggttatgaccgctactcaggaggaaattacagagacaattatgacaactgaaatgagacatgcacataatatagatacacaaggaataatttctgatccaggatcgtccttccaaatggctgtatttataaaggtttttggagctgcactgaagcatcttattttatagtatatcaacctttgtttttaaattgacctgccaaggtagctgaagaccttttagacagttccatcttttttttaatttttctgcctatttaaagacaaattatgggacgtttgtagaacctgagtatttttctttttaccagttttttagtttgagctcttaggtttattggagctagcaataattggttctggcaagtttggccagactgacttcaaaaaattaatgtgtatccagggacattttaaaaacctgtacacagtgtttattgtggttaggaagcaatttcccaatgtacctataagaaatgtgcatcaagccagcctgaccaacatggtgaaaccccatctgtactaaacataaaaaaattagcctggcatggtggtgtacgcctgtaatcccagtgacttgggaggctgaggcaggagaatcgcttgaacccgggaggcggaggttgcagtgagctaagatcgcgccactgtactccagcctgggcaacagcgagactccatctcaaaaaaaaaggaaatgtgtatcaagaacatgattatccaggggtattttctaattcagatcatcaaactgattatatagaagagttggctttaaaatgtttgcaaatgtctttttttttttaatactggaagaaaaaatattctgttgtgtctcatacagtgcttaggatgtctttcacagagcttattaaaaagatgaaacctga

SEQ ID NO: 315565 - DNA, 2177 bp, Homo sapiens
gccccctaatgggtggctgcgctgagccagctcctcagattaccaccttattggccgcctttctcagcttttctgtagttacccatattttgttcctctttcttgtctattttctgtgctttttctctgctttccgtctcgctattttgtcacatctccattttctttctccttcctgtcaccattcttcatgttcttcccacaggacttgaactgccatgtcctctgaagaaggaaagctcttcgtgggagggctcaactttaacaccgacgagcaggcactggaagaccacttcagcagtttcggacctatctctgaggtggtcgttgtcaaggaccgggagactcagcggtccaggggttttggtttcatcaccttcaccaacccagagcatgcttcagttgccatgagagccatgaacggagaggtggggcctcctatctgcagagggaccttgtccccatctgcggcttccttcattctttttgtttttccctctgtgtctgctcggggcagcgtggccaccaagccccgcagtgcccactcacaggagcatgactgccttttgttctagggggtggagggcagcggcagacagagcctggccgcctgggaggcgacgactggtcctgcatgaggccgagaagccacctgtggatggttgacctgccttgggcttaggtagtagagtctgcagacctgtgggcctggcccggagaggacctcgtgagtcttctgacatggactctgaagcctcaaaccaagagaggtgtctgtctagccctgatagtcgggcagcttagaggagtggggaggagaactcagcctgagttcagtcaagatgtaagtagtagcaaggggaacatggtgcattcaggtcattttgtgtgggattctatagctcctgatgaagccattctggggtaaaggagcttattctggaacatggcacccagaacctggtgcccagcaggaatttttggcctcttttgcccacttacccttgcctgctcttccctcaccattgccctgactgactgccaacccatcatccttgtgtctcccacacttagtctctggatggtcgtcagatccgtgtggatcatgcaggcaagtctgctcggggaaccagaggaggtggctttggggcccatgggcgtggtcgcagctactctagaggtggtggggaccagggctatgggagtggcaggtattatgacagtcgacctggagggtatggatatggatatggacgttccagagactataatggcagaaaccagggtggttatgaccgctactcaggaggaaattacagagacaattatgacaactgaaatgagacatgcacataatatagatacacaaggaataatttctgatccaggatcgtccttccaaatggctgtatttataaaggtttttggagctgcactgaagcatcttattttatagtatatcaacctttgtttttaaattgacctgccaaggtagctgaagaccttttagacagttccatcttttttttaatttttctgcctatttaaagacaaattatgggacgtttgtagaacctgagtatttttctttttaccagttttttagtttgagctcttaggtttattggagctagcaataattggttctggcaagtttggccagactgacttcaaaaaattaatgtgtatccagggacattttaaaaacctgtacacagtgtttattgtggttaggaagcaatttcccaatgtacctataagaaatgtgcatcaagccagcctgaccaacatggtgaaaccccatctgtactaaacataaaaaaattagcctggcatggtggtgtacgcctgtaatcccagtgacttgggaggctgaggcaggagaatcgcttgaacccgggaggcggaggttgcagtgagctaagatcgcgccactgtactccagcctgggcaacagcgagactccatctcaaaaaaaaaggaaatgtgtatcaagaacatgattatccaggggtattttctaattcagatcatcaaactgattatatagaagagttggctttaaaatgtttgcaaatgtctttttttttttaatactggaagaaaaaatattctgttgtgtctcatacagtgcttaggatgtctttcacagagcttattaaaaagatgaaacctga

SEQ ID NO: 315566 - DNA, 2494 bp, Homo sapiens
gctggcctcagccaatcagcacgcacgccgggacgcgcaaggggaacgttccgggacgttctcgctacgtactctttatcaatcgtcttccggcgcagccccgtccctgttttttgtgctcctccgagctcgctgttcgtccgggttttttacgttttaatttccaggacttgaactgccatgtcctctgaagaaggaaagctcttcgtgggagggctcaactttaacaccgacgagcaggcactggaagaccacttcagcagtttcggacctatctctgaggtggtcgttgtcaaggaccgggagactcagcggtccaggggttttggtttcatcaccttcaccaacccagagcatgcttcagttgccatgagagccatgaacggagaggtggggcctcctatctgcagagggaccttgtccccatctgcggcttccttcattctttttgtttttccctctgtgtctgctcggggcagcgtggccaccaagccccgcagtgcccactcacaggagcatgactgccttttgttctagggggtggagggcagcggcagacagagcctggccgcctgggaggcgacgactggtcctgcatgaggccgagaagccacctgtggatggttgacctgccttgggcttaggtagtagagtctgcagacctgtgggcctggcccggagaggacctcgtgagtcttctgacatggactctgaagcctcaaaccaagagaggtgtctgtctagccctgatagtcgggcagcttagaggagtggggaggagaactcagcctgagttcagtcaagatgtaagtagtagcaaggggaacatggtgcattcaggtcattttgtgtgggattctatagctcctgatgaagccattctggggtaaaggagcttattctggaacatggcacccagaacctggtgcccagcaggaatttttggcctcttttgcccacttacccttgcctgctcttccctcaccattgccctgactgactgccaacccatcatccttgtgtctcccacacttagtctctggatggtcgtcagatccgtgtggatcatgcaggcaagtctgctcggggaaccagaggaggtggctttggggcccatgggcgtggtcgcagctactctagaggtggtggggaccagggctatgggagtggcaggtattatgacagtcgacctggagggtatggatatggatatggacgttccagagactataatggcagaaaccagggtggttatgaccgctactcaggaggaaattacagagacaattatgacaactgaaatgagacatgcacataatataggtgagacttggatatcggcattgagtgaacctgtttgtcacactctgtcatgaccctctcaccttttctggcaagactgctctgcatttctgctgccctcatacctcacccagccaacctaccaaacattcctagctaggccttccttgctctcaggtgcatatcagagcaagtttgctagggggtgggatctgaaaacccatctcctataatcttctactcttgtgtgggatggaggaaatgaaggtgtgtccctgttgtccaaccctcagcatcttcatcagctctaggaggtgagcatgttgtcagctgttacttcatgacatcacaattctccccctcttgctgttcccagatacacaaggaataatttctgatccaggatcgtccttccaaatggctgtatttataaaggtttttggagctgcactgaagcatcttattttatagtatatcaacctttgtttttaaattgacctgccaaggtagctgaagaccttttagacagttccatcttttttttaatttttctgcctatttaaagacaaattatgggacgtttgtagaacctgagtatttttctttttaccagttttttagtttgagctcttaggtttattggagctagcaataattggttctggcaagtttggccagactgacttcaaaaaattaatgtgtatccagggacattttaaaaacctgtacacagtgtttattgtggttaggaagcaatttcccaatgtacctataagaaatgtgcatcaagccagcctgaccaacatggtgaaaccccatctgtactaaacataaaaaaattagcctggcatggtggtgtacgcctgtaatcccagtgacttgggaggctgaggcaggagaatcgcttgaacccgggaggcggaggttgcagtgagctaagatcgcgccactgtactccagcctgggcaacagcgagactccatctcaaaaaaaaaggaaatgtgtatcaagaacatgattatccaggggtattttctaattcagatcatcaaactgattatatagaagagttggctttaaaatgtttgcaaatgtctttttttttttaatactggaagaaaaaatattctgttgtgtctcatacagtgcttaggatgtctttcacagagcttattaaaaagatgaaacctga

SEQ ID NO: 315567 - DNA, 918 bp, Homo sapiens
  misc_feature (36)..(36): n is a, c, g, or t
  misc_feature (38)..(38): n is a, c, g, or t
  misc_feature (57)..(58): n is a, c, g, or t
  misc_feature (61)..(61): n is a, c, g, or t
  misc_feature (68)..(68): n is a, c, g, or t
cgtacacagaatgttaaacccgattgctaacatgcncnccaatgaaaacaattgaannccnttggaanaaaccagggtggttatgaccgctactcaggaggaaattacagagacaattatgacaactgaaatgagacatgcacataatatagatacacaaggaataatttctgatccaggatcgtccttccaaatggctgtatttataaaggtttttggagctgcactgaagcatcttattttatagtatatcaacctttgtttttaaattgacctgccaaggtagctgaagaccttttagacagttccatcttttttttaatttttctgcctatttaaagacaaattatgggacgtttgtagaacctgagtatttttctttttaccagttttttagtttgagctcttaggtttattggagctagcaataattggttctggcaagtttggccagactgacttcaaaaaattaatgtgtatccagggacattttaaaaacctgtacacagtgtttattgtggttaggaagcaatttcccaatgtacctataagaaatgtgcatcaagccagcctgaccaacatggtgaaaccccatctgtactaaacataaaagctgaggcaggagaatcgcttgaacccgggaggcggaggttgcagtgagctaagatcgcgccactgtactccagcctgggcaacagcgagactccatctcaaaaaaaaaggaaatgtgtatcaagaacatgattatccaggggtattttctaattcagatcatcaaactgattatatagaagagttggctttaaaatgtttgcaaatgtctttttttttttaatactggaagaaaaaatattctgttgtgtctcatacagtgcttaggatgtctttcacagagcttattaaaaagatgaaacctga

SEQ ID NO: 315568 - DNA, 1193 bp, Homo sapiens
  misc_feature (24)..(24): n is a, c, g, or t
gtaggctttcaagtcctaagcccnacccctcctatcccacctaggcagaaatcacttcagatccttgcttcctagtttaatttcttctctgcctcagttataacatccataaaatggaaataataatacccacctcacacaggggttaggagtgtttttttgttggttttttgtactccagcctgggcaacagcgagactccatctcaaaaaaaaaggaaatgtgtatcaagaacatgattatccaggggtattttctaattcagatcatcaaactgattatatagaagagttggctttaaaatgtttgcaaatgtctttttttttttaatactggaagaaaaaatattctgttgtgtctcatacagtgcttaggatgtctttcacagagcttattaaaaagatgaaacctgagaacaaactgctttattcttactcagcccattttgcaaattaaaagtgggggcagaggtgggcggatcacctgaggtcaggagttcgagaccagcctggccaacagggcaaaaccccatctctactaaaaatgcaaaagttagcggggcgtggtggcgggtgcatgtagtcccagctactcgggaggctgaggcaggagaattgcttgaacccaggaggcggaggttgcagtgagctgagattgtgccactgcactccagcctaggtgacagcaagactctgtctcaaaaaaaaaaaatggcacatcaacgagagggaggcttggagaatatttggttggtgggcgggcagggactgccagagggttaggtgtacattgaggcctgaggctgctggaattgggtttccttaactggtctcttatcttagtcccattgttctgagaacataagcacctaatctcatggcgtgagctaatccctatcataaatagtggtaccagttcattccttcccctgaaatgatgggggttgggcagagatgcactgaactcatctttgtgtatgagggccatgagagaggcctggtttgaaaacaatgctaagagctcagattccaggatttatgtaggggctcttctacttcccaggtatttgacctcaggtgagtcatttaatttcagccttatgccattttacattttctgtggagggttaggttaattggcatataaagccactgagaagagttggcaaagctctcagtcacggggatttgatc

SEQ ID NO: 315569 - DNA, 1531 bp, Homo sapiens
gccccctaatgggtggctgcgctgagccagctcctcagattaccaccttattggccgcctttctcagcttttctgtagttacccatattttgttcctctttcttgtctattttctgtgctttttctctgctttccgtctcgctattttgtcacatctccattttctttctccttcctgtcaccattcttcatgttcttcccacaggacttgaactgccatgtcctctgaagaaggaaagctcttcgtgggagggctcaactttaacaccgacgagcaggcactggaagaccacttcagcagtttcggacctatctctgaggtggtcgttgtcaaggaccgggagactcagcggtccaggggttttggtttcatcaccttcaccaacccagagcatgcttcagttgccatgagagccatgaacggagagtctctggatggtcgtcagatccgtgtggatcatgcaggcaagtctgctcggggaaccagaggaggtggctttggggcccatgggcgtggtcgcagctactctagaggtggtggggaccagggctatgggagtggcaggtattatgacagtcgacctggagggtatggatatggatatggacgttccagagactataatggcagaaaccagggtggttatgaccgctactcaggaggaaattacagagacaattatgacaactgaaatgagacatgcacataatatagatacacaaggaataatttctgatccaggatcgtccttccaaatggctgtatttataaaggtttttggagctgcactgaagcatcttattttatagtatatcaacctttgtttttaaattgacctgccaaggtagctgaagaccttttagacagttccatcttttttttaatttttctgcctatttaaagacaaattatgggacgtttgtagaacctgagtatttttctttttaccagttttttagtttgagctcttaggtttattggagctagcaataattggttctggcaagtttggccagactgacttcaaaaaattaatgtgtatccagggacattttaaaaacctgtacacagtgtttattgtggttaggaagcaatttcccaatgtacctataagaaatgtgcatcaagccagcctgaccaacatggtgaaaccccatctgtactaaacataaaaaaattagcctggcatggtggtgtacgcctgtaatcccagtgacttgggaggctgaggcaggagaatcgcttgaacccgggaggcggaggttgcagtgagctaagatcgcgccactgtactccagcctgggcaacagcgagactccatctcaaaaaaaaaggaaatgtgtatcaagaacatgattatccaggggtattttctaattcagatcatcaaactgattatatagaagagttggctttaaaatgtttgcaaatgtctttttttttttaatactggaagaaaaaatattctgttgtgtctcatacagtgcttaggatgtctttcacagagcttattaaaaagatgaaacctga

SEQ ID NO: 315570 - DNA, 1493 bp, Homo sapiens
gctggcctcagccaatcagcacgcacgccgggacgcgcaaggggaacgttccgggacgttctcgctacgtactctttatcaatcgtcttccggcgcagccccgtccctgttttttgtgctcctccgagctcgctgttcgtccgggttttttacgttttaatttccaggacttgaactgccatgtcctctgaagaaggaaagctcttcgtgggagggctcaactttaacaccgacgagcaggcactggaagaccacttcagcagtttcggacctatctctgaggtggtcgttgtcaaggaccgggagactcagcggtccaggggttttggtttcatcaccttcaccaacccagagcatgcttcagttgccatgagagccatgaacggagagtctctggatggtcgtcagatccgtgtggatcatgcaggcaagtctgctcggggaaccagaggaggtggctttggggcccatgggcgtggtcgcagctactctagaggtggtggggaccagggctatgggagtggcaggtattatgacagtcgacctggagggtatggatatggatatggacgttccagagactataatggcagaaaccagggtggttatgaccgctactcaggaggaaattacagagacaattatgacaactgaaatgagacatgcacataatatagatacacaaggaataatttctgatccaggatcgtccttccaaatggctgtatttataaaggtttttggagctgcactgaagcatcttattttatagtatatcaacctttgtttttaaattgacctgccaaggtagctgaagaccttttagacagttccatcttttttttaatttttctgcctatttaaagacaaattatgggacgtttgtagaacctgagtatttttctttttaccagttttttagtttgagctcttaggtttattggagctagcaataattggttctggcaagtttggccagactgacttcaaaaaattaatgtgtatccagggacattttaaaaacctgtacacagtgtttattgtggttaggaagcaatttcccaatgtacctataagaaatgtgcatcaagccagcctgaccaacatggtgaaaccccatctgtactaaacataaaaaaattagcctggcatggtggtgtacgcctgtaatcccagtgacttgggaggctgaggcaggagaatcgcttgaacccgggaggcggaggttgcagtgagctaagatcgcgccactgtactccagcctgggcaacagcgagactccatctcaaaaaaaaaggaaatgtgtatcaagaacatgattatccaggggtattttctaattcagatcatcaaactgattatatagaagagttggctttaaaatgtttgcaaatgtctttttttttttaatactggaagaaaaaatattctgttgtgtctcatacagtgcttaggatgtctttcacagagcttattaaaaagatgaaacctga

SEQ ID NO: 315571 - DNA, 240 bp, Homo sapiens
gcggccgcctactactactactactactgctcgaattcaagcttctaacgatgtacgggaacatgattatccaggggtattttctaattcagatcatcaaactgattatatagaagagttggctttaaaatgtttgcaaatgtctttttttttttaatactggaagaaaaaatattctgttgtgtctcatacagtgcttaggatgtctttcacagagcttattaaaaagatgaaacctga

SEQ ID NO: 315572 - DNA, 1443 bp, Homo sapiens
gctggcctcagccaatcagcacgcacgccgggacgcgcaaggggaacgttccgggacgttctcgctacgtactctttatcaatcgtcttccggcgcagccccgtccctgttttttgtgctcctccgagctcgctgttcgtccgggttttttacgttttaatttccaggacttgaactgccatgtcctctgaagaaggaaagctcttcgtgggagggctcaactttaacaccgacgagcaggcactggaagaccacttcagcagtttcggacctatctctgaggtggtcgttgtcaaggaccgggagactcagcggtccaggggttttggtttcatcaccttcaccaacccagagcatgcttcagttgccatgagagccatgaacggagagtctctggatggtcgtcagatccgtgtggatcatgcaggcaagtctgctcggggaaccagaggaggtggctttggggcccatgggcgtggtcgcagctactctagaggtggtggggaccagggctatgggagtggcaggtattatgacagtcgacctggagggtatggatatggatatggacgttccagagactataatggcagaaaccagggtggttatgaccgctactcaggaggaaattacagagacaattatgacaactgaaatgagacatgcacataatatagatacacaaggaataatttctgatccaggatcgtccttccaaatggctgtatttataaaggtttttggagctgcactgaagcatcttattttatagtatatcaacctttgtttttaaattgacctgccaaggtagctgaagaccttttagacagttccatcttttttttaatttttctgcctatttaaagacaaattatgggacgtttgtagaacctgagtatttttctttttaccagttttttagtttgagctcttaggtttattggagctagcaataattggttctggcaagtttggccagactgacttcaaaaaattaatgtgtatccagggacattttaaaaacctgtacacagtgtttattgtggttaggaagcaatttcccaatgtacctataagaaatgtgcatcaagccagcctgaccaacatggtgaaaccccatctgtactaaacataaaagctgaggcaggagaatcgcttgaacccgggaggcggaggttgcagtgagctaagatcgcgccactgtactccagcctgggcaacagcgagactccatctcaaaaaaaaaggaaatgtgtatcaagaacatgattatccaggggtattttctaattcagatcatcaaactgattatatagaagagttggctttaaaatgtttgcaaatgtctttttttttttaatactggaagaaaaaatattctgttgtgtctcatacagtgcttaggatgtctttcacagagcttattaaaaagatgaaacctga

SEQ ID NO: 315573 - DNA, 1217 bp, Homo sapiens
gctggcctcagccaatcagcacgcacgccgggacgcgcaaggggaacgttccgggacgttctcgctacgtactctttatcaatcgtcttccggcgcagccccgtccctgttttttgtgctcctccgagctcgctgttcgtccgggttttttacgttttaatttccaggacttgaactgccatgtcctctgaagaaggaaagctcttcgtgggagggctcaactttaacaccgacgagcaggcactggaagaccacttcagcagtttcggacctatctctgaggtggtcgttgtcaaggaccgggagactcagcggtccaggggttttggtttcatcaccttcaccaacccagagcatgcttcagttgccatgagagccatgaacggagagtctctggatggtcgtcagatccgtgtggatcatgcaggcaagtctgctcggggaaccagaggaggtggctttggggcccatgggcgtggtcgcagctactctagaggtggtggggaccagggctatgggagtggcaggtattatgacagtcgacctggagggtatggatatggatatggacgttccagagactataatggcagaaaccagggtggttatgaccgctactcaggaggaaattacagagacaattatgacaactgaaatgagacatgcacataatatagatacacaaggaataatttctgatccaggatcgtccttccaaatggctgtatttataaaggtttttggagctgcactgaagcatcttattttatagtatatcaacctttgtttttaaattgacctgccaaggtagctgaagaccttttagacagttccatcttttttttaatttttctgcctatttaaagacaaattatgggacgtttgtagaacctgagtatttttctttttaccagttttttagtttgagctcttaggtttattggagctagcaataattggttctggcaagtttggccagactgacttcaaaaaattaatgtgtatccagggacattttaaaaacctgtacacagtgtttattgtggttaggaagcaatttcccaatgttggccaggcgggcctcgaactcctgacctcaagtgatctgcccgcctcggcctcccaaagtgctgggatgacgagcgtgagccaccgcgcccagccatccctgccttcctcttatggtctattcacgccagctccttgtacctgccagg

SEQ ID NO: 315574 - DNA, 2139 bp, Homo sapiens
gctggcctcagccaatcagcacgcacgccgggacgcgcaaggggaacgttccgggacgttctcgctacgtactctttatcaatcgtcttccggcgcagccccgtccctgttttttgtgctcctccgagctcgctgttcgtccgggttttttacgttttaatttccaggacttgaactgccatgtcctctgaagaaggaaagctcttcgtgggagggctcaactttaacaccgacgagcaggcactggaagaccacttcagcagtttcggacctatctctgaggtggtcgttgtcaaggaccgggagactcagcggtccaggggttttggtttcatcaccttcaccaacccagagcatgcttcagttgccatgagagccatgaacggagaggtggggcctcctatctgcagagggaccttgtccccatctgcggcttccttcattctttttgtttttccctctgtgtctgctcggggcagcgtggccaccaagccccgcagtgcccactcacaggagcatgactgccttttgttctagggggtggagggcagcggcagacagagcctggccgcctgggaggcgacgactggtcctgcatgaggccgagaagccacctgtggatggttgacctgccttgggcttaggtagtagagtctgcagacctgtgggcctggcccggagaggacctcgtgagtcttctgacatggactctgaagcctcaaaccaagagaggtgtctgtctagccctgatagtcgggcagcttagaggagtggggaggagaactcagcctgagttcagtcaagatgtaagtagtagcaaggggaacatggtgcattcaggtcattttgtgtgggattctatagctcctgatgaagccattctggggtaaaggagcttattctggaacatggcacccagaacctggtgcccagcaggaatttttggcctcttttgcccacttacccttgcctgctcttccctcaccattgccctgactgactgccaacccatcatccttgtgtctcccacacttagtctctggatggtcgtcagatccgtgtggatcatgcaggcaagtctgctcggggaaccagaggaggtggctttggggcccatgggcgtggtcgcagctactctagaggtggtggggaccagggctatgggagtggcaggtattatgacagtcgacctggagggtatggatatggatatggacgttccagagactataatggcagaaaccagggtggttatgaccgctactcaggaggaaattacagagacaattatgacaactgaaatgagacatgcacataatatagatacacaaggaataatttctgatccaggatcgtccttccaaatggctgtatttataaaggtttttggagctgcactgaagcatcttattttatagtatatcaacctttgtttttaaattgacctgccaaggtagctgaagaccttttagacagttccatcttttttttaatttttctgcctatttaaagacaaattatgggacgtttgtagaacctgagtatttttctttttaccagttttttagtttgagctcttaggtttattggagctagcaataattggttctggcaagtttggccagactgacttcaaaaaattaatgtgtatccagggacattttaaaaacctgtacacagtgtttattgtggttaggaagcaatttcccaatgtacctataagaaatgtgcatcaagccagcctgaccaacatggtgaaaccccatctgtactaaacataaaaaaattagcctggcatggtggtgtacgcctgtaatcccagtgacttgggaggctgaggcaggagaatcgcttgaacccgggaggcggaggttgcagtgagctaagatcgcgccactgtactccagcctgggcaacagcgagactccatctcaaaaaaaaaggaaatgtgtatcaagaacatgattatccaggggtattttctaattcagatcatcaaactgattatatagaagagttggctttaaaatgtttgcaaatgtctttttttttttaatactggaagaaaaaatattctgttgtgtctcatacagtgcttaggatgtctttcacagagcttattaaaaagatgaaacctga

SEQ ID NO: 315575 - DNA, 1735 bp, Homo sapiens
  misc_feature (23)..(24): n is a, c, g, or t
  misc_feature (46)..(46): n is a, c, g, or t
  misc_feature (48)..(48): n is a, c, g, or t
gagcctatatgggttacacctanntagaaacccccctttggcgttnanaacagtgtcggcgatctgatcgcgcaccgtctggttttttgtgctcctccgagctcgctgttcgtccgggttttttacgttttaatttccaggacttgaactgccatgtcctctgaagaaggaaagctcttcgtgggagggctcaactttaacaccgacgagcaggcactggaagaccacttcagcagtttcggacctatctctgaggtggtcgttgtcaaggaccgggagactcagcggtccaggggttttggtttcatcaccttcaccaacccagagcatgcttcagttgccatgagagccatgaacggagagggggtggagggcagcggcagacagagcctggccgcctgggaggcgacgactggtcctgcatgaggccgagaagccacctgtggatggttgacctgccttgggcttaggtagtagagtctgcagacctgtgggcctggcccggagaggacctcgtgagtcttctgacatggactctgaagcctcaaaccaagagaggtgtctgtctagccctgatagtcgggcagcttagaggagtggggaggagaactcagcctgagttcagtcaagattctctggatggtcgtcagatccgtgtggatcatgcaggcaagtctgctcggggaaccagaggaggtggctttggggcccatgggcgtggtcgcagctactctagaggtggtggggaccagggctatgggagtggcaggtattatgacagtcgacctggagggtatggatatggatatggacgttccagagactataatggcagaaaccagggtggttatgaccgctactcaggaggaaattacagagacaattatgacaactgaaatgagacatgcacataatatagatacacaaggaataatttctgatccaggatcgtccttccaaatggctgtatttataaaggtttttggagctgcactgaagcatcttattttatagtatatcaacctttgtttttaaattgacctgccaaggtagctgaagaccttttagacagttccatcttttttttaatttttctgcctatttaaagacaaattatgggacgtttgtagaacctgagtatttttctttttaccagttttttagtttgagctcttaggtttattggagctagcaataattggttctggcaagtttggccagactgacttcaaaaaattaatgtgtatccagggacattttaaaaacctgtacacagtgtttattgtggttaggaagcaatttcccaatgtacctataagaaatgtgcatcaagccagcctgaccaacatggtgaaaccccatctgtactaaacataaaaaaattagcctggcatggtggtgtacgcctgtaatcccagtgacttgggaggctgaggcaggagaatcgcttgaacccgggaggcggaggttgcagtgagctaagatcgcgccactgtactccagcctgggcaacagcgagactccatctcaaaaaaaaaggaaatgtgtatcaagaacatgattatccaggggtattttctaattcagatcatcaaactgattatatagaagagttggctttaaaatgtttgcaaatgtctttttttttttaatactggaagaaaaaatattctgttgtgtctcatacagtgcttaggatgtctttcacagagcttattaaaaagatgaaacctga

SEQ ID NO: 315576 - DNA, 1386 bp, Homo sapiens
gctggcctcagccaatcagcacgcacgccgggacgcgcaaggggaacgttccgggacgttctcgctacgtactctttatcaatcgtcttccggcgcagccccgtccctgttttttgtgctcctccgagctcgctgttcgtccgggttttttacgttttaatttccaggacttgaactgccatgtcctctgaagaaggaaagctcttcgtgggagggctcaactttaacaccgacgagcaggcactggaagaccacttcagcagtttcggacctatctctgaggtctctggatggtcgtcagatccgtgtggatcatgcaggcaagtctgctcggggaaccagaggaggtggctttggggcccatgggcgtggtcgcagctactctagaggtggtggggaccagggctatgggagtggcaggtattatgacagtcgacctggagggtatggatatggatatggacgttccagagactataatggcagaaaccagggtggttatgaccgctactcaggaggaaattacagagacaattatgacaactgaaatgagacatgcacataatatagatacacaaggaataatttctgatccaggatcgtccttccaaatggctgtatttataaaggtttttggagctgcactgaagcatcttattttatagtatatcaacctttgtttttaaattgacctgccaaggtagctgaagaccttttagacagttccatcttttttttaatttttctgcctatttaaagacaaattatgggacgtttgtagaacctgagtatttttctttttaccagttttttagtttgagctcttaggtttattggagctagcaataattggttctggcaagtttggccagactgacttcaaaaaattaatgtgtatccagggacattttaaaaacctgtacacagtgtttattgtggttaggaagcaatttcccaatgtacctataagaaatgtgcatcaagccagcctgaccaacatggtgaaaccccatctgtactaaacataaaaaaattagcctggcatggtggtgtacgcctgtaatcccagtgacttgggaggctgaggcaggagaatcgcttgaacccgggaggcggaggttgcagtgagctaagatcgcgccactgtactccagcctgggcaacagcgagactccatctcaaaaaaaaaggaaatgtgtatcaagaacatgattatccaggggtattttctaattcagatcatcaaactgattatatagaagagttggctttaaaatgtttgcaaatgtctttttttttttaatactggaagaaaaaatattctgttgtgtctcatacagtgcttaggatgtctttcacagagcttattaaaaagatgaaacctga

SEQ ID NO: 315577 - DNA, 2186 bp, Homo sapiens
gctggcctcagccaatcagcacgcacgccgggacgcgcaaggggaacgttccgggacgttctcgctacgtactctttatcaatcgtcttccggcgcagccccgtccctgttttttgtgctcctccgagctcgctgttcgtccgggttttttacgttttaatttccaggacttgaactgccatgtcctctgaagaaggaaagctcttcgtgggagggctcaactttaacaccgacgagcaggcactggaagaccacttcagcagtttcggacctatctctgagggtgagacgggccatactcacaatgggggttggtgagagaaagtctgggatccttgcatttcaaggagtattaactgaaaagttaggacccacgcctccaaattctttttcttcctaagcctatggtgtagactaaggatgaggggaagcgtctttgggattagtgggagcgctccgttttccctacctatgccatctccttttccggccaccctttgctacttaacctttggggtactgactggtccacattgctccatcttctctccctctcacagtggtcgttgtcaaggaccgggagactcagcggtccaggggttttggtttcatcaccttcaccaacccagagcatgcttcagttgccatgagagccatgaacggagaggtggggcctcctatctgcagagggaccttgtccccatctgcggcttccttcattctttttgtttttccctctgtgtctgctcggggcagcgtggccaccaagccccgcagtgcccactcacaggagcatgactgccttttgttctagggggtggagggcagcggcagacagagcctggccgcctgggaggcgacgactggtcctgcatgaggccgagaagccacctgtggatggttgacctgccttgggcttaggtagtagagtctgcagacctgtgggcctggcccggagaggacctcgtgagtcttctgacatggactctgaagcctcaaaccaagagaggtgtctgtctagccctgatagtcgggcagcttagaggagtggggaggagaactcagcctgagttcagtcaagattctctggatggtcgtcagatccgtgtggatcatgcaggcaagtctgctcggggaaccagaggaggtggctttggggcccatgggcgtggtcgcagctactctagaggtggtggggaccagggctatgggagtggcaggtattatgacagtcgacctggagggtatggatatggatatggacgttccagagactataatggcagaaaccagggtggttatgaccgctactcaggaggaaattacagagacaattatgacaactgaaatgagacatgcacataatatagatacacaaggaataatttctgatccaggatcgtccttccaaatggctgtatttataaaggtttttggagctgcactgaagcatcttattttatagtatatcaacctttgtttttaaattgacctgccaaggtagctgaagaccttttagacagttccatcttttttttaatttttctgcctatttaaagacaaattatgggacgtttgtagaacctgagtatttttctttttaccagttttttagtttgagctcttaggtttattggagctagcaataattggttctggcaagtttggccagactgacttcaaaaaattaatgtgtatccagggacattttaaaaacctgtacacagtgtttattgtggttaggaagcaatttcccaatgtacctataagaaatgtgcatcaagccagcctgaccaacatggtgaaaccccatctgtactaaacataaaaaaattagcctggcatggtggtgtacgcctgtaatcccagtgacttgggaggctgaggcaggagaatcgcttgaacccgggaggcggaggttgcagtgagctaagatcgcgccactgtactccagcctgggcaacagcgagactccatctcaaaaaaaaaggaaatgtgtatcaagaacatgattatccaggggtattttctaattcagatcatcaaactgattatatagaagagttggctttaaaatgtttgcaaatgtctttttttttttaatactggaagaaaaaatattctgttgtgtctcatacagtgcttaggatgtctttcacagagcttattaaaaagatgaaacctga

SEQ ID NO: 315578 - DNA, 1848 bp, Homo sapiens
gctggcctcagccaatcagcacgcacgccgggacgcgcaaggggaacgttccgggacgttctcgctacgtactctttatcaatcgtcttccggcgcagccccgtccctgttttttgtgctcctccgagctcgctgttcgtccgggttttttacgttttaatttccaggacttgaactgccatgtcctctgaagaaggaaagctcttcgtgggagggctcaactttaacaccgacgagcaggcactggaagaccacttcagcagtttcggacctatctctgaggtggtcgttgtcaaggaccgggagactcagcggtccaggggttttggtttcatcaccttcaccaacccagagcatgcttcagttgccatgagagccatgaacggagagtctctggatggtcgtcagatccgtgtggatcatgcaggcaagtctgctcggggaaccagaggaggtggctttggggcccatgggcgtggtcgcagctactctagaggtggtggggaccagggctatgggagtggcaggtattatgacagtcgacctggagggtatggatatggatatggacgttccagagactataatggcagaaaccagggtggttatgaccgctactcaggaggaaattacagagacaattatgacaactgaaatgagacatgcacataatataggtgagacttggatatcggcattgagtgaacctgtttgtcacactctgtcatgaccctctcaccttttctggcaagactgctctgcatttctgctgccctcatacctcacccagccaacctaccaaacattcctagctaggccttccttgctctcaggtgcatatcagagcaagtttgctagggggtgggatctgaaaacccatctcctataatcttctactcttgtgtgggatggaggaaatgaaggtgtgtccctgttgtccaaccctcagcatcttcatcagctctaggaggtgagcatgttgtcagctgttacttcatgacatcacaattctccccctcttgctgttcccagatacacaaggaataatttctgatccaggatcgtccttccaaatggctgtatttataaaggtttttggagctgcactgaagcatcttattttatagtatatcaacctttgtttttaaattgacctgccaaggtagctgaagaccttttagacagttccatcttttttttaatttttctgcctatttaaagacaaattatgggacgtttgtagaacctgagtatttttctttttaccagttttttagtttgagctcttaggtttattggagctagcaataattggttctggcaagtttggccagactgacttcaaaaaattaatgtgtatccagggacattttaaaaacctgtacacagtgtttattgtggttaggaagcaatttcccaatgtacctataagaaatgtgcatcaagccagcctgaccaacatggtgaaaccccatctgtactaaacataaaaaaattagcctggcatggtggtgtacgcctgtaatcccagtgacttgggaggctgaggcaggagaatcgcttgaacccgggaggcggaggttgcagtgagctaagatcgcgccactgtactccagcctgggcaacagcgagactccatctcaaaaaaaaaggaaatgtgtatcaagaacatgattatccaggggtattttctaattcagatcatcaaactgattatatagaagagttggctttaaaatgtttgcaaatgtctttttttttttaatactggaagaaaaaatattctgttgtgtctcatacagtgcttaggatgtctttcacagagcttattaaaaagatgaaacctga

SEQ ID NO: 315579 - DNA, 1247 bp, Homo sapiens
cgtccgcggaaatttgaaatggctgacgggtcgctgacgggcggcggtctggaggcagcggccatggcgccggagcgcacgggctgggcggtggagcaggagctggcgtctctggagaaagtttttcagaagaagtgaagtcaaagatgcaagaaccatttgctatttctggggagtcctggcggtttcttattacaggctgttcatgtgaacgcccaacgccgatgacacaggctgtacttgtagacaacccactgtcacgtgtgcccggattacttccacggatcatccgtacttccgaagatcctaaatgaggacatggtggcaggagacaaatccgaattatgttcctctgaaaaacagggacgactatctctggatccaactccacattgagaaccagcattgtgtaccatgtggtcttgacctctggtacacaacatgtgatccctacagaaagtgggagccggactcactcagcatagattacctggatacccagaagcaattatctgtggcatgcacgaccagtggctaccagcaggacctgctaccattcttgacacgacaacaacgttcctaccaacagctgtgagtacacacctcagaaatatgagaggctgagaccccacaatgggtggacaacagactttaagcccactgatggcttggataagacatggaataaatttcacgtcacgtgagctagaagggccttcgatcttttcgttgagagggcgcacaatcgtgaatacacaaagtaagcacatttaataaccaatgaatgtatgaacccaggagcattagaaacacagccggggacggcgaacagcaccgaccaccgcgcggaccaaaaaaaagacgacgtcacaggggcgcaagaaaaacgggcaaacagtcagccctgaccggagcagcccccgaagtaacaaaaatcgaacgacaaccgtcacaaaagaaggagatcgccccacacgaccacggaacacgaacacccacaaacaggcgaaaaaacacacggcgaaccgacagcgacaacacagcagaacccccaccagaaatgcaaccatgacacacaaaagataagagacagaaaacacagcgcacaaagcacaaagcgacgaccaaaagagagacaaaacgacgcaaaaggaacaaacaaagcacaacaagccagcggacaaacaaccaacgaagcacgaaaacgcaacaaaaaggggcgcgcccccgcccgcagggggagagga

SEQ ID NO: 315580 - DNA, 3218 bp, Homo sapiens
cgtccgcggaaatttgaaatggctgacgggtcgctgacgggcggcggtctggaggcagcggccatggcgccggagcgcacgggctgggcggtggagcaggagctggcgtctctggagaaaggtttgttccaagatgaagattcatgcagtgattgtagctaccgtgataaaccaggttctagtttacaaagttttatgccagaaggaaaaacctttttcccagaaattttccaaacaaatcaacttttgttctatgagcgattcagagcctatcaagattacattttagctgactgcaaggcctctgaggtacaggaattcacagctgagttcttggagaaggtccttgagccatctggatggcgggcagtctggcacactaatgtgttcaaggtgctggttgagatcacagatgtggactttgcagccttgaaggcagtggtgaggcttgctgaaccatacctctgtgactctcaagtgagcacttttaccatggagtgcatgaaggagctccttgatctgaaggagcatcggttgcccctgcaggagctgtgggtggtgtttgatgattcaggagtgtttgaccagacagcccttgcaattgagcatgtcagatttttctaccaaaacatttggaggagttgggatgaagaagaggaggatgaatacgattattttgtcagatgtgttgaacctcgattaagattgcattatgacattcttgaagaccgagttccatcaggacttattgttgactaccacaatctgttgtctcaatgtgaggagagttacaggaaatttttaaatctgagaagcagtttgtcaaattgtaactctgactccgagcaggaaaatatctccatggtggaagggttaaaattgtattcggagatggaacagttgaaacaaaagctgaaactcattgagaatcctttgttgaggtatgtgtttggttatcagaagaattctaacatccaagcaaagggtgtccgttccagcggtcagaagatcactcatgtggtctcctccaccatgatggctggtctcctgcggtccctgcttacggacaggctttgccaggagcctggtgaggaagaaagagaaattcagttccatagtgatccattgtctgctataaatgcctgcttcgaaggtgacactgttattgtttgtcctggccattatgtggtacatggcactttctccattgctgactccattgagttggaaggatatggcctaccagatgacattgtgatagaaaagaggggcaaaggcgacacttttgtggactgcactggtgctgatattaaaatctcaggcataaaatttgttcagcatgatgctgtagagggaatcttaattgttcaccgtggtaagactacgctggaaaactgtgtgctgcagtgtgagacgaccggagtcacagtgcggacatcagcagagtttctaatgaagaactcggatttatatggcgccaagggtgctggtatagaaatctaccctgggagtcagtgcaccctgagtgacaatgggatccatcactgcaaggaagggatcctcattaaggacttcttagatgaacattatgacattcccaagatatccatggtgaataatataatacataataatgaaggttatggtgttgtcttggtgaaacctacaatcttctctgacctgcaagaaaatgctgaagatggaactgaagaaaataaagcgcttaaaattcagacaagtggagagccagatgtggctgaaagagtggatctagaagagctgattgagtgtgcaactggtaaaatggagctttgtgcaagaactgacccttctgagcaagtcgagggaaattgtgaaattgtaaatgaactaattgctgcctccacacagaaaggccagataaagaagaaaaggttgagtgaactggggatcacgcaagctgatgacaacttaatgtcacaggagatgtttgttgggattgtggggaaccagttcaagtggaatgggaaaggtagttttggcacatttcttttctgactacagtgatgtaagtagatagcaaaatactggattttgcacatgctgccctaagaatcactgctgccattgtagtttgctgtattgtctgtattttatatttgattatttgggcttgagtgaaaggtagatttatttccatttgcaggtgttgcacataaaacactccctctttataagaaaaatcataaatgcatataaaatagaaaatatttggagattgcttatctgaaagtcttgctttcttatacacatggttctctcatattaagcctggtggtaactttttagtgtaattacctttagcacttcaaagacgaggaagtaaggaagggaatgcaagactagtgcataaaaatgcaataggtgtcatatgtacagcattcttcttagagttgccttttcatcccaattacagtgagtctgatttccatcctgtatttgcataatacttgtcttaaaataaaagcttttatgattgggaatttatctgcctaatcagacttattattgagacgtcaatgggacgcatttttctgttgagctatgcagtcgtcaaaacagcgatagacagcataggaggtttgaagcagaaatgaaatgtgttattcagagccaatgttgtacatagagcattttcactattgctgaatgggaatgattaaaaacaaggtatttttcgggccaggcggtggctcacgcttgtaatcgcagcactttgggaggctgaggcaggaggatcacttgagcccaggagttcaagactagcctaggcaacatagtgagaccctgtctctactaaaaataaatttaaaaaaaattagctgagtgtggtggtgcatgcatgtagttccagctactcaggaggctgaggctagaggatccttgagcccaggaggttgaggctgcagtgaggtgtgattgcgccactgcattccagcttgggcgacagagcgagacccagtctcaaaaaaaaaaaaaaagtatttttctcttaccgttacagtattctgattatattactgacacagtcaaaatgattaactgtacaacctgtatctgctgggtgttcttgttatcatattgtaaaacagctttaaaaatatttatattttaaaaactgtatgtgacattaatatgcctaatgattaaaattatagtgatgaaataacaaaattgaa

SEQ ID NO: 315581 - DNA, 3055 bp, Homo sapiens
cgtccgcggaaatttgaaatggctgacgggtcgctgacgggcggcggtctggaggcagcggccatggcgccggagcgcacgggctgggcggtggagcaggagctggcgtctctggagaaaggtttgttccaagatgaagattcatgcagtgattgtagctaccgtgataaaccaggttctagtttacaaagttttatgccagaaggaaaaacctttttcccagaaattttccaaacaaatcaacttttgttctatgagcgattcagagcctatcaagattacattttagctgactgcaaggcctctgaggtacaggaattcacagctgagttcttggagaaggtccttgagccatctggatggcgggcagtctggcacactaatgtgttcaaggtgctggttgagatcacagatgtggactttgcagccttgaaggcagtggtgaggcttgctgaaccatacctctgtgactctcaagtgagcacttttaccatggagtgcatgaaggagctccttgatctgaaggagcatcggttgcccctgcaggagctgtgggtggtgtttgatgattcaggagtgtttgaccagacagcccttgcaattgagcatgtcagatttttctaccaaaacatttggaggagttgggatgaagaagaggaggatgaatacgattattttgtcagatgtgttgaacctcgattaagattgcattatgacattcttgaagaccgagttccatcaggacttattgttgactaccacaatctgttgtctcaatgtgaggagagttacaggaaatttttaaatctgagaagcagtttgtcaaattgtaactctgactccgagcaggaaaatatctccatggtggaagggttaaaattgtattcggagatggaacagttgaaacaaaagctgaaactcattgagaatcctttgttgaggtatgtgtttggttatcagaagaattctaacatccaagcaaagggtgtccgttccagcggtcagaagatcactcatgtggtctcctccaccatgatggctggtctcctgcggtccctgcttacggacaggctttgccaggagcctggtgaggaagaaagagaaattcagttccatagtgatccattgtctgctataaatgcctgcttcgaaggtgacactgttattgtttgtcctggccattatgtggtacatggcactttctccattgctgactccattgagttggaaggatatggcctaccagatgacattgtgatagaaaagaggggcaaaggcgacacttttgtggactgcactggtgctgatattaaaatctcaggcataaaatttgttcagcatgatgctgtagagggaatcttaattgttcaccgtggtaagactacgctggaaaactgtgtgctgcagtgtgagacgaccggagtcacagtgcggacatcagcagagtttctaatgaagaactcggatttatatggcgccaagggtgctggtatagaaatctaccctgggagtcagtgcaccctgagtgacaatgggatccatcactgcaaggaagggatcctcattaaggacttcttagatgaacattatgacattcccaagatatccatggtgaataatataatacataataatgaaggttatggtgttgtcttggtgaaacctacaatcttctctgacctgcaagaaaatgctgaagatggaactgaagaaaataaagcgcttaaaattcagacaagtggagagccagatgtggctgaaagagtggatctagaagagctgattgagtgtgcaactggtaaaatggagctttgtgcaagaactgacccttctgagcaagtcgagggaaattgtgaaattgtaaatgaactaattgctgcctccacacagaaaggccagataaagaagaaaaggttgagtgaactggggatcacgcaagctgatgacaacttaatgtcacaggagatgtttgttgggattgtggggaaccagttcaagtggaatgggaaaggtagttttggcacatttcttttctgactacagtgatgtaagtagatagcaaaatactggattttgcacatgctgccctaagaatcactgctgccattgtagtttgctgtattgtctgtattttatatttgattatttgggcttgagtgaaaggtagatttatttccatttgcaggtgttgcacataaaacactccctctttataagaaaaatcataaatgcatataaaatagaaaatatttggagattgcttatctgaaagtcttgctttcttatacacatggttctctcatattaagcctggtggtaactttttagtgtaattacctttagcacttcaaagacgaggaagtaaggaagggaatgcaagactagtgcataaaaatgcaataggtgtcatatgtacagcattcttcttagagttgccttttcatcccaattacagtgagtctgatttccatcctgtatttgcataatacttgtcttaaaataaaagcttttatgattgggaatttatctgcctaatcagacttattattgagacgtcaatgggacgcatttttctgttgagctatgcagtcgtcaaaacagcgatagacagcataggaggtttgaagcagaaatgaaatgtgttattcagagccaatgttgtacatagagcattttcactattgctgaatgggaatgattaaaaacaaggtatttttcgggccaggcggtggctcacgcttgtaatcgcagcactttgggaggctgaggcaggaggatcacttgagcccaggagttcaagactagcctaggcaacatagtgagaccctgtctctactaaaaaaaaaaaaaaaaaaaagtatttttctcttaccgttacagtattctgattatattactgacacagtcaaaatgattaactgtacaacctgtatctgctgggtgttcttgttatcatattgtaaaacagctttaaaaatatttatattttaaaaactgtatgtgacattaatatgcctaatgattaaaattatagtgatgaaataacaaaattgaa

SEQ ID NO: 315582 - DNA, 356 bp, Homo sapiens
atgactatcaaccatagcaaatatgcagcattctctaagatatgagaattgttttgatttactctttagctctcacccctccaaaatcctaatgttttgagccagtgatagaatttgaatgatactaagttccatttcagatttttctaccaaaacatttggaggagttgggatgaagaagaggaggatgaatacgattattttgtcagatgtgttgaacctcgattaagattgtaagtatttattgctgaccttgttgtacatgttggaaaaatagttacccatggtttaattttgcctgtgtgagatacacacacacacacacacccacactcactcactcactctctctctct

SEQ ID NO: 315583 - DNA, 2984 bp, Homo sapiens
cgtccgcggaaatttgaaatggctgacgggtcgctgacgggcggcggtctggaggcagcggccatggcgccggagcgcacgggctgggcggtggagcaggagctggcgtctctggagaaaggtttgttccaagatgaagattcatgcagtgattgtagctaccgtgataaaccaggttctagtttacaaagttttatgccagaaggaaaaacctttttcccagaaattttccaaacaaatcaacttttgttctatgagcgattcagagcctatcaagattacattttagctgactgcaaggcctctgaggtacaggaattcacagctgagttcttggagaaggtccttgagccatctggatggcgggcagtctggcacactaatgtgttcaaggtgctggttgagatcacagatgtggactttgcagccttgaaggcagtggtgaggcttgctgaaccatacctctgtgactctcaagtgagcacttttaccatggagtgcatgaaggagctccttgatctgaaggagcatcggttgcccctgcaggagctgtgggtggtgtttgatgattcaggagtgtttgaccagacagcccttgcaattgagcatgtcagatttttctaccaaaacatttggaggagttgggatgaagaagaggaggatgaatacgattattttgtcagatgtgttgaacctcgattaagattgtatgtgtttggttatcagaagaattctaacatccaagcaaagggtgtccgttccagcggtcagaagatcactcatgtggtctcctccaccatgatggctggtctcctgcggtccctgcttacggacaggctttgccaggagcctggtgaggaagaaagagaaattcagttccatagtgatccattgtctgctataaatgcctgcttcgaaggtgacactgttattgtttgtcctggccattatgtggtacatggcactttctccattgctgactccattgagttggaaggatatggcctaccagatgacattgtgatagaaaagaggggcaaaggcgacacttttgtggactgcactggtgctgatattaaaatctcaggcataaaatttgttcagcatgatgctgtagagggaatcttaattgttcaccgtggtaagactacgctggaaaactgtgtgctgcagtgtgagacgaccggagtcacagtgcggacatcagcagagtttctaatgaagaactcggatttatatggcgccaagggtgctggtatagaaatctaccctgggagtcagtgcaccctgagtgacaatgggatccatcactgcaaggaagggatcctcattaaggacttcttagatgaacattatgacattcccaagatatccatggtgaataatataatacataataatgaaggttatggtgttgtcttggtgaaacctacaatcttctctgacctgcaagaaaatgctgaagatggaactgaagaaaataaagcgcttaaaattcagacaagtggagagccagatgtggctgaaagagtggatctagaagagctgattgagtgtgcaactggtaaaatggagctttgtgcaagaactgacccttctgagcaagtcgagggaaattgtgaaattgtaaatgaactaattgctgcctccacacagaaaggccagataaagaagaaaaggttgagtgaactggggatcacgcaagctgatgacaacttaatgtcacaggagatgtttgttgggattgtggggaaccagttcaagtggaatgggaaaggtagttttggcacatttcttttctgactacagtgatgtaagtagatagcaaaatactggattttgcacatgctgccctaagaatcactgctgccattgtagtttgctgtattgtctgtattttatatttgattatttgggcttgagtgaaaggtagatttatttccatttgcaggtgttgcacataaaacactccctctttataagaaaaatcataaatgcatataaaatagaaaatatttggagattgcttatctgaaagtcttgctttcttatacacatggttctctcatattaagcctggtggtaactttttagtgtaattacctttagcacttcaaagacgaggaagtaaggaagggaatgcaagactagtgcataaaaatgcaataggtgtcatatgtacagcattcttcttagagttgccttttcatcccaattacagtgagtctgatttccatcctgtatttgcataatacttgtcttaaaataaaagcttttatgattgggaatttatctgcctaatcagacttattattgagacgtcaatgggacgcatttttctgttgagctatgcagtcgtcaaaacagcgatagacagcataggaggtttgaagcagaaatgaaatgtgttattcagagccaatgttgtacatagagcattttcactattgctgaatgggaatgattaaaaacaaggtatttttcgggccaggcggtggctcacgcttgtaatcgcagcactttgggaggctgaggcaggaggatcacttgagcccaggagttcaagactagcctaggcaacatagtgagaccctgtctctactaaaaataaatttaaaaaaaattagctgagtgtggtggtgcatgcatgtagttccagctactcaggaggctgaggctagaggatccttgagcccaggaggttgaggctgcagtgaggtgtgattgcgccactgcattccagcttgggcgacagagcgagacccagtctcaaaaaaaaaaaaaaagtatttttctcttaccgttacagtattctgattatattactgacacagtcaaaatgattaactgtacaacctgtatctgctgggtgttcttgttatcatattgtaaaacagctttaaaaatatttatattttaaaaactgtatgtgacattaatatgcctaatgattaaaattatagtgatgaaataacaaaattgaa

SEQ ID NO: 315584 - DNA, 2408 bp, Homo sapiens
agtgtcgtaaacgtcggatatccggttcttctgggcgctaagggagctgacggagagggccaccgcccagcaatagacggtgcctcagcctgccgagccgcagtttccgtggtgtgagtgagtccgggcccgtgtcccctctcccgccgccgccatgggctgcacgttgagcgccgaagacaaggcggcagtggagcgaagcaagatgatcgaccgcaacttacgggaggacggggaaaaagcggccaaagaagtgaagctgctgctactcggtgctggagaatctggtaaaagcaccattgtgaaacagatgaaaatcattcatgaggatggctattcagaggatgaatgtaaacaatataaagtagttgtctacagcaatactatacagtccatcattgcaatcataagagccatgggacggctaaagattgactttggggaagctgccagggcagatgatgcccggcaattatttgttttagctggcagtgctgaagaaggagtcatgactccagaactagcaggagtgattaaacggttatggcgagatggtggggtacaagcttgcttcagcagatccagggaatatcagctcaatgattctgcttcatattatctaaatgatctggatagaatatcccagtctaactacattccaactcagcaagatgttcttcggacgagagtgaagaccacaggcattgtagaaacacatttcaccttcaaagacctatacttcaagatgtttgatgtaggtggccaaagatcagaacgaaaaaagtggattcactgttttgagggagtgacagcaattatcttctgtgtggccctcagtgattatgaccttgttctggctgaggacgaggagatgaaccgaatgcatgaaagcatgaaactgtttgacagcatttgtaataacaaatggtttacagaaacttcaatcattctcttccttaacaagaaagacctttttgaggaaaaaataaagaggagtccgttaactatctgttatccagaatacacaggttccaatacatatgaagaggcagctgcctatattcaatgccagtttgaagatctgaacagaagaaaagataccaaggagatctatactcacttcacctgtgccacagacacgaagaatgtgcagtttgtttttgatgctgttacagatgtcatcattaaaaacaacttaaaggaatgtggactttattgagaagcatggatgttagtgaaagttactacagtgtggagtgttgagaccagacaccttttgctgtctcatggggcagctacaagcatgaacgggaccagggaatggcagcagcatgcagaatcttagcactctttagcacaatattttgtattagggaacttttaattgacatgagatgctaaagtcagacattggaattggaagaactataaagtgtgattcgatcgtcaagacatcacttggatttcttaatcttaaatgcttatggaagatgtgaagttgaggtgctgcattctagaacttcaatatgtagcttactctttttttccccccttcttaaaccaccagtggttcatttttaaggttttttcatcaagagaagaataactttactaaattttatttctttatttgcaaaagaatctttattaaaacaaacaatcttaactatgcacatgatgtgaccagatcatcttgaaaatattcctctttagtaggaactctttgtttttaactcttggtatggtcagaatataatacttccataattacttataattctttccggttactggggctataaatacaactttttaaatgaaatttatgttattatcctgctcaaagtaccattatggtttccatatggtaattacattggaaagttctgcaataagattctagttctctcttttctttaagcttatggttgaaggttaaccttgtttgtgcagattaccaaattactgctgatgtagtatgataaagtcagcttcttggatacagacacacccagggcagctgccaatcagaaatgcaaattgctaaattccaaacagaaccagtgactttgctgctacatatttactaaattgaccactttgattcttgcttgtttgtctcagttatagggagttttgtacatggtgcctcttgttttccatcttcatggccttttctgttgagaaacatctaaagtgtattaacagtgcatgcttttactttgtaaatgtggtgccaaatccctgtttgccatcgtttttactgtaccgatgttaactgtagtaatccttagccagtatgttcttttgctgaaactgttgcattttgggacttttttccactttgtcatgtgtacatttttaatctgttatagttggcggcagtattaaaatggtgagtaaagagc

SEQ ID NO: 315585 - DNA, 3320 bp, Homo sapiens
ggacggcgtgggtcgacccacgcgtcgccacgcgtccggccgcagtttccgtggtgtgagtgagtccgggcccgtgtcccctctcccgccgccgccatgggctgcacgttgagcgccgaagacaaggcggcagtggagcgaagcaagatgatcgaccgcaacttacgggaggacggggaaaaagcggccaaagaagtgaagctgctgctactcggtgctggagaatctggtaaaagcaccattgtgaaacagatgaaaatcattcatgaggatggctattcagaggatgaatgtaaacaatataaagtagttgtctacagcaatactatacagtccatcattgcaatcataagagccatgggacggctaaagattgactttggggaagctgccagggcagatgatgcccggcaattatttgttttagctggcagtgctgaagaaggagtcatgactccagaactagcaggagtgattaaacggttatggcgagatggtggggtacaagcttgcttcagcagatccagggaatatcagctcaatgattctgcttcatattatctaaatgatctggatagaatatcccagtctaactacattccaactcagcaagatgttcttcggacgagagtgaagaccacaggcattgtagaaacacatttcaccttcaaagacctatacttcaagatgtttgatgtaggtggccaaagatcagaacgaaaaaagtggattcactgttttgagggagtgacagcaattatcttctgtgtggccctcagtgattatgaccttgttctggctgaggacgaggagatgaaccgaatgcatgaaagcatgaaactgtttgacagcatttgtaataacaaatggtttacagaaacttcaatcattctcttccttaacaagaaagacctttttgaggaaaaaataaagaggagtccgttaactatctgttatccagaatacacaggttccaatacatatgaagaggcagctgcctatattcaatgccagtttgaagatctgaacagaagaaaagataccaaggagatctatactcacttcacctgtgccacagacacgaagaatgtgcagtttgtttttgatgctgttacagatgtcatcattaaaaacaacttaaaggaatgtggactttattgagaagcatggatgttagtgaaagttactacagtgtggagtgttgagaccagacaccttttgctgtctcatggggcagctacaagcatgaacgggaccagggaatggcagcagcatgcagaatcttagcactctttagcacaatattttgtattagggaacttttaattgacatgagatgctaaagtcagacattggaattggaagaactataaagtgtgattcgatcgtcaagacatcacttggatttcttaatcttaaatgcttatggaagatgtgaagttgaggtgctgcattctagaacttcaatatgtagcttactctttttttccccccttcttaaaccaccagtggttcatttttaaggttttttcatcaagagaagaataactttactaaattttatttctttatttgcaaaagaatctttattaaaacaaacaatcttaactatgcacatgatgtgaccagatcatcttgaaaatattcctctttagtaggaactctttgtttttaactcttggtatggtcagaatataatacttccataattacttataattctttccggttactggggctataaatacaactttttaaatgaaatttatgttattatcctgctcaaagtaccattatggtttccatatggtaattacattggaaagttctgcaataagattctagttctctcttttctttaagcttatggttgaaggttaaccttgtttgtgcagattaccaaattactgctgatgtagtatgataaagtcagcttcttggatacagacacacccagggcagctgccaatcagaaatgcaaattgctaaattccaaacagaaccagtgactttgctgctacatatttactaaattgaccactttgattcttgcttgtttgtctcagttatagggagttttgtacatggtgcctcttgttttccatcttcatggccttttctgttgagaaacatctaaagtgtattaacagtgcatgcttttactttgtaaatgtggtgccaaatccctgtttgccatcgtttttactgtaccgatgttaactgtagtaatccttagccagtatgttcttttgctgaaactgttgcattttgggacttttttccactttgtcatgtgtacatttttaatctgttatagttggcggcagtattaaaatggtgagtaaagagcccaggtttgctcctgtttgtaactagtcttttctggaaatactgtcttctgtttccttttgcctttgcagaatgtgctttagcctttgtctgagaatgggtttaggtagaagggtttcctgaaagtctagtcttttggtgtaatagtattgttgaaccttaggttttatgttatatctgcatatgagtgatatgtgatcatgattcattttgcagatttacattttgcttgtgtggaaagttacgttcacttcaacctacagacccttttgtataatgtacagcaaatgtcattaaatattgaatgctctattgggggaagacaaatgaagagaatgcattttgagcatttcaaatcagtagtttgggcagtgccttttggggtccaatctttttggattggattctatttcatcttttgatgtgacttttcactagtttacaaaaaaaaggttggtggtcaacaaaaaaagcaagtcatagcagttcagtgcctttgttggtagtttttaactttttttgtgattctttttggaaaatcatagcttacagatggtataactgtattatataatggaattttctttaggtgtgggaaaacttgatctgaaagaaaattatcagcttcaattggcgattgattcagtgcccacaatgtaaacagggttggtagttgttactcattttgaatataccttttccttattgtattctgtaatataggatccttgaaatgagacctggtggaatattattttcaactgtagtctttctatactgtggactaatgaaatggtgttgttgataatctaaaataaccaataatccaaaaaagttcattttactttgaatttgtattttcatttgaatatctatctgatatgttaaatttttagcccttctgttaaagaaaaatagcagtccccatttatctgcctgtgtaccactcagtttagtaacctctaggcagc

SEQ ID NO: 315586 - DNA, 3324 bp, Homo sapiens
agtgtcgtaaacgtcggatatccggttcttctgggcgctaagggagctgacggagagggccaccgcccagcaatagacggtgcctcagcctgccgagccgcagtttccgtggtgtgagtgagtccgggcccgtgtcccctctcccgccgccgccatgggctgcacgttgagcgccgaagacaaggcggcagtggagcgaagcaagatgatcgaccgcaacttacgggaggacggggaaaaagcggccaaagaagtgaagctgctgctactcggtgctggagaatctggtaaaagcaccattgtgaaacagatgaaaatcattcatgaggatggctattcagaggatgaatgtaaacaatataaagtagttgtctacagcaatactatacagtccatcattgcaatcataagagccatgggacggctaaagattgactttggggaagctgccagggcagatgatgcccggcaattatttgttttagctggcagtgctgaagaaggagtcatgactccagaactagcaggagtgattaaacggttatggcgagatggtggggtacaagcttgcttcagcagatccagggaatatcagctcaatgattctgcttcatattatctaaatgatctggatagaatatcccagtctaactacattccaactcagcaagatgttcttcggacgagagtgaagaccacaggcattgtagaaacacatttcaccttcaaagacctatacttcaagatgtttgatgtaggtggccaaagatcagaacgaaaaaagtggattcactgttttgagggagtgacagcaattatcttctgtgtggccctcagtgattatgaccttgttctggctgaggacgaggagatgaaccgaatgcatgaaagcatgaaactgtttgacagcatttgtaataacaaatggtttacagaaacttcaatcattctcttccttaacaagaaagacctttttgaggaaaaaataaagaggagtccgttaactatctgttatccagaatacacaggttccaatacatatgaagaggcagctgcctatattcaatgccagtttgaagatctgaacagaagaaaagataccaaggagatctatactcacttcacctgtgccacagacacgaagaatgtgcagtttgtttttgatgctgttacagatgtcatcattaaaaacaacttaaaggaatgtggactttattgagaagcatggatgttagtgaaagttactacagtgtggagtgttgagaccagacaccttttgctgtctcatggggcagctacaagcatgaacgggaccagggaatggcagcagcatgcagaatcttagcactctttagcacaatattttgtattagggaacttttaattgacatgagatgctaaagtcagacattggaattggaagaactataaagtgtgattcgatcgtcaagacatcacttggatttcttaatcttaaatgcttatggaagatgtgaagttgaggtgctgcattctagaacttcaatatgtagcttactctttttttccccccttcttaaaccaccagtggttcatttttaaggttttttcatcaagagaagaataactttactaaattttatttctttatttgcaaaagaatctttattaaaacaaacaatcttaactatgcacatgatgtgaccagatcatcttgaaaatattcctctttagtaggaactctttgtttttaactcttggtatggtcagaatataatacttccataattacttataattctttccggttactggggctataaatacaactttttaaatgaaatttatgttattatcctgctcaaagtaccattatggtttccatatggtaattacattggaaagttctgcaataagattctagttctctcttttctttaagcttatggttgaaggttaaccttgtttgtgcagattaccaaattactgctgatgtagtatgataaagtcagcttcttggatacagacacacccagggcagctgccaatcagaaatgcaaattgctaaattccaaacagaaccagtgactttgctgctacatatttactaaattgaccactttgattcttgcttgtttgtctcagttatagggagttttgtacatggtgcctcttgttttccatcttcatggccttttctgttgagaaacatctaaagtgtattaacagtgcatgcttttactttgtaaatgtggtgccaaatccctgtttgccatcgtttttactgtaccgatgttaactgtagtaatccttagccagtatgttcttttgctgaaactgttgcattttgggacttttttccactttgtcatgtgtacatttttaatctgttatagttggcggcagtattaaaatggtgagtaaagagcccaggtttgctcctgtttgtaactagtcttttctggaaatactgtcttctgtttccttttgcctttgcagaatgtgctttagcctttgtctgagaatgggtttaggtagaagggtttcctgaaagtctagtcttttggtgtaatagtattgttgaaccttaggttttatgttatatctgcatatgagtgatatgtgatcatgattcattttgcagatttacattttgcttgtgtggaaagttacgttcacttcaacctacagacccttttgtataatgtacagcaaatgtcattaaatattgaatgctctattgggggaagacaaatgaagagaatgcattttgagcatttcaaatcagtagtttgggcagtgccttttggggtccaatctttttggattggattctatttcatcttttgatgtgacttttcactagtttacaaaaaaaaggttggtggtcaacaaaaaaagcaagtcatagcagttcagtgcctttgttggtagtttttaactttttttgtgattctttttggaaaatcatagcttacagatggtataactgtattatataatggaattttctttaggtgtgggaaaacttgatctgaaagaggtagttgttactcattttgaatataccttttccttattgtattctgtaatataggatccttgaaatgagacctggtggaatattattttcaactgtagtctttctatactgtggactaatgaaatggtgttgttgataatctaaaataaccaataatccaaaaaagttcattttactttgaatttgtattttcatttgaatatctatctgatatgttaaatttttagcccttctgttaaagaaaaatagcagtccccatttatctgcctgtgtaccactcagtttagtaacctctaggcagc

SEQ ID NO: 315587 - DNA, 2214 bp, Homo sapiens
agtgtcgtaaacgtcggatatccggttcttctgggcgctaagggagctgacggagagggccaccgcccagcaatagacgtgctggagaatctggtaaaagcaccattgtgaaacagatgaaaatcattcatgaggatggctattcagaggatgaatgtaaacaatataaagtagttgtctacagcaatactatacagtccatcattgcaatcataagagccatgggacggctaaagattgactttggggaagctgccagggcagatgatgcccggcaattatttgttttagctggcagtgctgaagaaggagtcatgactccagaactagcaggagtgattaaacggttatggcgagatggtggggtacaagcttgcttcagcagatccagggaatatcagctcaatgattctgcttcatattatctaaatgatctggatagaatatcccagtctaactacattccaactcagcaagatgttcttcggacgagagtgaagaccacaggcattgtagaaacacatttcaccttcaaagacctatacttcaagatgtttgatgtaggtggccaaagatcagaacgaaaaaagtggattcactgttttgagggagtgacagcaattatcttctgtgtggccctcagtgattatgaccttgttctggctgaggacgaggagatgaaccgaatgcatgaaagcatgaaactgtttgacagcatttgtaataacaaatggtttacagaaacttcaatcattctcttccttaacaagaaagacctttttgaggaaaaaataaagaggagtccgttaactatctgttatccagaatacacaggttccaatacatatgaagaggcagctgcctatattcaatgccagtttgaagatctgaacagaagaaaagataccaaggagatctatactcacttcacctgtgccacagacacgaagaatgtgcagtttgtttttgatgctgttacagatgtcatcattaaaaacaacttaaaggaatgtggactttattgagaagcatggatgttagtgaaagttactacagtgtggagtgttgagaccagacaccttttgctgtctcatggggcagctacaagcatgaacgggaccagggaatggcagcagcatgcagaatcttagcactctttagcacaatattttgtattagggaacttttaattgacatgagatgctaaagtcagacattggaattggaagaactataaagtgtgattcgatcgtcaagacatcacttggatttcttaatcttaaatgcttatggaagatgtgaagttgaggtgctgcattctagaacttcaatatgtagcttactctttttttccccccttcttaaaccaccagtggttcatttttaaggttttttcatcaagagaagaataactttactaaattttatttctttatttgcaaaagaatctttattaaaacaaacaatcttaactatgcacatgatgtgaccagatcatcttgaaaatattcctctttagtaggaactctttgtttttaactcttggtatggtcagaatataatacttccataattacttataattctttccggttactggggctataaatacaactttttaaatgaaatttatgttattatcctgctcaaagtaccattatggtttccatatggtaattacattggaaagttctgcaataagattctagttctctcttttctttaagcttatggttgaaggttaaccttgtttgtgcagattaccaaattactgctgatgtagtatgataaagtcagcttcttggatacagacacacccagggcagctgccaatcagaaatgcaaattgctaaattccaaacagaaccagtgactttgctgctacatatttactaaattgaccactttgattcttgcttgtttgtctcagttatagggagttttgtacatggtgcctcttgttttccatcttcatggccttttctgttgagaaacatctaaagtgtattaacagtgcatgcttttactttgtaaatgtggtgccaaatccctgtttgccatcgtttttactgtaccgatgttaactgtagtaatccttagccagtatgttcttttgctgaaactgttgcattttgggacttttttccactttgtcatgtgtacatttttaatctgttatagttggcggcagtattaaaatggtgagtaaagagc

SEQ ID NO: 315588 - DNA, 1222 bp, Homo sapiens
gtgatgtctcttggtttttaaactttttctaattaagaatattcttctcttctagttactacagtgtggagtgttgagaccagacaccttttgctgtctcatggggcagctacaagcatgaacgggaccagggaatggcagcagcatgcagaatcttagcactctttagcacaatattttgtattagggaacttttaattgacatgagatgctaaagtcagacattggaattggaagaactataaagtgtgattcgatcgtcaagacatcacttggatttcttaatcttaaatgcttatggaagatgtgaagttgaggtgctgcattctagaacttcaatatgtagcttactctttttttccccccttcttaaaccaccagtggttcatttttaaggttttttcatcaagagaagaataactttactaaattttatttctttatttgcaaaagaatctttattaaaacaaacaatcttaactatgcacatgatgtgaccagatcatcttgaaaatattcctctttagtaggaactctttgtttttaactcttggtatggtcagaatataatacttccataattacttataattctttccggttactggggctataaatacaactttttaaatgaaatttatgttattatcctgctcaaagtaccattatggtttccatatggtaattacattggaaagttctgcaataagattctagttctctcttttctttaagcttatggttgaaggttaaccttgtttgtgcagattaccaaattactgctgatgtagtatgataaagtcagcttcttggatacagacacacccagggcagctgccaatcagaaatgcaaattgctaaattccaaacagaaccagtgactttgctgctacatatttactaaattgaccactttgattcttgcttgtttgtctcagttatagggagttttgtacatggtgcctcttgttttccatcttcatggccttttctgttgagaaacatctaaagtgtattaacagtgcatgcttttactttgtaaatgtggtgccaaatccctgtttgccatcgtttttactgtaccgatgttaactgtagtaatccttagccagtatgttcttttgctgaaactgttgcattttgggacttttttccactttgtcatgtgtacatttttaatctgttatagttggcggcagtattaaaatggtgagtaaagagc

SEQ ID NO: 315589 - DNA, 1838 bp, Homo sapiens
agtgtcgtaaacgtcggatatccggttcttctgggcgctaagggagctgacggagagggccaccgcccagcaatagacggtgcctcagcctgccgagccgcagtttccgtggtgtgagtgagtccgggcccgtgtcccctctcccgccgccgccatgggctgcacgttgagcgccgaagacaaggcggcagtggagcgaagcaagatgatcgaccgcaacttacgggaggacggggaaaaagcggccaaagaagtgaagctgctgctactcggtgctggagaatctggtaaaagcaccattgtgaaacagatgaaaatcattcatgaggatggctattcagaggatgaatgtaaacaatataaagtagttgtctacagcaatactatacagtccatcattgcaatcataagagccatgggacggctaaagattgactttggggaagctgccagggcagatgatgcccggcaattatttgttttagctggcagtgctgaagaaggagtcatgactccagaactagcaggagtgattaaacggttatggcgagatggtggggtacaagcttgcttcagcagatccagggaatatcagctcaatgattctgcttcatattatctaaatgatctggatagaatatcccagtctaactacattccaactcagcaagatgttcttcggacgagagtgaagaccacaggcattgtagaaacacatttcaccttcaaagacctatacttcaagatgtttgatgtaggtggccaaagatcagaacgaaaaaagtggattcactgttttgagggagtgacagcaattatcttctgtgtggccctcagtgattatgaccttgttctggctgaggacgaggagatgaaccgaatgcatgaaagcatgaaactgtttgacagcatttgtaataacaaatggtttacagaaacttcaatcattctcttccttaacaagaaagacctttttgaggaaaaaataaagaggagtccgttaactatctgttatccagaatacacaggttccaatacatatgaagaggcagctgcctatattcaatgccagtttgaagatctgaacagaagaaaagataccaaggagatctatactcacttcacctgtgccacagacacgaagaatgtgcagtttgtttttgatgctgttacagatgtcatcattaaaaacaacttaaaggaatgtggactttattgagaagcatggatgttagtgaaagttactacagtgtggagtgttgagaccagacaccttttgctgtctcatggggcagctacaagcatgaacgggaccagggaatggcagcagcatgcagaatcttagcactctttagcacaatattttgtattagggaacttttaattgacatgagatgctaaagtcagacattggaattggaagaactataaagtgtgattcgatcgtcaagacatcacttggatttcttaatcttaaatgcttatggaagatgtgaagttgaggtgtacatatttactaaattgaccactttgattcttgcttgtttgtctcagttatagggagttttgtacatggtgcctcttgttttccatcttcatggccttttctgttgagaaacatctaaagtgtattaacagtgcatgcttttactttgtaaatgtggtgccaaatccctgtttgccatcgtttttactgtaccgatgttaactgtagtaatccttagccagtatgttcttttgctgaaactgttgcattttgggacttttttccactttgtcatgtgtacatttttaatctgttatagttggcggcagtattaaaatggtgagtaaagagc

SEQ ID NO: 315590 - DNA, 1225 bp, Homo sapiens
gcatttacaaagtaaaagcatgcactgttaatacactttagatgtttctcaacagtgcatgcttttactttgtaaatgtggtgccaaatccctgtttgccatcgtttttactgtaccgatgttaactgtagtaatccttagccagtatgttcttttgctgaaactgttgcattttgggacttttttccactttgtcatgtgtacatttttaatctgttatagttggcggcagtattaaaatggtgagtaaagagcccaggtttgctcctgtttgtaactagtcttttctggaaatactgtcttctgtttccttttgcctttgcagaatgtgctttagcctttgtctgagaatgggtttaggtagaagggtttcctgaaagtctagtcttttggtgtaatagtattgttgaaccttaggttttatgttatatctgcatatgagtgatatgtgatcatgattcattttgcagatttacattttgcttgtgtggaaagttacgttcacttcaacctacagacccttttgtataatgtacagcaaatgtcattaaatattgaatgctctattgggggaagacaaatgaagagaatgcattttgagcatttcaaatcagtagtttgggcagtgccttttggggtccaatctttttggattggattctatttcatcttttgatgtgacttttcactagtttacaaaaaaaaggttggtggtcaacaaaaaaagcaagtcatagcagttcagtgcctttgttggtagtttttaactttttttgtgattctttttggaaaatcatagcttacagatggtataactgtattatataatggaattttctttaggtgtgggaaaacttgatctgaaagaaaattatcagcttcaattggcgattgattcagtgcccacaatgtaaacagggttggtagttgttactcattttgaatataccttttccttattgtattctgtaatataggatccttgaaatgagacctggtggaatattattttcaactgtagtctttctatactgtggactaatgaaatggtgttgttgataatctaaaataaccaataatccaaaaaagttcattttactttgaatttgtattttcatttgaatatctatctgatatgttaaatttttagcccttctgttaaagaaaaatagcagtccccatttatctgcctgtgtaccactcagtttagtaacctctaggcagc

SEQ ID NO: 315591 - DNA, 583 bp, Homo sapiens
attttgttaccatgagagtccactctcacgaagaacctaattatagaaacacctaatgattatagaaatagagaattctactcatatttaattgggttatgttccctctccataagtaaatggtaatggtctgacttagttgagttcaggcagctgttacaatttgaactgagagtactgggtgtccgttttaggttccaatacatatgaagaggcagctgcctatattcaatgccagtttgaagatctgaacagaagaaaagataccaaggagatctatactcacttcacctgtgccacagacacgaagaatgtgcagtttgtttttgatgctgttacagatgtcatcattaaaaacaacttaaaggaatgtggactttattgagaagcatggatgttagtgaaaggtaaagtttcatacaaggtagttatagtgctacagtgatgtctcttggtttttaaactttttctaattaagaatattcttctcttctagttactacagtgtggagtgttgagaccagacaccttttgctgtctcatggggcagctacaagcatgaacgggaccagggaatggcagc

SEQ ID NO: 315592 - DNA, 333 bp, Homo sapiens
atgatactgaagatctgattctgttttgccacttaataactagtaacaggtttaaaataggaactaatttagtctgttcatttgctatgcacatggttggcttcaccaagtaaaagtaaacgtgtcttttatttagttatctaaatgatctggatagaatatcccagtctaactacattccaactcagcaagatgttcttcggacgagagtgaagaccacaggcattgtagaaacacatttcaccttcaaagacctatacttcaagtaagtcattagcctttttgctaggtgtgccaaatacaagtatctttcattttagtttaccatctctt

SEQ ID NO: 315593 - DNA, 288 bp, Homo sapiens
tactcattttgaatataccttttccttattgtattctgtaatataggatccttgaaatgagacctggtggaatattattttcaactgtagtctttctatactgtggactaatgaaatggtgttgttgataatctaaaataaccaataatccaaaaaagttcattttactttgaatttgtattttcatttgaatatctatctgatatgttaaatttttagcccttctgttaaagaaaaatagcagtccccatttatctgcctgtgtaccatttacatttgctctctgtt

SEQ ID NO: 315594 - DNA, 3378 bp, Homo sapiens
agtgtcgtaaacgtcggatatccggttcttctgggcgctaagggagctgacggagagggccaccgcccagcaatagacggtgcctcagcctgccgagccgcagtttccgtggtgtgagtgagtccgggcccgtgtcccctctcccgccgccgccatgggctgcacgttgagcgccgaagacaaggcggcagtggagcgaagcaagatgatcgaccgcaacttacgggaggacggggaaaaagcggccaaagaagtgaagctgctgctactcggtgctggagaatctggtaaaagcaccattgtgaaacagatgaaaatcattcatgaggatggctattcagaggatgaatgtaaacaatataaagtagttgtctacagcaatactatacagtccatcattgcaatcataagagccatgggacggctaaagattgactttggggaagctgccagggcagatgatgcccggcaattatttgttttagctggcagtgctgaagaaggagtcatgactccagaactagcaggagtgattaaacggttatggcgagatggtggggtacaagcttgcttcagcagatccagggaatatcagctcaatgattctgcttcatattatctaaatgatctggatagaatatcccagtctaactacattccaactcagcaagatgttcttcggacgagagtgaagaccacaggcattgtagaaacacatttcaccttcaaagacctatacttcaagatgtttgatgtaggtggccaaagatcagaacgaaaaaagtggattcactgttttgagggagtgacagcaattatcttctgtgtggccctcagtgattatgaccttgttctggctgaggacgaggagatgaaccgaatgcatgaaagcatgaaactgtttgacagcatttgtaataacaaatggtttacagaaacttcaatcattctcttccttaacaagaaagacctttttgaggaaaaaataaagaggagtccgttaactatctgttatccagaatacacaggttccaatacatatgaagaggcagctgcctatattcaatgccagtttgaagatctgaacagaagaaaagataccaaggagatctatactcacttcacctgtgccacagacacgaagaatgtgcagtttgtttttgatgctgttacagatgtcatcattaaaaacaacttaaaggaatgtggactttattgagaagcatggatgttagtgaaagttactacagtgtggagtgttgagaccagacaccttttgctgtctcatggggcagctacaagcatgaacgggaccagggaatggcagcagcatgcagaatcttagcactctttagcacaatattttgtattagggaacttttaattgacatgagatgctaaagtcagacattggaattggaagaactataaagtgtgattcgatcgtcaagacatcacttggatttcttaatcttaaatgcttatggaagatgtgaagttgaggtgctgcattctagaacttcaatatgtagcttactctttttttccccccttcttaaaccaccagtggttcatttttaaggttttttcatcaagagaagaataactttactaaattttatttctttatttgcaaaagaatctttattaaaacaaacaatcttaactatgcacatgatgtgaccagatcatcttgaaaatattcctctttagtaggaactctttgtttttaactcttggtatggtcagaatataatacttccataattacttataattctttccggttactggggctataaatacaactttttaaatgaaatttatgttattatcctgctcaaagtaccattatggtttccatatggtaattacattggaaagttctgcaataagattctagttctctcttttctttaagcttatggttgaaggttaaccttgtttgtgcagattaccaaattactgctgatgtagtatgataaagtcagcttcttggatacagacacacccagggcagctgccaatcagaaatgcaaattgctaaattccaaacagaaccagtgactttgctgctacatatttactaaattgaccactttgattcttgcttgtttgtctcagttatagggagttttgtacatggtgcctcttgttttccatcttcatggccttttctgttgagaaacatctaaagtgtattaacagtgcatgcttttactttgtaaatgtggtgccaaatccctgtttgccatcgtttttactgtaccgatgttaactgtagtaatccttagccagtatgttcttttgctgaaactgttgcattttgggacttttttccactttgtcatgtgtacatttttaatctgttatagttggcggcagtattaaaatggtgagtaaagagcccaggtttgctcctgtttgtaactagtcttttctggaaatactgtcttctgtttccttttgcctttgcagaatgtgctttagcctttgtctgagaatgggtttaggtagaagggtttcctgaaagtctagtcttttggtgtaatagtattgttgaaccttaggttttatgttatatctgcatatgagtgatatgtgatcatgattcattttgcagatttacattttgcttgtgtggaaagttacgttcacttcaacctacagacccttttgtataatgtacagcaaatgtcattaaatattgaatgctctattgggggaagacaaatgaagagaatgcattttgagcatttcaaatcagtagtttgggcagtgccttttggggtccaatctttttggattggattctatttcatcttttgatgtgacttttcactagtttacaaaaaaaaggttggtggtcaacaaaaaaagcaagtcatagcagttcagtgcctttgttggtagtttttaactttttttgtgattctttttggaaaatcatagcttacagatggtataactgtattatataatggaattttctttaggtgtgggaaaacttgatctgaaagaaaattatcagcttcaattggcgattgattcagtgcccacaatgtaaacagggttggtagttgttactcattttgaatataccttttccttattgtattctgtaatataggatccttgaaatgagacctggtggaatattattttcaactgtagtctttctatactgtggactaatgaaatggtgttgttgataatctaaaataaccaataatccaaaaaagttcattttactttgaatttgtattttcatttgaatatctatctgatatgttaaatttttagcccttctgttaaagaaaaatagcagtccccatttatctgcctgtgtaccactcagtttagtaacctctaggcagc

SEQ ID NO: 315595 - DNA, 3331 bp, Homo sapiens
ggcgacagaaaaaaaaatgctaggtcgggcgggtgcctcagcctgccgagccgcagtttccgtggtgtgagtgagtccgggcccgtgtcccctctcccgccgccgccatgggctgcacgttgagcgccgaagacaaggcggcagtggagcgaagcaagatgatcgaccgcaacttacgggaggacggggaaaaagcggccaaagaagtgaagctgctgctactcggtgctggagaatctggtaaaagcaccattgtgaaacagatgaaaatcattcatgaggatggctattcagaggatgaatgtaaacaatataaagtagttgtctacagcaatactatacagtccatcattgcaatcataagagccatgggacggctaaagattgactttggggaagctgccagggcagatgatgcccggcaattatttgttttagctggcagtgctgaagaaggagtcatgactccagaactagcaggagtgattaaacggttatggcgagatggtggggtacaagcttgcttcagcagatccagggaatatcagctcaatgattctgcttcatattatctaaatgatctggatagaatatcccagtctaactacattccaactcagcaagatgttcttcggacgagagtgaagaccacaggcattgtagaaacacatttcaccttcaaagacctatacttcaagatgtttgatgtaggtggccaaagatcagaacgaaaaaagtggattcactgttttgagggagtgacagcaattatcttctgtgtggccctcagtgattatgaccttgttctggctgaggacgaggagatgaaccgaatgcatgaaagcatgaaactgtttgacagcatttgtaataacaaatggtttacagaaacttcaatcattctcttccttaacaagaaagacctttttgaggaaaaaataaagaggagtccgttaactatctgttatccagaatacacaggttccaatacatatgaagaggcagctgcctatattcaatgccagtttgaagatctgaacagaagaaaagataccaaggagatctatactcacttcacctgtgccacagacacgaagaatgtgcagtttgtttttgatgctgttacagatgtcatcattaaaaacaacttaaaggaatgtggactttattgagaagcatggatgttagtgaaagttactacagtgtggagtgttgagaccagacaccttttgctgtctcatggggcagctacaagcatgaacgggaccagggaatggcagcagcatgcagaatcttagcactctttagcacaatattttgtattagggaacttttaattgacatgagatgctaaagtcagacattggaattggaagaactataaagtgtgattcgatcgtcaagacatcacttggatttcttaatcttaaatgcttatggaagatgtgaagttgaggtgctgcattctagaacttcaatatgtagcttactctttttttccccccttcttaaaccaccagtggttcatttttaaggttttttcatcaagagaagaataactttactaaattttatttctttatttgcaaaagaatctttattaaaacaaacaatcttaactatgcacatgatgtgaccagatcatcttgaaaatattcctctttagtaggaactctttgtttttaactcttggtatggtcagaatataatacttccataattacttataattctttccggttactggggctataaatacaactttttaaatgaaatttatgttattatcctgctcaaagtaccattatggtttccatatggtaattacattggaaagttctgcaataagattctagttctctcttttctttaagcttatggttgaaggttaaccttgtttgtgcagattaccaaattactgctgatgtagtatgataaagtcagcttcttggatacagacacacccagggcagctgccaatcagaaatgcaaattgctaaattccaaacagaaccagtgactttgctgctacatatttactaaattgaccactttgattcttgcttgtttgtctcagttatagggagttttgtacatggtgcctcttgttttccatcttcatggccttttctgttgagaaacatctaaagtgtattaacagtgcatgcttttactttgtaaatgtggtgccaaatccctgtttgccatcgtttttactgtaccgatgttaactgtagtaatccttagccagtatgttcttttgctgaaactgttgcattttgggacttttttccactttgtcatgtgtacatttttaatctgttatagttggcggcagtattaaaatggtgagtaaagagcccaggtttgctcctgtttgtaactagtcttttctggaaatactgtcttctgtttccttttgcctttgcagaatgtgctttagcctttgtctgagaatgggtttaggtagaagggtttcctgaaagtctagtcttttggtgtaatagtattgttgaaccttaggttttatgttatatctgcatatgagtgatatgtgatcatgattcattttgcagatttacattttgcttgtgtggaaagttacgttcacttcaacctacagacccttttgtataatgtacagcaaatgtcattaaatattgaatgctctattgggggaagacaaatgaagagaatgcattttgagcatttcaaatcagtagtttgggcagtgccttttggggtccaatctttttggattggattctatttcatcttttgatgtgacttttcactagtttacaaaaaaaaggttggtggtcaacaaaaaaagcaagtcatagcagttcagtgcctttgttggtagtttttaactttttttgtgattctttttggaaaatcatagcttacagatggtataactgtattatataatggaattttctttaggtgtgggaaaacttgatctgaaagaaaattatcagcttcaattggcgattgattcagtgcccacaatgtaaacagggttggtagttgttactcattttgaatataccttttccttattgtattctgtaatataggatccttgaaatgagacctggtggaatattattttcaactgtagtctttctatactgtggactaatgaaatggtgttgttgataatctaaaataaccaataatccaaaaaagttcattttactttgaatttgtattttcatttgaatatctatctgatatgttaaatttttagcccttctgttaaagaaaaatagcagtccccatttatctgcctgtgtaccactcagtttagtaacctctaggcagc

SEQ ID NO: 315596 - DNA, 2821 bp, Homo sapiens
agtgtcgtaaacgtcggatatccggttcttctgggcgctaagggagctgacggagagggccaccgcccagcaatagacggtgcctcagcctgccgagccgcagtttccgtggtgtgagtgagtccgggcccgtgtcccctctcccgccgccgccatgggctgcacgttgagcgccgaagacaaggcggcagtggagcgaagcaagatgatcgaccgcaacttacgggaggacggggaaaaagcggccaaagaagtgaagctgctgctactcggtgctggagaatctggtaaaagcaccattgtgaaacagatgaaaatcattcatgaggatggctattcagaggatgaatgtaaacaatataaagtagttgtctacagcaatactatacagtccatcattgcaatcataagagccatgggacggctaaagattgactttggggaagctgccagggcagatgatgcccggcaattatttgttttagctggcagtgctgaagaaggagtcatgactccagaactagcaggagtgattaaacggttatggcgagatggtggggtacaagcttgcttcagcagatccagggaatatcagctcaatgattctgcttcatattatctaaatgatctggatagaatatcccagtctaactacattccaactcagcaagatgttcttcggacgagagtgaagaccacaggcattgtagaaacacatttcaccttcaaagacctatacttcaagatgtttgatgtaggtggccaaagatcagaacgaaaaaagtggattcactgttttgagggagtgacagcaattatcttctgtgtggccctcagtgattatgaccttgttctggctgaggacgaggagatgaaccgaatgcatgaaagcatgaaactgtttgacagcatttgtaataacaaatggtttacagaaacttcaatcattctcttccttaacaagaaagacctttttgaggaaaaaataaagaggagtccgttaactatctgttatccagaatacacaggttccaatacatatgaagaggcagctgcctatattcaatgccagtttgaagatctgaacagaagaaaagataccaaggagatctatactcacttcacctgtgccacagacacgaagaatgtgcagtttgtttttgatgctgttacagatgtcatcattaaaaacaacttaaaggaatgtggactttattgagaagcatggatgttagtgaaagttactacagtgtggagtgttgagaccagacaccttttgctgtctcatggggcagctacaagcatgaacgggaccagggaatggcagcagcatgcagaatcttagcactctttagcacaatattttgtattagggaacttttaattgacatgagatgctaaagtcagacattggaattggaagaactataaagtgtgattcgatcgtcaagacatcacttggatttcttaatcttaaatgcttatggaagatgtgaagttgaggtgctgcattctagaacttcaatatgtagcttactctttttttccccccttcttaaaccaccagtggttcatttttaaggttttttcatcaagagaagaataactttactaaattttatttctttatttgcaaaagaatctttattaaaacaaacaatcttaactatgcacatgatgtgaccagatcatcttgaaaatattcctctttagtaggaactctttgtttttaactcttggtatggtcagaatataatacttccataattacttataattctttccggttactggggctataaatacaactttttaaatgaaatttatgttattatcctgctcaaagtaccattatggtttccatatggtaattacattggaaagttctgcaataagattctagttctctcttttctttaagcttatggttgaaggttaaccttgtttgtgcagattaccaaattactgctgatgtagtatgataaagtcagcttcttggatacagacacacccagggcagctgccaatcagaaatgcaaattgctaaattccaaacagaaccagtgactttgctgctacatatttactaaattgaccactttgattcttgcttgtttgtctcagttatagggagttttgtacatggtgcctcttgttttccatcttcatggccttttctgttgagaaacatctaaagtgtattaacagtgcatgcttttactttgtaaatgtggtgccaaatccctgtttgccatcgtttttactgtaccgatgttaactgtagtaatccttagccagtatgttcttttgctgaaactgttgcattttgggacttttttccactttgtcatgtgtacatttttaatctgttatagttggcggcagtattaaaatggtgagtaaagagcaaaaaaaaaaaaaaaaaaaaaaaaaaaaaaaaaaggggggggggtttaaaagtttttccctgggggggccccaggttttggcttttccccggttttttttttaaagggggccccttatagggggggggtttttaaaggaaggagggggcggggttttaacaggtgggggggggaacacccgggctttcgggggctccttgggggaggggacccttccttcgtgggcggggcgccttctatgcgggacaccttcccttaccggaggtttaagcggctctatgggtcccttcttatcttttccacgtttgtttggtggtggtacccctcgcggtattatgctgccggcttgaagtatttcggcttcacggggttctgtttttggacatttttttcccggcgtgttgtctaaatcg

SEQ ID NO: 315597 - DNA, 1633 bp, Homo sapiens
  misc_feature (49)..(49): n is a, c, g, or t
aggcttatataaagagtgttgatgtaggtgccaaaggtagagttggagntgacagcaattatcttctgtgtgctcagtattcggtaggacgaggagatgaaccgaatgcatgaaagcatgaaactgtttgacagcatttgtaataacaaatggtttacagaaacttcaatcattctcttccttaacaagaaagacctttttgaggaaaaaataaagaggagtccgttaactatctgttatccagaatacacaggttccaatacatatgaagaggcagctgcctatattcaatgccagtttgaagatctgaacagaagaaaagataccaaggagatctatactcacttcacctgtgccacagacacgaagaatgtgcagtttgtttttgatgctgttacagatgtcatcattaaaaacaacttaaaggaatgtggactttattgagaagcatggatgttagtgaaagttactacagtgtggagtgttgagaccagacaccttttgctgtctcatggggcagctacaagcatgaacgggaccagggaatggcagcagcatgcagaatcttagcactctttagcacaatattttgtattagggaacttttaattgacatgagatgctaaagtcagacattggaattggaagaactataaagtgtgattcgatcgtcaagacatcacttggatttcttaatcttaaatgcttatggaagatgtgaagttgaggtgctgcattctagaacttcaatatgtagcttactctttttttccccccttcttaaaccaccagtggttcatttttaaggttttttcatcaagagaagaataactttactaaattttatttctttatttgcaaaagaatctttattaaaacaaacaatcttaactatgcacatgatgtgaccagatcatcttgaaaatattcctctttagtaggaactctttgtttttaactcttggtatggtcagaatataatacttccataattacttataattctttccggttactggggctataaatacaactttttaaatgaaatttatgttattatcctgctcaaagtaccattatggtttccatatggtaattacattggaaagttctgcaataagattctagttctctcttttctttaagcttatggttgaaggttaaccttgtttgtgcagattaccaaattactgctgatgtagtatgataaagtcagcttcttggatacagacacacccagggcagctgccaatcagaaatgcaaattgctaaattccaaacagaaccagtgactttgctgctacatatttactaaattgaccactttgattcttgcttgtttgtctcagttatagggagttttgtacatggtgcctcttgttttccatcttcatggccttttctgttgagaaacatctaaagtgtattaacagtgcatgcttttactttgtaaatgtggtgccaaatccctgtttgccatcgtttttactgtaccgatgttaactgtagtaatccttagccagtatgttcttttgctgaaactgttgcattttgggacttttttccactttgtcatgtgtacatttttaatctgttatagttggcggcagtattaaaatggtgagtaaagagc

SEQ ID NO: 315598 - DNA, 899 bp, Homo sapiens
agtgtcgtaaacgtcggatatccggttcttctgggcgctaagggagctgacggagagggccaccgcccagcaatagacggtgcctcagcctgccgagccgcagtttccgtggtgtgagtgagtccgggcccgtgtcccctctcccgccgccgccatgggctgcacgttgagcgccgaagacaaggcggcagtggagcgaagcaagatgatcgaccgcaacttacgggaggacggggaaaaagcggccaaagaagtgaagctgctgctactcggtgctggagaatctggtaaaagcaccattgtgaaacagatgaaaatcattcatgaggatggctattcagaggatgaatgtaaacaatataaagtagttgtctacagcaatactatacagtccatcattgcaatcataagagccatgggacggctaaagattgactttggggaagctgccagggcagatgatgcccggcaattatttgttttagctggcagtgctgaagaaggagtcatgactccagaactagcaggagtgattaaacggttatggcgagatggtggggtacaagcttgcttcagcagatccagggaatatcagctcaatgattctgcttcatattatctaaatgatctggatagaatatcccagtctaactacattccaactcagcaagatgttcttcggacgagagtgaagaccacaggcattgtagaaacacatttcaccttcaaagacctatacttcaagatgtttgatgtaggtggccaaagatcagaacgaaaaaagtggattcactgttttgagggtttcgatgatcatcgaaaccctaagtatgaggatgagatcaataagcgtacagagatggagaacgaatttgtcctcatcaagaagggtttgatga

SEQ ID NO: 315599 - DNA, 1003 bp, Homo sapiens
gtgctcaaaaagggccggtgtgccgcagtgagtgccagtttgaatgaaggaagcatgcgtggcctgaagcctcaccgtgttccaggcgtccagttaagtgctctgcacataatatcacacattgcgctccacgataagaacaaattctcacatgggaaccgagcaaagtgtaatggatgttcccaggagctgcctatgggattcaagaaaactgtatgagaggagtaacatttgggctggaagcgaaaatacaagtaaacatatgtcaaatggggtctggaaagcaatcctccacagaaagaaagcagaatcttctgggcatttctgagcaagtggacttccttcagctgagcacagtcctcaggagaagcggacaggtgcaaagtgttggaagccaacactcacagcagttgggggttggagtgctctggcttccaacagcattgaaaccaacagcattgactacagcgagtttctcaatcttcagaacacatcccagcctccctgggggctgctaatgcacagattgccgtttcccactccaagagtttctgattccagaggtctggggtagggctcgataatttgttcttctaaccacctaatgctgttggtccagtgaccacactttgagaaatgctgtactatgttttctcatatatttaaaaattctcacctcatttatggtttaaaacttctagaacaattctgaatagtttttgtaatagtgagcctcactttcctgtctctgcccttaatgggaatgtctctaatgattcacctttcatacggggacttgttgtggtttactgggcaattccttttggcaggttaaaaaaattccctctgtttcaagctaaagccatttaccaggaagagacgctaagttttatcagagggtttttccagtaactattgtgataatcatggttttttttcctatttattacgatatcaaacatgaaacttatttgaagtcctggattaaacggtgcttgttttc

SEQ ID NO: 315600 - DNA, 3754 bp, Homo sapiens
cagtaattaggtagctccctgattgtttctaattctgctattaattgtgaggagcggggagtgtgattgaggataaatttggtgcggagctgctggggcttcagctccccgtgagttccctgggctgccttccacccctccaggctgcagaggcagcttcctccctttgcctccatcctgctctgcctaagtttcctattctctttccacattttcctcctccaaggctggggagctttgggactgggaagcccaggcagacctcgcctagagagaggtgtccgtctggctctcctgagtgtggcccagctacagttggcaggactggtcctctcctcctcccagtgccctgcgcccctcccctcctctgcctcccttcttcccacacttctccaactctcccctcaccagccagtggcccagctgaggtactcagttccagccccaagctggatcctcccccatctccccactccaaccggaagaagcaccggaggaaaaagagcaccgggaccccccgaccagacggccccagcagtgctactgaaggttagggggacccagagggaaaccgggcacaggaggtgggcagtgggacttggggatagtaccctaaaagtaacacctattttttattttttgtattcagtggattaagcactttctagtagttgctaatcaaagtagttctacagcttcttttggtaatctagacctggtatcttagaaaagttcttctgataactgaaaccctttctgttgaaatgtgggcttacttcatttattcttaaggtaaaagacagcagactgctacatcaatagctcctctaagatgttcgggcaggacctgtgttttctgtctcttgtgtcatactgagtttaataaagtgctgggtacttactaggtgcgtaatacatgtgtacagattggctgagtctctcattagttttccttaggctaaggaattccaggtcctgaagccttcttccataggacctttctcttcctctattaattatactgctgctcctcagattttcctcaaagtatcttcaaaacctccctcttcttggtgattggagtttctttgctcccaaataagtttaacttctacagactcataatttctcacttctgctctaatcatcagggtagacgtatgggtcaggggagcagagacacctagccaacctgtgacacagtgatgcttagtacttacagcgtggggtctcccttctggtccggcagactaagccccacaaatgatcatggagatcacgtagttcgaaggctgtggttgaaagcaaggtgaggcgcagtggtggtgcctggggaaggaggcgccggttctatttctgtgggaaggcagttctgctaacagtccctgagagcaagggcccagcagaggaggaattccaggggatgtcggtgtcactgaggtgaggctgcctggggccaagatgcagtgaggacttacaagcagagatggccttggcagaactggggttcaccctggggccttaccacaggcacctgtgctgtctttccagcccccaggacacagtcacactgcttgttaggaattgttcacccatggggcagtgaccattgggaatgagattcatgcggctgtcttctggggcctgggggaccagagcttggaagagcttcaccacattgcttgggttcacagtccagccctcagtgcttgtcagtacagatgccctcaggcccctatttgctcacatactgcaggtcctgtagaaaacctctcctcctctcccccatccacttgcccttcctgcctgtctatgccatggtagtgggggaggggcccagctcccaggagccccacgctgacgccgtcaggaatattgggtttaatgagctgcaaaatgaggcggctgcagctgacatgtacggatggtgcccacacccgccttcccccaccctctcccagtgtttgcctcctagcaccccgtcacatccttctccagatactcagctctttctgtgggatgcacccctctctggtttcacacccattcccggcagtgccaggggtgccaagatcttgcatcccccatctgttttcacttaagctccacaggtggttaggaatgagaactgggagctcacactagtcttgcaggtttactctggcctccccctgcaagctgtcctggagtgtgtggccttgcagctggggaagggtctaggggaggacacttgccagtggagcagggtagtgagtggagttgtggcgatagcatgccctgggtgtgcacgcaggccaggagccctgatggcataaacacccccccaacagaggcagaggagtcgtttgaatttgtggtggtgtccctcactgggcagacgtggcacttcgaggcttcaacggcggaggagcgggagctgtgggttcagagtgtgcaggcccagatccttgccagcctgcaaggctgccgcagtgccaaggacaagactcgactggggaaccagaacgcagctctggctgtgcaggccgtccgcaccgtccgcggcaacagcttttgtatcgactgcgatgcacccaatccagactgggccagcctgaacctgggtgccctgatgtgcattgagtgctcaggcatccaccgacacctgggggctcacctgtcccgggtgcgctcccttgacctcgatgactggccgcctgagctgctggctgtcatgactgccatgggcaatgccctcgccaacagcgtctgggagggggccttgggtggctactccaagccagggcctgatgcctgcagagaggagaaggaacgctggatacgggccaagtatgaacagaagctcttcctggccccactgccaagctcagatgtgccactggggcagcagctgctccgggccgtggtggaagatgacctgcggctgttggtgatgctcctggcacatggctccaaagaggaggtgaatgagacctatggggacggggacgggcggacggctctacatctctccagtgccatggccaacgttgtcttcacgcagctgctcatctggtacggggtggacgtgaggagccgggacgcccggggcctgactccactggcatatgctcgccgggccggcagccaggagtgtgcagacatcttgatccagcatggctgccctggggagggctgtggcttagcgcctacccccaacagagagcctgccaatggcaccaacccctctgctgagctgcaccgtagtcctagcctcctataaggcccaggaagagggcagaggggccagaaggactccatggcccaaagaccctcctccctgcaggcactgtgggaacagacacagagatggagaagcagggacatgctgagaggacgaagccaaggaaattagggaggagagtcaaagggatcaaggagagttggggatttgagctgcagcagagagggatgagggatttagccctctgccctaaggtgccattgaaaagggacaggacccttcggaggtgcctgtgaggagaggggagcaggacctctccctcctccagatccctgcctcctagtgccagcccctcacacgccttcatcctgaaacaggaagaggacggcaccaagttgggggtgctggatgaaagagacgaggggtgatctgtgagtcccatgtaaactttgtacattggaatatttatgtttgtgtacatatttgatgtgtgtgtgtatgatgagccaataaaccagactgtgtgcgtgg

SEQ ID NO: 315601 - DNA, 351 bp, Homo sapiens
  misc_feature (120)..(120): n is a, c, g, or t
ccctggcctcctgaaagcctgtgtatgttatcaatactgtttcctccctgtgagtcccattatttctgaaaattggcagagtcaaaggaagaggaatcgtcctaagctggggctgtgggnaggaggataggacctctccctcctccagatccctgcctcctagtgccagcccctcacacgccttcatcctgaaacaggaagaggacggcaccaagttgggggtgctggatgaaagagacgaggggtgatctgtgagtcccatgtaaactttgtacattggaatatttatgtttgtgtacatatttgatgtgtgtgtgtatgatgagccaataaaccagactgtgtgcgtgg

SEQ ID NO: 315602 - DNA, 523 bp, Homo sapiens
ggtccctgtcccgaggggcaggttgtggaggggcagtggtccaagcacctcttgtacaggttagggttcaagggaggcagccgggtaggccacacgctctagtgagggcagttgcggtgcagaccacctggttgtgccgtgcatgcttcccgagtcctggaggagctgccctactgtttcttctccattctgtgatctctgtctttttctctttctttcccttctctgttccacatccacaccttactctgattgggagtcatagctctgttctctctgccccagctgtcccggaatccctttccctgccatgggcatgctagaaacatgctgcagtgccctgggccacctccggctcccgcctcctggcctcctgcactctaaacatacatacctgaatgtgagagtttgtccggggtgaccctctacctccttccagaccacctgcaggtcaggactccagtctgttcactgccaggccctgcagctgattcccacctaccagcctgtgcctctgacttag

SEQ ID NO: 315603 - DNA, 3138 bp, Homo sapiens
gtctgcggcgggcagttcggcggcgcggggcccggggccgggggcggcggcggcccctcgcagcagctggccggcgggcccccccagcagttcgcgctctccaactccgcggccatccgggccgagatccagcgcttcgagtccgtgcatcccaatatctacgccatctacgacctgatcgagcgcatcgaggatttggcgctgcagaaccagatccgggagcacgtcatctccatcgaggactcgtttgtgaacagccaggagtggacgctgagccgctccgtaccggagcttaaagtgggcatagtggggaacctgtctagcgggaagtcagccctggtgcaccgctatctgacggggacctatgtccaggaggagtcccctgaaggggggcggtttaagaaggagattgtggtggatggccagagttacctgctgctgatccgagatgaaggaggcccccctgagctccagtttgctgcctgggtggatgcagtggtgtttgtgttcagcctggaggatgaaatcagtttccagacggtgtacaactacttcctgcgtctctgcagcttccgcaacgccagcgaggtgcccatggtgcttgtgggcacgcaggatgccatcagcgctgcgaatccccgggttatcgacgacagcagagcccgcaagctctccacagatctgaagcggtgcacctactatgagacgtgcgcgacctacgggctcaatgtggagcgtgtcttccaggacgtggcccagaaggtagtggccttgcgaaagaagcagcaactggccatcgggccctgcaagtcactgcccaactcgcccagccactcggccgtgtccgccgcctccatcccggccgtgcacatcaaccaggccacgaatggcggcggcagcgccttcagcgactactcgtcctcagtcccctccacccccagcatcagccagcgggagctgcgcatcgagaccatcgctgcctcctccacccccacacccatccgaaagcagtccaagcggcgctccaacatcttcacgtctcggaagggtgctgacctggaccgggagaagaaggctgccgagtgcaaggtggacagcatcgggagcggccgcgccatccccatcaagcaggggatcctgctaaagcggagcggcaagtccctgaacaaggagtggaagaagaagtatgtgacgctctgtgacaacgggctgctcacctatcaccccagcctgcatgattacatgcagaacatccacggcaaggagattgacctgctgcggacaacggtgaaagtgccagggaagcgcctgccccgagccacacctgccacagccccgggcaccagcccccgtgccaacgggctgtccgtggagcggagtaacacacagctgggtgggggcacaggtgccccccactcggccagcagcgcatccctgcactctgagcgccccctcagcagctcggcctgggctggcccgcgccctgaggggctgcaccagcgctcctgctccgtttccagcgccgaccagtggagtgaggccaccacttccctgcccccaggcatgcagcaccctgccagtggcccagctgaggtactcagttccagccccaagctggatcctcccccatctccccactccaaccggaagaagcaccggaggaaaaagagcaccgggaccccccgaccagacggccccagcagtgctactgaagaggcagaggagtcgtttgaatttgtggtggtgtccctcactgggcagacgtggcacttcgaggcttcaacggcggaggagcgggagctgtgggttcagagtgtgcaggcccagatccttgccagcctgcaaggctgccgcagtgccaaggacaagactcgactggggaaccagaacgcagctctggctgtgcaggccgtccgcaccgtccgcggcaacagcttttgtatcgactgcgatgcacccaatccagactgggccagcctgaacctgggtgccctgatgtgcattgagtgctcaggcatccaccgacacctgggggctcacctgtcccgggtgcgctcccttgacctcgatgactggccgcctgagctgctggctgtcatgactgccatgggcaatgccctcgccaacagcgtctgggagggggccttgggtggctactccaagccagggcctgatgcctgcagagaggagaaggaacgctggatacgggccaagtatgaacagaagctcttcctggccccactgccaagctcagatgtgccactggggcagcagctgctccgggccgtggtggaagatgacctgcggctgttggtgatgctcctggcacatggctccaaagaggaggtgaatgagacctatggggacggggacgggcggacggctctacatctctccagtgccatggccaacgttgtcttcacgcagctgctcatctggtacggggtggacgtgaggagccgggacgcccggggcctgactccactggcatatgctcgccgggccggcagccaggagtgtgcagacatcttgatccagcatggctgccctggggagggctgtggcttagcgcctacccccaacagagagcctgccaatggcaccaacccctctgctgagctgcaccgtagtcctagcctcctataaggcccaggaagagggcagaggggccagaaggactccatggcccaaagaccctcctccctgcaggcactgtgggaacagacacagagatggagaagcagggacatgctgagaggacgaagccaaggaaattagggaggagagtcaaagggatcaaggagagttggggatttgagctgcagcagagagggatgagggatttagccctctgccctaaggtgccattgaaaagggacaggacccttcggaggtgcctgtgaggagaggggagcaggacctctccctcctccagatccctgcctcctagtgccagcccctcacacgccttcatcctgaaacaggaagaggacggcaccaagttgggggtgctggatgaaagagacgaggggtgatctgtgagtcccatgtaaactttgtacattggaatatttatgtttgtgtacatatttgatgtgtgtgtgtatgatgagccaataaaccagactgtgtgcgtgg

SEQ ID NO: 315604 - DNA, 4417 bp, Homo sapiens
gccatgaacttccaggcgggcggggggcagagcccgcagcagcagcagcagctggccggcgggcccccccagcagttcgcgctctccaactccgcggccatccgggccgagatccagcgcttcgagtccgtgcatcccaatatctacgccatctacgacctgatcgagcgcatcgaggatttggcgctgcagaaccagatccgggagcacgtcatctccatcgaggactcgtttgtgaacagccaggagtggacgctgagccgctccgtaccggagcttaaagtgggcatagtggggaacctgtctagcgggaagtcagccctggtgcaccgctatctgacggggacctatgtccaggaggagtcccctgaaggggggcggtttaagaaggagattgtggtggatggccagagttacctgctgctgatccgagatgaaggaggcccccctgagctccagtttgctgcctgggtggatgcagtggtgtttgtgttcagcctggaggatgaaatcagtttccagacggtgtacaactacttcctgcgtctctgcagcttccgcaacgccagcgaggtgcccatggtgcttgtgggcacgcaggatgccatcagcgctgcgaatccccgggttatcgacgacagcagagcccgcaagctctccacagatctgaagcggtgcacctactatgagacgtgcgcgacctacgggctcaatgtggagcgtgtcttccaggacgtggcccagaaggtagtggccttgcgaaagaagcagcaactggccatcgggccctgcaagtcactgcccaactcgcccagccactcggccgtgtccgccgcctccatcccggccgtgcacatcaaccaggccacgaatggcggcggcagcgccttcagcgactactcgtcctcagtcccctccacccccagcatcagccagcgggagctgcgcatcgagaccatcgctgcctcctccacccccacacccatccgaaagcagtccaagcggcgctccaacatcttcacgctaatgaaccggcggccggaaggctgtttgcccaaggcgacacagagggttagctggcccagctagagtcagagcccaggcctccccgtcgccttccggctctttttccgttaccccactgccgaggggaaaattcatgctttccacccaccgctgtgattggtttaacaaaggcttagccatcttttcctgggcttcaccacgctgcctcgttcctccctctcagatatgtgccactgtttccaacttttcatcaacaaaaaggcctttccaactccttccaaattagaagaccagttggtgacacacagcacctctggacatgccccctgtgcggggccggaggcgggccgggccctgggactgctctcagatgagaagcggccgcgagctccccactccagagacccacgggaacctttgtaactaaccccacccccagggaaggctaggagcgccggagcccgcgctgggggctgccggggaccaggcccggccggacgctgcaggctcgctgcatggagaagaaggcagctcggccccacgcccggcgctggccagcgcgacgaggcccagaggggcgggggagtccaagcccgcccggcccggctgctcctggggggcgctttcctgcccctcccctcctctgctccttcctgcatggacctctgccgttcctgctcctgctccggaagccgccgccgccgccgcgcttgccttgccccctctttttggcctccccctatttcctaggatccgcattcgggtggactctgccccaggagcttgacagggtgcagggcctcttctggcctctctcctctctctgtccatccactgtgccccttgggccacgccgacgcgctcggtgccacgtgccgtgtggtgtctgtgccgcagacgggccatctgcccgctcacttgtggactttgcgctcccggttgtcgcgccctgtgctcccgaccagcagccccaccgtccacctcctcgcccccgcttctcttacgcccccgccccgggcgtgctcctcgcgccctcggcctctctgtccttgctcttttgtaaggggcgggcccggctcagtgacctgtgctgctctgtatggtgccgtgtgtaagaataaacccgttggaatactcgtggtctcagttccttcccgtcccgccgccccggcccgacccactgctagggctgcccaggaggagggaggcaggagggaggccgggaagtccaggtgggcagctctcggcagaccctgggcctctttaacacgcctcttgttttctcttccagtctcggaagggtgctgacctggaccgggagaagaaggctgccgagtgcaaggtggacagcatcgggagcggccgcgccatccccatcaagcaggggatcctgctaaagcggagcggcaagtccctgaacaaggagtggaagaagaagtatgtgacgctctgtgacaacgggctgctcacctatcaccccagcctgcatgattacatgcagaacatccacggcaaggagattgacctgctgcggacaacggtgaaagtgccagggaagcgcctgccccgagccacacctgccacagccccgggcaccagcccccgtgccaacgggctgtccgtggagcggagtaacacacagctgggtgggggcacaggtgccccccactcggccagcagcgcatccctgcactctgagcgccccctcagcagctcggcctgggctggcccgcgccctgaggggctgcaccagcgctcctgctccgtttccagcgccgaccagtggagtgaggccaccacttccctgcccccaggcatgcagcaccctgccagtggcccagctgaggtactcagttccagccccaagctggatcctcccccatctccccactccaaccggaagaagcaccggaggaaaaagagcaccgggaccccccgaccagacggccccagcagtgctactgaagaggcagaggagtcgtttgaatttgtggtggtgtccctcactgggcagacgtggcacttcgaggcttcaacggcggaggagcgggagctgtgggttcagagtgtgcaggcccagatccttgccagcctgcaaggctgccgcagtgccaaggacaagactcgactggggaaccagaacgcagctctggctgtgcaggccgtccgcaccgtccgcggcaacagcttttgtatcgactgcgatgcacccaatccagactgggccagcctgaacctgggtgccctgatgtgcattgagtgctcaggcatccaccgacacctgggggctcacctgtcccgggtgcgctcccttgacctcgatgactggccgcctgagctgctggctgtcatgactgccatgggcaatgccctcgccaacagcgtctgggagggggccttgggtggctactccaagccagggcctgatgcctgcagagaggagaaggaacgctggatacgggccaagtatgaacagaagctcttcctggccccactgccaagctcagatgtgccactggggcagcagctgctccgggccgtggtggaagatgacctgcggctgttggtgatgctcctggcacatggctccaaagaggaggtgaatgagacctatggggacggggacgggcggacggctctacatctctccagtgccatggccaacgttgtcttcacgcagctgctcatctggtacggggtggacgtgaggagccgggacgcccggggcctgactccactggcatatgctcgccgggccggcagccaggagtgtgcagacatcttgatccagcatggctgccctggggagggctgtggcttagcgcctacccccaacagagagcctgccaatggcaccaacccctctgctgagctgcaccgtagtcctagcctcctataaggcccaggaagagggcagaggggccagaaggactccatggcccaaagaccctcctccctgcaggcactgtgggaacagacacagagatggagaagcagggacatgctgagaggacgaagccaaggaaattagggaggagagtcaaagggatcaaggagagttggggatttgagctgcagcagagagggatgagggatttagccctctgccctaaggtgccattgaaaagggacaggacccttcggaggtgcctgtgaggagaggggagcaggacctctccctcctccagatccctgcctcctagtgccagcccctcacacgccttcatcctgaaacaggaagaggacggcaccaagttgggggtgctggatgaaagagacgaggggtgatctgtgagtcccatgtaaactttgtacattggaatatttatgtttgtgtacatatttgatgtgtgtgtgtatgatgagccaataaaccagactgtgtgcgtgg

SEQ ID NO: 315605 - DNA, 4183 bp, Homo sapiens
ggcctctaacctgggcctggtatttgggccacaggggcactaggccaggtgtggcttggtggggggacaataaacctgctggagcaggaagaggaggaaggacacagggccgaaaccagggggactgagcccacagccctcagagtcctgttctgaagaccatccttactctgcttcactcaagaagaaccttcccactgcctcctggggaactagggactcgtttgtgaacagccaggagtggacgctgagccgctccgtaccggagcttaaagtgggcatagtggggaacctgtctagcgggaagtcagccctggtgcaccgctatctgacggggacctatgtccaggaggagtcccctgaaggggggcggtttaagaaggagattgtggtggatggccagagttacctgctgctgatccgagatgaaggaggcccccctgagctccagtttgctgcctgggtggatgcagtggtgtttgtgttcagcctggaggatgaaatcagtttccagacggtgtacaactacttcctgcgtctctgcagcttccgcaacgccagcgaggtgcccatggtgcttgtgggcacgcaggatgccatcagcgctgcgaatccccgggttatcgacgacagcagagcccgcaagctctccacagatctgaagcggtgcacctactatgagacgtgcgcgacctacgggctcaatgtggagcgtgtcttccaggacgtggcccagaaggtagtggccttgcgaaagaagcagcaactggccatcgggccctgcaagtcactgcccaactcgcccagccactcggccgtgtccgccgcctccatcccggccgtgcacatcaaccaggccacgaatggcggcggcagcgccttcagcgactactcgtcctcagtcccctccacccccagcatcagccagcgggagctgcgcatcgagaccatcgctgcctcctccacccccacacccatccgaaagcagtccaagcggcgctccaacatcttcacgatatgtgccactgtttccaacttttcatcaacaaaaaggcctttccaactccttccaaattagaagaccagttggtgacacacagcacctctggacatgccccctgtgcggggccggaggcgggccgggccctgggactgctctcagatgagaagcggccgcgagctccccactccagagacccacgggaacctttgtaactaaccccacccccagggaaggctaggagcgccggagcccgcgctgggggctgccggggaccaggcccggccggacgctgcaggctcgctgcatggagaagaaggcagctcggccccacgcccggcgctggccagcgcgacgaggcccagaggggcgggggagtccaagcccgcccggcccggctgctcctggggggcgctttcctgcccctcccctcctctgctccttcctgcatggacctctgccgttcctgctcctgctccggaagccgccgccgccgccgcgcttgccttgccccctctttttggcctccccctatttcctaggatccgcattcgggtggactctgccccaggagcttgacagggtgcagggcctcttctggcctctctcctctctctgtccatccactgtgccccttgggccacgccgacgcgctcggtgccacgtgccgtgtggtgtctgtgccgcagacgggccatctgcccgctcacttgtggactttgcgctcccggttgtcgcgccctgtgctcccgaccagcagccccaccgtccacctcctcgcccccgcttctcttacgcccccgccccgggcgtgctcctcgcgccctcggcctctctgtccttgctcttttgtaaggggcgggcccggctcagtgacctgtgctgctctgtatggtgccgtgtgtaagaataaacccgttggaatactcgtggtctcagttccttcccgtcccgccgccccggcccgacccactgctagggctgcccaggaggagggaggcaggagggaggccgggaagtccaggtgggcagctctcggcagaccctgggcctctttaacacgcctcttgttttctcttccagtctcggaagggtgctgacctggaccgggagaagaaggctgccgagtgcaaggtggacagcatcgggagcggccgcgccatccccatcaagcaggggatcctgctaaagcggagcggcaagtccctgaacaaggagtggaagaagaagtatgtgacgctctgtgacaacgggctgctcacctatcaccccagcctgcatgattacatgcagaacatccacggcaaggagattgacctgctgcggacaacggtgaaagtgccagggaagcgcctgccccgagccacacctgccacagccccgggcaccagcccccgtgccaacgggctgtccgtggagcggagtaacacacagctgggtgggggcacaggtgccccccactcggccagcagcgcatccctgcactctgagcgccccctcagcagctcggcctgggctggcccgcgccctgaggggctgcaccagcgctcctgctccgtttccagcgccgaccagtggagtgaggccaccacttccctgcccccaggcatgcagcaccctgccagtggcccagctgaggtactcagttccagccccaagctggatcctcccccatctccccactccaaccggaagaagcaccggaggaaaaagagcaccgggaccccccgaccagacggccccagcagtgctactgaagaggcagaggagtcgtttgaatttgtggtggtgtccctcactgggcagacgtggcacttcgaggcttcaacggcggaggagcgggagctgtgggttcagagtgtgcaggcccagatccttgccagcctgcaaggctgccgcagtgccaaggacaagactcgactggggaaccagaacgcagctctggctgtgcaggccgtccgcaccgtccgcggcaacagcttttgtatcgactgcgatgcacccaatccagactgggccagcctgaacctgggtgccctgatgtgcattgagtgctcaggcatccaccgacacctgggggctcacctgtcccgggtgcgctcccttgacctcgatgactggccgcctgagctgctggctgtcatgactgccatgggcaatgccctcgccaacagcgtctgggagggggccttgggtggctactccaagccagggcctgatgcctgcagagaggagaaggaacgctggatacgggccaagtatgaacagaagctcttcctggccccactgccaagctcagatgtgccactggggcagcagctgctccgggccgtggtggaagatgacctgcggctgttggtgatgctcctggcacatggctccaaagaggaggtgaatgagacctatggggacggggacgggcggacggctctacatctctccagtgccatggccaacgttgtcttcacgcagctgctcatctggtacggggtggacgtgaggagccgggacgcccggggcctgactccactggcatatgctcgccgggccggcagccaggagtgtgcagacatcttgatccagcatggctgccctggggagggctgtggcttagcgcctacccccaacagagagcctgccaatggcaccaacccctctgctgagctgcaccgtagtcctagcctcctataaggcccaggaagagggcagaggggccagaaggactccatggcccaaagaccctcctccctgcaggcactgtgggaacagacacagagatggagaagcagggacatgctgagaggacgaagccaaggaaattagggaggagagtcaaagggatcaaggagagttggggatttgagctgcagcagagagggatgagggatttagccctctgccctaaggtgccattgaaaagggacaggacccttcggaggtgcctgtgaggagaggggagcaggacctctccctcctccagatccctgcctcctagtgccagcccctcacacgccttcatcctgaaacaggaagaggacggcaccaagttgggggtgctggatgaaagagacgaggggtgatctgtgagtcccatgtaaactttgtacattggaatatttatgtttgtgtacatatttgatgtgtgtgtgtatgatgagccaataaaccagactgtgtgcgtgg

SEQ ID NO: 315606 - DNA, 3349 bp, Homo sapiens
gccatgaacttccaggcgggcggggggcagagcccgcagcagcagcagcagctggccggcgggcccccccagcagttcgcgctctccaactccgcggccatccgggccgagatccagcgcttcgagtccgtgcatcccaatatctacgccatctacgacctgatcgagcgcatcgaggatttggcgctgcagaaccagatccgggagcacgtcatctccatcgaggactcgtttgtgaacagccaggagtggacgctgagccgctccgtaccggagcttaaagtgggcatagtggggaacctgtctagcgggaagtcagccctggtgcaccgctatctgacggggacctatgtccaggaggagtcccctgaaggggggcggtttaagaaggagattgtggtggatggccagagttacctgctgctgatccgagatgaaggaggcccccctgagctccagtttgctgcctgggtggatgcagtggtgtttgtgttcagcctggaggatgaaatcagtttccagacggtgtacaactacttcctgcgtctctgcagcttccgcaacgccagcgaggtgcccatggtgcttgtgggcacgcaggatgccatcagcgctgcgaatccccgggttatcgacgacagcagagcccgcaagctctccacagatctgaagcggtgcacctactatgagacgtgcgcgacctacgggctcaatgtggagcgtgtcttccaggacgtggcccagaaggtagtggccttgcgaaagaagcagcaactggccatcgggccctgcaagtcactgcccaactcgcccagccactcggccgtgtccgccgcctccatcccggccgtgcacatcaaccaggccacgaatggcggcggcagcgccttcagcgactactcgtcctcagtcccctccacccccagcatcagccagcgggagctgcgcatcgagaccatcgctgcctcctccacccccacacccatccgaaagcagtccaagcggcgctccaacatcttcacgctaatgaaccggcggccggaaggctgtttgcccaaggcgacacagagggttagctggcccagctagagtcagagcccaggcctccccgtcgccttccggctctttttccgttaccccactgccgaggggaaaattcatgctttccacccaccgctgtgattggtttaacaaaggcttagccatcttttcctgggcttcaccacgctgcctcgttcctccctctcagtctcggaagggtgctgacctggaccgggagaagaaggctgccgagtgcaaggtggacagcatcgggagcggccgcgccatccccatcaagcaggggatcctgctaaagcggagcggcaagtccctgaacaaggagtggaagaagaagtatgtgacgctctgtgacaacgggctgctcacctatcaccccagcctgcatgattacatgcagaacatccacggcaaggagattgacctgctgcggacaacggtgaaagtgccagggaagcgcctgccccgagccacacctgccacagccccgggcaccagcccccgtgccaacgggctgtccgtggagcggagtaacacacagctgggtgggggcacaggtgccccccactcggccagcagcgcatccctgcactctgagcgccccctcagcagctcggcctgggctggcccgcgccctgaggggctgcaccagcgctcctgctccgtttccagcgccgaccagtggagtgaggccaccacttccctgcccccaggcatgcagcaccctgccagtggcccagctgaggtactcagttccagccccaagctggatcctcccccatctccccactccaaccggaagaagcaccggaggaaaaagagcaccgggaccccccgaccagacggccccagcagtgctactgaagaggcagaggagtcgtttgaatttgtggtggtgtccctcactgggcagacgtggcacttcgaggcttcaacggcggaggagcgggagctgtgggttcagagtgtgcaggcccagatccttgccagcctgcaaggctgccgcagtgccaaggacaagactcgactggggaaccagaacgcagctctggctgtgcaggccgtccgcaccgtccgcggcaacagcttttgtatcgactgcgatgcacccaatccagactgggccagcctgaacctgggtgccctgatgtgcattgagtgctcaggcatccaccgacacctgggggctcacctgtcccgggtgcgctcccttgacctcgatgactggccgcctgagctgctggctgtcatgactgccatgggcaatgccctcgccaacagcgtctgggagggggccttgggtggctactccaagccagggcctgatgcctgcagagaggagaaggaacgctggatacgggccaagtatgaacagaagctcttcctggccccactgccaagctcagatgtgccactggggcagcagctgctccgggccgtggtggaagatgacctgcggctgttggtgatgctcctggcacatggctccaaagaggaggtgaatgagacctatggggacggggacgggcggacggctctacatctctccagtgccatggccaacgttgtcttcacgcagctgctcatctggtacggggtggacgtgaggagccgggacgcccggggcctgactccactggcatatgctcgccgggccggcagccaggagtgtgcagacatcttgatccagcatggctgccctggggagggctgtggcttagcgcctacccccaacagagagcctgccaatggcaccaacccctctgctgagctgcaccgtagtcctagcctcctataaggcccaggaagagggcagaggggccagaaggactccatggcccaaagaccctcctccctgcaggcactgtgggaacagacacagagatggagaagcagggacatgctgagaggacgaagccaaggaaattagggaggagagtcaaagggatcaaggagagttggggatttgagctgcagcagagagggatgagggatttagccctctgccctaaggtgccattgaaaagggacaggacccttcggaggtgcctgtgaggagaggggagcaggacctctccctcctccagatccctgcctcctagtgccagcccctcacacgccttcatcctgaaacaggaagaggacggcaccaagttgggggtgctggatgaaagagacgaggggtgatctgtgagtcccatgtaaactttgtacattggaatatttatgtttgtgtacatatttgatgtgtgtgtgtatgatgagccaataaaccagactgtgtgcgtgg

SEQ ID NO: 315607 - DNA, 3882 bp, Homo sapiens
gccatgaacttccaggcgggcggggggcagagcccgcagcagcagcagcagctggccggcgggcccccccagcagttcgcgctctccaactccgcggccatccgggccgagatccagcgcttcgagtccgtgcatcccaatatctacgccatctacgacctgatcgagcgcatcgaggatttggcgctgcagaaccagatccgggagcacgtcatctccatcgaggactcgtttgtgaacagccaggagtggacgctgagccgctccgtaccggagcttaaagtgggcatagtggggaacctgtctagcgggaagtcagccctggtgcaccgctatctgacggggacctatgtccaggaggagtcccctgaaggggggcggtttaagaaggagattgtggtggatggccagagttacctgctgctgatccgagatgaaggaggcccccctgagctccagtttgctgcctgggtggatgcagtggtgtttgtgttcagcctggaggatgaaatcagtttccagacggtgtacaactacttcctgcgtctctgcagcttccgcaacgccagcgaggtgcccatggtgcttgtgggcacgcaggatgccatcagcgctgcgaatccccgggttatcgacgacagcagagcccgcaagctctccacagatctgaagcggtgcacctactatgagacgtgcgcgacctacgggctcaatgtggagcgtgtcttccaggacgtggcccagaaggtagtggccttgcgaaagaagcagcaactggccatcgggccctgcaagtcactgcccaactcgcccagccactcggccgtgtccgccgcctccatcccggccgtgcacatcaaccaggccacgaatggcggcggcagcgccttcagcgactactcgtcctcagtcccctccacccccagcatcagccagcgggagctgcgcatcgagaccatcgctgcctcctccacccccacacccatccgaaagcagtccaagcggcgctccaacatcttcacgatatgtgccactgtttccaacttttcatcaacaaaaaggcctttccaactccttccaaattagaagaccagttggtgacacacagcacctctggacatgccccctgtgcggggccggaggcgggccgggccctgggactgctctcagatgagaagcggccgcgagctccccactccagagacccacgggaacctttgtaactaaccccacccccagggaaggctaggagcgccggagcccgcgctgggggctgccggggaccaggcccggccggacgctgcaggctcgctgcatggagaagaaggcagctcggccccacgcccggcgctggccagcgcgacgaggcccagaggggcgggggagtccaagcccgcccggcccggctgctcctggggggcgctttcctgcccctcccctcctctgctccttcctgcatggacctctgccgttcctgctcctgctccggaagccgccgccgccgccgcgcttgccttgccccctctttttggcctccccctatttcctaggatccgcattcgggtggactctgccccaggagcttgacagggtgcagggcctcttctggcctctctcctctctctgtccatccactgtgccccttgggccacgccgacgcgctcggtgccacgtgccgtgtggtgtctgtgccgcagacgggccatctgcccgctcacttgtggactttgcgctcccggttgtcgcgccctgtgctcccgaccagcagccccaccgtccacctcctcgcccccgcttctcttacgcccccgccccgggcgtgctcctcgcgccctcggcctctctgtccttgctcttttgtaaggggcgggcccggctcagtgacctgtgctgctctgtatggtgccgtgtgtaagaataaacccgttggaatactcgtggtctcagttccttcccgtcccgccgccccggcccgacccactgctagggctgcccaggaggagggaggcaggagggaggccgggaagtccaggtgggcagctctcggcagaccctgggcctctttaacacgcctcttgttttctcttccagtctcggaagggtgctgacctggaccgggagaagaaggctgccgagtgcaaggtggacagcatcgggagcggccgcgccatccccatcaagcaggggatcctgctaaagcggagcggcaagtccctgaacaaggagtggaagaagaagtatgtgacgctctgtgacaacgggctgctcacctatcaccccagcctgcatgattacatgcagaacatccacggcaaggagattgacctgctgcggacaacggtgaaagtgccagggaagcgcctgccccgagccacacctgccacagccccgggcaccagcccccgtgccaacgggctgtccgtggagcggagtaacacacagctgggtgggggcacagaggcagaggagtcgtttgaatttgtggtggtgtccctcactgggcagacgtggcacttcgaggcttcaacggcggaggagcgggagctgtgggttcagagtgtgcaggcccagatccttgccagcctgcaaggctgccgcagtgccaaggacaagactcgactggggaaccagaacgcagctctggctgtgcaggccgtccgcaccgtccgcggcaacagcttttgtatcgactgcgatgcacccaatccagactgggccagcctgaacctgggtgccctgatgtgcattgagtgctcaggcatccaccgacacctgggggctcacctgtcccgggtgcgctcccttgacctcgatgactggccgcctgagctgctggctgtcatgactgccatgggcaatgccctcgccaacagcgtctgggagggggccttgggtggctactccaagccagggcctgatgcctgcagagaggagaaggaacgctggatacgggccaagtatgaacagaagctcttcctggccccactgccaagctcagatgtgccactggggcagcagctgctccgggccgtggtggaagatgacctgcggctgttggtgatgctcctggcacatggctccaaagaggaggtgaatgagacctatggggacggggacgggcggacggctctacatctctccagtgccatggccaacgttgtcttcacgcagctgctcatctggtacggggtggacgtgaggagccgggacgcccggggcctgactccactggcatatgctcgccgggccggcagccaggagtgtgcagacatcttgatccagcatggctgccctggggagggctgtggcttagcgcctacccccaacagagagcctgccaatggcaccaacccctctgctgagctgcaccgtagtcctagcctcctataaggcccaggaagagggcagaggggccagaaggactccatggcccaaagaccctcctccctgcaggcactgtgggaacagacacagagatggagaagcagggacatgctgagaggacgaagccaaggaaattagggaggagagtcaaagggatcaaggagagttggggatttgagctgcagcagagagggatgagggatttagccctctgccctaaggtgccattgaaaagggacaggacccttcggaggtgcctgtgaggagaggggagcaggacctctccctcctccagatccctgcctcctagtgccagcccctcacacgccttcatcctgaaacaggaagaggacggcaccaagttgggggtgctggatgaaagagacgaggggtgatctgtgagtcccatgtaaactttgtacattggaatatttatgtttgtgtacatatttgatgtgtgtgtgtatgatgagccaataaaccagactgtgtgcgtgg

SEQ ID NO: 315608 - DNA, 3886 bp, Homo sapiens
gcgccggagcccgcgctgggggctgccggggaccaggcccggccggacgctgcaggctcgctgcatggagaagaaggcagctcggccccacgcccggcgctggccagcggacgaggcccagagggcagggggagtccaagcccgcccggcacaatttgctgcctgggtggatgcagtggtgtttgtgttcagcctggaggatgaaatcagtttccagacggtgtacaactacttcctgcgtctctgcagcttccgcaacgccagcgaggtgcccatggtgcttgtgggcacgcaggatgccatcagcgctgcgaatccccgggttatcgacgacagcagagcccgcaagctctccacagatctgaagcggtgcacctactatgagacgtgcgcgacctacgggctcaatgtggagcgtgtcttccaggacgtggcccagaaggtagtggccttgcgaaagaagcagcaactggccatcgggccctgcaagtcactgcccaactcgcccagccactcggccgtgtccgccgcctccatcccggccgtgcacatcaaccaggccacgaatggcggcggcagcgccttcagcgactactcgtcctcagtcccctccacccccagcatcagccagcgggagctgcgcatcgagaccatcgctgcctcctccacccccacacccatccgaaagcagtccaagcggcgctccaacatcttcacgatatgtgccactgtttccaacttttcatcaacaaaaaggcctttccaactccttccaaattagaagaccagttggtgacacacagcacctctggacatgccccctgtgcggggccggaggcgggccgggccctgggactgctctcagatgagaagcggccgcgagctccccactccagagacccacgggaacctttgtaactaaccccacccccagggaaggctaggagcgccggagcccgcgctgggggctgccggggaccaggcccggccggacgctgcaggctcgctgcatggagaagaaggcagctcggccccacgcccggcgctggccagcgcgacgaggcccagaggggcgggggagtccaagcccgcccggcccggctgctcctggggggcgctttcctgcccctcccctcctctgctccttcctgcatggacctctgccgttcctgctcctgctccggaagccgccgccgccgccgcgcttgccttgccccctctttttggcctccccctatttcctaggatccgcattcgggtggactctgccccaggagcttgacagggtgcagggcctcttctggcctctctcctctctctgtccatccactgtgccccttgggccacgccgacgcgctcggtgccacgtgccgtgtggtgtctgtgccgcagacgggccatctgcccgctcacttgtggactttgcgctcccggttgtcgcgccctgtgctcccgaccagcagccccaccgtccacctcctcgcccccgcttctcttacgcccccgccccgggcgtgctcctcgcgccctcggcctctctgtccttgctcttttgtaaggggcgggcccggctcagtgacctgtgctgctctgtatggtgccgtgtgtaagaataaacccgttggaatactcgtggtctcagttccttcccgtcccgccgccccggcccgacccactgctagggctgcccaggaggagggaggcaggagggaggccgggaagtccaggtgggcagctctcggcagaccctgggcctctttaacacgcctcttgttttctcttccagtctcggaagggtgctgacctggaccgggagaagaaggctgccgagtgcaaggtggacagcatcgggagcggccgcgccatccccatcaagcaggggatcctgctaaagcggagcggcaagtccctgaacaaggagtggaagaagaagtatgtgacgctctgtgacaacgggctgctcacctatcaccccagcctgcatgattacatgcagaacatccacggcaaggagattgacctgctgcggacaacggtgaaagtgccagggaagcgcctgccccgagccacacctgccacagccccgggcaccagcccccgtgccaacgggctgtccgtggagcggagtaacacacagctgggtgggggcacaggtgccccccactcggccagcagcgcatccctgcactctgagcgccccctcagcagctcggcctgggctggcccgcgccctgaggggctgcaccagcgctcctgctccgtttccagcgccgaccagtggagtgaggccaccacttccctgcccccaggcatgcagcaccctgccagtggcccagctgaggtactcagttccagccccaagctggatcctcccccatctccccactccaaccggaagaagcaccggaggaaaaagagcaccgggaccccccgaccagacggccccagcagtgctactgaagaggcagaggagtcgtttgaatttgtggtggtgtccctcactgggcagacgtggcacttcgaggcttcaacggcggaggagcgggagctgtgggttcagagtgtgcaggcccagatccttgccagcctgcaaggctgccgcagtgccaaggacaagactcgactggggaaccagaacgcagctctggctgtgcaggccgtccgcaccgtccgcggcaacagcttttgtatcgactgcgatgcacccaatccagactgggccagcctgaacctgggtgccctgatgtgcattgagtgctcaggcatccaccgacacctgggggctcacctgtcccgggtgcgctcccttgacctcgatgactggccgcctgagctgctggctgtcatgactgccatgggcaatgccctcgccaacagcgtctgggagggggccttgggtggctactccaagccagggcctgatgcctgcagagaggagaaggaacgctggatacgggccaagtatgaacagaagctcttcctggccccactgccaagctcagatgtgccactggggcagcagctgctccgggccgtggtggaagatgacctgcggctgttggtgatgctcctggcacatggctccaaagaggaggtgaatgagacctatggggacggggacgggcggacggctctacatctctccagtgccatggccaacgttgtcttcacgcagctgctcatctggtacggggtggacgtgaggagccgggacgcccggggcctgactccactggcatatgctcgccgggccggcagccaggagtgtgcagacatcttgatccagcatggctgccctggggagggctgtggcttagcgcctacccccaacagagagcctgccaatggcaccaacccctctgctgagctgcaccgtagtcctagcctcctataaggcccaggaagagggcagaggggccagaaggactccatggcccaaagaccctcctccctgcaggcactgtgggaacagacacagagatggagaagcagggacatgctgagaggacgaagccaaggaaattagggaggagagtcaaagggatcaaggagagttggggatttgagctgcagcagagagggatgagggatttagccctctgccctaaggtgccattgaaaagggacaggacccttcggaggtgcctgtgaggagaggggagcaggacctctccctcctccagatccctgcctcctagtgccagcccctcacacgccttcatcctgaaacaggaagaggacggcaccaagttgggggtgctggatgaaagagacgaggggtgatctgtgagtcccatgtaaactttgtacattggaatatttatgtttgtgtacatatttgatgtgtgtgtgtatgatgagccaataaaccagactgtgtgcgtgg

SEQ ID NO: 315609 - DNA, 2818 bp, Homo sapiens
gcgccggagcccgcgctgggggctgccggggaccaggcccggccggacgctgcaggctcgctgcatggagaagaaggcagctcggccccacgcccggcgctggccagcggacgaggcccagagggcagggggagtccaagcccgcccggcacaatttgctgcctgggtggatgcagtggtgtttgtgttcagcctggaggatgaaatcagtttccagacggtgtacaactacttcctgcgtctctgcagcttccgcaacgccagcgaggtgcccatggtgcttgtgggcacgcaggatgccatcagcgctgcgaatccccgggttatcgacgacagcagagcccgcaagctctccacagatctgaagcggtgcacctactatgagacgtgcgcgacctacgggctcaatgtggagcgtgtcttccaggacgtggcccagaaggtagtggccttgcgaaagaagcagcaactggccatcgggccctgcaagtcactgcccaactcgcccagccactcggccgtgtccgccgcctccatcccggccgtgcacatcaaccaggccacgaatggcggcggcagcgccttcagcgactactcgtcctcagtcccctccacccccagcatcagccagcgggagctgcgcatcgagaccatcgctgcctcctccacccccacacccatccgaaagcagtccaagcggcgctccaacatcttcacgtctcggaagggtgctgacctggaccgggagaagaaggctgccgagtgcaaggtggacagcatcgggagcggccgcgccatccccatcaagcaggggatcctgctaaagcggagcggcaagtccctgaacaaggagtggaagaagaagtatgtgacgctctgtgacaacgggctgctcacctatcaccccagcctgcatgattacatgcagaacatccacggcaaggagattgacctgctgcggacaacggtgaaagtgccagggaagcgcctgccccgagccacacctgccacagccccgggcaccagcccccgtgccaacgggctgtccgtggagcggagtaacacacagctgggtgggggcacaggtgccccccactcggccagcagcgcatccctgcactctgagcgccccctcagcagctcggcctgggctggcccgcgccctgaggggctgcaccagcgctcctgctccgtttccagcgccgaccagtggagtgaggccaccacttccctgcccccaggcatgcagcaccctgccagtggcccagctgaggtactcagttccagccccaagctggatcctcccccatctccccactccaaccggaagaagcaccggaggaaaaagagcaccgggaccccccgaccagacggccccagcagtgctactgaagaggcagaggagtcgtttgaatttgtggtggtgtccctcactgggcagacgtggcacttcgaggcttcaacggcggaggagcgggagctgtgggttcagagtgtgcaggcccagatccttgccagcctgcaaggctgccgcagtgccaaggacaagactcgactggggaaccagaacgcagctctggctgtgcaggccgtccgcaccgtccgcggcaacagcttttgtatcgactgcgatgcacccaatccagactgggccagcctgaacctgggtgccctgatgtgcattgagtgctcaggcatccaccgacacctgggggctcacctgtcccgggtgcgctcccttgacctcgatgactggccgcctgagctgctggctgtcatgactgccatgggcaatgccctcgccaacagcgtctgggagggggccttgggtggctactccaagccagggcctgatgcctgcagagaggagaaggaacgctggatacgggccaagtatgaacagaagctcttcctggccccactgccaagctcagatgtgccactggggcagcagctgctccgggccgtggtggaagatgacctgcggctgttggtgatgctcctggcacatggctccaaagaggaggtgaatgagacctatggggacggggacgggcggacggctctacatctctccagtgccatggccaacgttgtcttcacgcagctgctcatctggtacggggtggacgtgaggagccgggacgcccggggcctgactccactggcatatgctcgccgggccggcagccaggagtgtgcagacatcttgatccagcatggctgccctggggagggctgtggcttagcgcctacccccaacagagagcctgccaatggcaccaacccctctgctgagctgcaccgtagtcctagcctcctataaggcccaggaagagggcagaggggccagaaggactccatggcccaaagaccctcctccctgcaggcactgtgggaacagacacagagatggagaagcagggacatgctgagaggacgaagccaaggaaattagggaggagagtcaaagggatcaaggagagttggggatttgagctgcagcagagagggatgagggatttagccctctgccctaaggtgccattgaaaagggacaggacccttcggaggtgcctgtgaggagaggggagcaggacctctccctcctccagatccctgcctcctagtgccagcccctcacacgccttcatcctgaaacaggaagaggacggcaccaagttgggggtgctggatgaaagagacgaggggtgatctgtgagtcccatgtaaactttgtacattggaatatttatgtttgtgtacatatttgatgtgtgtgtgtatgatgagccaataaaccagactgtgtgcgtgg

SEQ ID NO: 315610 - DNA, 2964 bp, Homo sapiens
gccatgaacttccaggcgggcggggggcagagcccgcagcagcagcagcagctggccggcgggcccccccagcagttcgcgctctccaactccgcggccatccgggccgagatccagcgcttcgagtccgtgcatcccaatatctacgccatctacgacctgatcgagcgcatcgaggatttggcgctgcagaaccagatccgggagcacgtcatctccatcgaggactcgtttgtgaacagccaggagtggacgctgagccgctccgtaccggagcttaaagtgggcatagtggggaacctgtctagcgggaagtcagccctggtgcaccgctatctgacggggacctatgtccaggaggagtcccctgaaggggggcggtttaagaaggagattgtggtggatggccagagttacctgctgctgatccgagatgaaggaggcccccctgagctccagtttgctgcctgggtggatgcagtggtgtttgtgttcagcctggaggatgaaatcagtttccagacggtgtacaactacttcctgcgtctctgcagcttccgcaacgccagcgaggtgcccatggtgcttgtgggcacgcaggatgccatcagcgctgcgaatccccgggttatcgacgacagcagagcccgcaagctctccacagatctgaagcggtgcacctactatgagacgtgcgcgacctacgggctcaatgtggagcgtgtcttccaggacgtggcccagaaggtagtggccttgcgaaagaagcagcaactggccatcgggccctgcaagtcactgcccaactcgcccagccactcggccgtgtccgccgcctccatcccggccgtgcacatcaaccagtctcggaagggtgctgacctggaccgggagaagaaggctgccgagtgcaaggtggacagcatcgggagcggccgcgccatccccatcaagcaggggatcctgctaaagcggagcggcaagtccctgaacaaggagtggaagaagaagtatgtgacgctctgtgacaacgggctgctcacctatcaccccagcctgcatgattacatgcagaacatccacggcaaggagattgacctgctgcggacaacggtgaaagtgccagggaagcgcctgccccgagccacacctgccacagccccgggcaccagcccccgtgccaacgggctgtccgtggagcggagtaacacacagctgggtgggggcacaggtgccccccactcggccagcagcgcatccctgcactctgagcgccccctcagcagctcggcctgggctggcccgcgccctgaggggctgcaccagcgctcctgctccgtttccagcgccgaccagtggagtgaggccaccacttccctgcccccaggcatgcagcaccctgccagtggcccagctgaggtactcagttccagccccaagctggatcctcccccatctccccactccaaccggaagaagcaccggaggaaaaagagcaccgggaccccccgaccagacggccccagcagtgctactgaagaggcagaggagtcgtttgaatttgtggtggtgtccctcactgggcagacgtggcacttcgaggcttcaacggcggaggagcgggagctgtgggttcagagtgtgcaggcccagatccttgccagcctgcaaggctgccgcagtgccaaggacaagactcgactggggaaccagaacgcagctctggctgtgcaggccgtccgcaccgtccgcggcaacagcttttgtatcgactgcgatgcacccaatccagactgggccagcctgaacctgggtgccctgatgtgcattgagtgctcaggcatccaccgacacctgggggctcacctgtcccgggtgcgctcccttgacctcgatgactggccgcctgagctgctggctgtcatgactgccatgggcaatgccctcgccaacagcgtctgggagggggccttgggtggctactccaagccagggcctgatgcctgcagagaggagaaggaacgctggatacgggccaagtatgaacagaagctcttcctggccccactgccaagctcagatgtgccactggggcagcagctgctccgggccgtggtggaagatgacctgcggctgttggtgatgctcctggcacatggctccaaagaggaggtgaatgagacctatggggacggggacgggcggacggctctacatctctccagtgccatggccaacgttgtcttcacgcagctgctcatctggtacggggtggacgtgaggagccgggacgcccggggcctgactccactggcatatgctcgccgggccggcagccaggagtgtgcagacatcttgatccagcatggctgccctggggagggctgtggcttagcgcctacccccaacagagagcctgccaatggcaccaacccctctgctgagctgcaccgtagtcctagcctcctataaggcccaggaagagggcagaggggccagaaggactccatggcccaaagaccctcctccctgcaggcactgtgggaacagacacagagatggagaagcagggacatgctgagaggacgaagccaaggaaattagggaggagagtcaaagggatcaaggagagttggggatttgagctgcagcagagagggatgagggatttagccctctgccctaaggtgccattgaaaagggacaggacccttcggaggtgcctgtgaggagaggggagcaggacctctccctcctccagatccctgcctcctagtgccagcccctcacacgccttcatcctgaaacaggaagaggacggcaccaagttgggggtgctggatgaaagagacgaggggtgatctgtgagtcccatgtaaactttgtacattggaatatttatgtttgtgtacatatttgatgtgtgtgtgtatgatgagccaataaaccagactgtgtgcgtgg

SEQ ID NO: 315611 - DNA, 5973 bp, Homo sapiens
  misc_feature (5370)..(5370): n is a, c, g, or t
  misc_feature (5398)..(5399): n is a, c, g, or t
  misc_feature (5402)..(5402): n is a, c, g, or t
  misc_feature (5412)..(5412): n is a, c, g, or t
  misc_feature (5415)..(5415): n is a, c, g, or t
  misc_feature (5423)..(5423): n is a, c, g, or t
  misc_feature (5435)..(5435): n is a, c, g, or t
  misc_feature (5439)..(5439): n is a, c, g, or t
  misc_feature (5472)..(5472): n is a, c, g, or t
  misc_feature (5497)..(5497): n is a, c, g, or t
  misc_feature (5502)..(5502): n is a, c, g, or t
  misc_feature (5513)..(5513): n is a, c, g, or t
  misc_feature (5517)..(5517): n is a, c, g, or t
  misc_feature (5527)..(5527): n is a, c, g, or t
  misc_feature (5531)..(5531): n is a, c, g, or t
  misc_feature (5533)..(5533): n is a, c, g, or t
  misc_feature (5540)..(5540): n is a, c, g, or t
  misc_feature (5543)..(5543): n is a, c, g, or t
gccatgaacttccaggcgggcggggggcagagcccgcagcagcagcagcagctggccggcgggcccccccagcagttcgcgctctccaactccgcggccatccgggccgagatccagcgcttcgagtccgtgcatcccaatatctacgccatctacgacctgatcgagcgcatcgaggatttggcgctgcagaaccagatccgggagcacgtcatctccatcgaggactcgtttgtgaacagccaggagtggacgctgagccgctccgtaccggagcttaaagtgggcatagtggggaacctgtctagcgggaagtcagccctggtgcaccgctatctgacggggacctatgtccaggaggagtcccctgaaggggggcggtttaagaaggagattgtggtggatggccagagttacctgctgctgatccgagatgaaggaggcccccctgagctccagtttgctgcctgggtggatgcagtggtgtttgtgttcagcctggaggatgaaatcagtttccagacggtgtacaactacttcctgcgtctctgcagcttccgcaacgccagcgaggtgcccatggtgcttgtgggcacgcaggatgccatcagcgctgcgaatccccgggttatcgacgacagcagagcccgcaagctctccacagatctgaagcggtgcacctactatgagacgtgcgcgacctacgggctcaatgtggagcgtgtcttccaggacgtggcccagaaggtagtggccttgcgaaagaagcagcaactggccatcgggccctgcaagtcactgcccaactcgcccagccactcggccgtgtccgccgcctccatcccggccgtgcacatcaaccaggccacgaatggcggcggcagcgccttcagcgactactcgtcctcagtcccctccacccccagcatcagccagcgggagctgcgcatcgagaccatcgctgcctcctccacccccacacccatccgaaagcagtccaagcggcgctccaacatcttcacgatatgtgccactgtttccaacttttcatcaacaaaaaggcctttccaactccttccaaattagaagaccagttggtgacacacagcacctctggacatgccccctgtgcggggccggaggcgggccgggccctgggactgctctcagatgagaagcggccgcgagctccccactccagagacccacgggaacctttgtaactaaccccacccccagggaaggctaggagcgccggagcccgcgctgggggctgccggggaccaggcccggccggacgctgcaggctcgctgcatggagaagaaggcagctcggccccacgcccggcgctggccagcgcgacgaggcccagaggggcgggggagtccaagcccgcccggcccggctgctcctggggggcgctttcctgcccctcccctcctctgctccttcctgcatggacctctgccgttcctgctcctgctccggaagccgccgccgccgccgcgcttgccttgccccctctttttggcctccccctatttcctaggatccgcattcgggtggactctgccccaggagcttgacagggtgcagggcctcttctggcctctctcctctctctgtccatccactgtgccccttgggccacgccgacgcgctcggtgccacgtgccgtgtggtgtctgtgccgcagacgggccatctgcccgctcacttgtggactttgcgctcccggttgtcgcgccctgtgctcccgaccagcagccccaccgtccacctcctcgcccccgcttctcttacgcccccgccccgggcgtgctcctcgcgccctcggcctctctgtccttgctcttttgtaaggggcgggcccggctcagtgacctgtgctgctctgtatggtgccgtgtgtaagaataaacccgttggaatactcgtggtctcagttccttcccgtcccgccgccccggcccgacccactgctagggctgcccaggaggagggaggcaggagggaggccgggaagtccaggtgggcagctctcggcagaccctgggcctctttaacacgcctcttgttttctcttccagtctcggaagggtgctgacctggaccgggagaagaaggctgccgagtgcaaggtggacagcatcgggagcggccgcgccatccccatcaagcaggggatcctgctaaagcggagcggcaagtccctgaacaaggagtggaagaagaagtatgtgacgctctgtgacaacgggctgctcacctatcaccccagcctgcatgattacatgcagaacatccacggcaaggagattgacctgctgcggacaacggtgaaagtgccagggaagcgcctgccccgagccacacctgccacagccccgggcaccagcccccgtgccaacgggctgtccgtggagcggagtaacacacagctgggtgggggcacaggtgccccccactcggccagcagcgcatccctgcactctgagcgccccctcagcagctcggcctgggctggcccgcgccctgaggggctgcaccagcgctcctgctccgtttccagcgccgaccagtggagtgaggccaccacttccctgcccccaggcatgcagcaccctgccagtggcccagctgaggtactcagttccagccccaagctggatcctcccccatctccccactccaaccggaagaagcaccggaggaaaaagagcaccgggaccccccgaccagacggccccagcagtgctactgaaggttagggggacccagagggaaaccgggcacaggaggtgggcagtgggacttggggatagtaccctaaaagtaacacctattttttattttttgtattcagtggattaagcactttctagtagttgctaatcaaagtagttctacagcttcttttggtaatctagacctggtatcttagaaaagttcttctgataactgaaaccctttctgttgaaatgtgggcttacttcatttattcttaaggtaaaagacagcagactgctacatcaatagctcctctaagatgttcgggcaggacctgtgttttctgtctcttgtgtcatactgagtttaataaagtgctgggtacttactaggtgcgtaatacatgtgtacagattggctgagtctctcattagttttccttaggctaaggaattccaggtcctgaagccttcttccataggacctttctcttcctctattaattatactgctgctcctcagattttcctcaaagtatcttcaaaacctccctcttcttggtgattggagtttctttgctcccaaataagtttaacttctacagactcataatttctcacttctgctctaatcatcagggtagacgtatgggtcaggggagcagagacacctagccaacctgtgacacagtgatgcttagtacttacagcgtggggtctcccttctggtccggcagactaagccccacaaatgatcatggagatcacgtagttcgaaggctgtggttgaaagcaaggtgaggcgcagtggtggtgcctggggaaggaggcgccggttctatttctgtgggaaggcagttctgctaacagtccctgagagcaagggcccagcagaggaggaattccaggggatgtcggtgtcactgaggtgaggctgcctggggccaagatgcagtgaggacttacaagcagagatggccttggcagaactggggttcaccctggggccttaccacaggcacctgtgctgtctttccagcccccaggacacagtcacactgcttgttaggaattgttcacccatggggcagtgaccattgggaatgagattcatgcggctgtcttctggggcctgggggaccagagcttggaagagcttcaccacattgcttgggttcacagtccagccctcagtgcttgtcagtacagatgccctcaggcccctatttgctcacatactgcaggtcctgtagaaaacctctcctcctctcccccatccacttgcccttcctgcctgtctatgccatggtagtgggggaggggcccagctcccaggagccccacgctgacgccgtcaggaatattgggtttaatgagctgcaaaatgaggcggctgcagctgacatgtacggatggtgcccacacccgccttcccccaccctctcccagtgtttgcctcctagcaccccgtcacatccttctccagatactcagctctttctgtgggatgcacccctctctggtttcacacccattcccggcagtgccaggggtgccaagatcttgcatcccccatctgttttcacttaagctccacaggtggttaggaatgagaactgggagctcacactagtcttgcaggtttactctggcctccccctgcaagctgtcctggagtgtgtggccttgcagctggggaagggtctaggggaggacacttgccagtggagcagggtagtgagtggagttgtggcgatagcatgccctgggtgtgcacgcaggccaggagccctgatggcataaacacccccccaacagaggcagaggagtcgtttgaatttgtggtggtgtccctcactgggcagacgtggcacttcgaggcttcaacggcggaggagcgggagctgtgggttcagagtgtgcaggcccagatccttgccagcctgcaaggctgccgcagtgccaaggacaagactcgactggggaaccagaacgcagctctggctgtgcaggccgtccgcaccgtccgcggcaacagcttttgtatcgactgcgatgcacccaatccagactgggccagcctgaacctgggtgccctgatgtgcattgagtgctcaggcatccaccgacacctgggggctcacctgtcccgggtgcgctcccttgacctcgatgactggccgcctgagctgctggctgtcatgactgccatgggcaatgccctcgccaacagcgtctgggagggggccttgggtggctactccaagccagggcctgatgcctgcagagaggagaaggaacgctggatacgggccaagtatgaacagaagctcttcctggccccactgccaagctcagatgtgccactggggcagcagctgctccgggccgtggtggaagatgacctgcggctgttggtgatgctcctggcacatggctccaaagaggaggtgaatgagacctatggggacggggacgggcggacggctctacatctctccagtgccatggccaacgttgtcttcacgcagctgctcatctggtacggggtggacgtgaggagccgggacgcccggggcctgactccactggcatatgctcgccgggccggcagccaggagtgtgcagacaaaaaaaaanaaaaaacaaccctggagaaaactaaacnnaanacctaccccnaanaaaaaacnaaccaaaaacanaaanccctcaataaacaaaaccataaacataacctcnaaaaaaacccaaaaaaagaaaaaanggacnaaaaaaactcnaaanaccaaaaaanccananaaccctnaanaacaatgtgggaacagacacagagatggagaagcagggacatgctgagaggacgaagccaaggaaattagggaggagagtcaaagggatcaaggagagttggggatttgagctgcagcagagagggatgagggatttagccctctgccctaaggtgccattgaaaagggacaggacccttcggaggtgcctgtgaggagaggggagcaggacctctccctcctccagatccctgcctcctagtgccagcccctcacacgccttcatcctgaaacaggaagaggacggcaccaagttgggggtgctggatgaaagagacgaggggtgatctgtgagtcccatgtaaactttgtacattggaatatttatgtttgtgtacatatttgatgtgtgtgtgtatgatgagccaataaaccagactgtgtgcgtgg

SEQ ID NO: 315612 - DNA, 3433 bp, Homo sapiens
aggtggacgcttggcctgtgtctgcccagcaggtgccgctgccgcccgccgccgccgccgcctcctcctcctcctggtcctcctccttctcctcctcctccttgtccttctcctcttcctcgtccttctcctcctcctcctcctcctcttcatcccgctgccgccgctccccaggcgcctgggtctctgccctcaccggtgctgaccgacttgtgcggggcttgagtataacttgccaaaatctttattctttcgatatttgcagatatgtgccactgtttccaacttttcatcaacaaaaaggcctttccaactccttccaaattagaagaccagttggtgacacacagcacctctggacatgccccctgtgcggggccggaggcgggccgggccctgggactgctctcagatgagaagcggccgcgagctccccactccagagacccacgggaacctttgtaactaaccccacccccagggaaggctaggagcgccggagcccgcgctgggggctgccggggaccaggcccggccggacgctgcaggctcgctgcatggagaagaaggcagctcggccccacgcccggcgctggccagcgcgacgaggcccagaggggcgggggagtccaagcccgcccggcccggctgctcctggggggcgctttcctgcccctcccctcctctgctccttcctgcatggacctctgccgttcctgctcctgctccggaagccgccgccgccgccgcgcttgccttgccccctctttttggcctccccctatttcctaggatccgcattcgggtggactctgccccaggagcttgacagggtgcagggcctcttctggcctctctcctctctctgtccatccactgtgccccttgggccacgccgacgcgctcggtgccacgtgccgtgtggtgtctgtgccgcagacgggccatctgcccgctcacttgtggactttgcgctcccggttgtcgcgccctgtgctcccgaccagcagccccaccgtccacctcctcgcccccgcttctcttacgcccccgccccgggcgtgctcctcgcgccctcggcctctctgtccttgctcttttgtaaggggcgggcccggctcagtgacctgtgctgctctgtatggtgccgtgtgtaagaataaacccgttggaatactcgtggtctcagttccttcccgtcccgccgccccggcccgacccactgctagggctgcccaggaggagggaggcaggagggaggccgggaagtccaggtgggcagctctcggcagaccctgggcctctttaacacgcctcttgttttctcttccagtctcggaagggtgctgacctggaccgggagaagaaggctgccgagtgcaaggtggacagcatcgggagcggccgcgccatccccatcaagcaggggatcctgctaaagcggagcggcaagtccctgaacaaggagtggaagaagaagtatgtgacgctctgtgacaacgggctgctcacctatcaccccagcctgcatgattacatgcagaacatccacggcaaggagattgacctgctgcggacaacggtgaaagtgccagggaagcgcctgccccgagccacacctgccacagccccgggcaccagcccccgtgccaacgggctgtccgtggagcggagtaacacacagctgggtgggggcacaggtgccccccactcggccagcagcgcatccctgcactctgagcgccccctcagcagctcggcctgggctggcccgcgccctgaggggctgcaccagcgctcctgctccgtttccagcgccgaccagtggagtgaggccaccacttccctgcccccaggcatgcagcaccctgccagtggcccagctgaggtactcagttccagccccaagctggatcctcccccatctccccactccaaccggaagaagcaccggaggaaaaagagcaccgggaccccccgaccagacggccccagcagtgctactgaagaggcagaggagtcgtttgaatttgtggtggtgtccctcactgggcagacgtggcacttcgaggcttcaacggcggaggagcgggagctgtgggttcagagtgtgcaggcccagatccttgccagcctgcaaggctgccgcagtgccaaggacaagactcgactggggaaccagaacgcagctctggctgtgcaggccgtccgcaccgtccgcggcaacagcttttgtatcgactgcgatgcacccaatccagactgggccagcctgaacctgggtgccctgatgtgcattgagtgctcaggcatccaccgacacctgggggctcacctgtcccgggtgcgctcccttgacctcgatgactggccgcctgagctgctggctgtcatgactgccatgggcaatgccctcgccaacagcgtctgggagggggccttgggtggctactccaagccagggcctgatgcctgcagagaggagaaggaacgctggatacgggccaagtatgaacagaagctcttcctggccccactgccaagctcagatgtgccactggggcagcagctgctccgggccgtggtggaagatgacctgcggctgttggtgatgctcctggcacatggctccaaagaggaggtgaatgagacctatggggacggggacgggcggacggctctacatctctccagtgccatggccaacgttgtcttcacgcagctgctcatctggtacggggtggacgtgaggagccgggacgcccggggcctgactccactggcatatgctcgccgggccggcagccaggagtgtgcagacatcttgatccagcatggctgccctggggagggctgtggcttagcgcctacccccaacagagagcctgccaatggcaccaacccctctgctgagctgcaccgtagtcctagcctcctataaggcccaggaagagggcagaggggccagaaggactccatggcccaaagaccctcctccctgcaggcactgtgggaacagacacagagatggagaagcagggacatgctgagaggacgaagccaaggaaattagggaggagagtcaaagggatcaaggagagttggggatttgagctgcagcagagagggatgagggatttagccctctgccctaaggtgccattgaaaagggacaggacccttcggaggtgcctgtgaggagaggggagcaggacctctccctcctccagatccctgcctcctagtgccagcccctcacacgccttcatcctgaaacaggaagaggacggcaccaagttgggggtgctggatgaaagagacgaggggtgatctgtgagtcccatgtaaactttgtacattggaatatttatgtttgtgtacatatttgatgtgtgtgtgtatgatgagccaataaaccagactgtgtgcgtgg

SEQ ID NO: 315613 - DNA, 2580 bp, Homo sapiens
  misc_feature (23)..(23): n is a, c, g, or t
  misc_feature (49)..(49): n is a, c, g, or t
  misc_feature (66)..(66): n is a, c, g, or t
  misc_feature (81)..(81): n is a, c, g, or t
aaacagctatgacatgattacgnaatttaaataggactcactaataggnaatttgccctcgagccnaaaaaattcggcaanaaggcacagatctgaagcggtgcacctactatgagacgtgcgcgacctacgggctcaatgtggagcgtgtcttccaggacgtgggtataattgactctgctgtcccctgcagtggcccagaaggtagtggccttgcgaaagaagcagcaactggccatcgggccctgcaagtcactgcccaactcgcccagccactcggccgtgtccgccgcctccatcccggccgtgcacatcaaccaggccacgaatggcggcggcagcgccttcagcgactactcgtcctcagtcccctccacccccagcatcagccagcgggagctgcgcatcgagaccatcgctgcctcctccacccccacacccatccgaaagcagtccaagcggcgctccaacatcttcacgtctcggaagggtgctgacctggaccgggagaagaaggctgccgagtgcaaggtggacagcatcgggagcggccgcgccatccccatcaagcaggggatcctgctaaagcggagcggcaagtccctgaacaaggagtggaagaagaagtatgtgacgctctgtgacaacgggctgctcacctatcaccccagcctgcatgattacatgcagaacatccacggcaaggagattgacctgctgcggacaacggtgaaagtgccagggaagcgcctgccccgagccacacctgccacagccccgggcaccagcccccgtgccaacgggctgtccgtggagcggagtaacacacagctgggtgggggcacaggtgccccccactcggccagcagcgcatccctgcactctgagcgccccctcagcagctcggcctgggctggcccgcgccctgaggggctgcaccagcgctcctgctccgtttccagcgccgaccagtggagtgaggccaccacttccctgcccccaggcatgcagcaccctgccagtggcccagctgaggtactcagttccagccccaagctggatcctcccccatctccccactccaaccggaagaagcaccggaggaaaaagagcaccgggaccccccgaccagacggccccagcagtgctactgaagaggcagaggagtcgtttgaatttgtggtggtgtccctcactgggcagacgtggcacttcgaggcttcaacggcggaggagcgggagctgtgggttcagagtgtgcaggcccagatccttgccagcctgcaaggctgccgcagtgccaaggacaagactcgactggggaaccagaacgcagctctggctgtgcaggccgtccgcaccgtccgcggcaacagcttttgtatcgactgcgatgcacccaatccagactgggccagcctgaacctgggtgccctgatgtgcattgagtgctcaggcatccaccgacacctgggggctcacctgtcccgggtgcgctcccttgacctcgatgactggccgcctgagctgctggctgtcatgactgccatgggcaatgccctcgccaacagcgtctgggagggggccttgggtggctactccaagccagggcctgatgcctgcagagaggagaaggaacgctggatacgggccaagtatgaacagaagctcttcctggccccactgccaagctcagatgtgccactggggcagcagctgctccgggccgtggtggaagatgacctgcggctgttggtgatgctcctggcacatggctccaaagaggaggtgaatgagacctatggggacggggacgggcggacggctctacatctctccagtgccatggccaacgttgtcttcacgcagctgctcatctggtacggggtggacgtgaggagccgggacgcccggggcctgactccactggcatatgctcgccgggccggcagccaggagtgtgcagacatcttgatccagcatggctgccctggggagggctgtggcttagcgcctacccccaacagagagcctgccaatggcaccaacccctctgctgagctgcaccgtagtcctagcctcctataaggcccaggaagagggcagaggggccagaaggactccatggcccaaagaccctcctccctgcaggcactgtgggaacagacacagagatggagaagcagggacatgctgagaggacgaagccaaggaaattagggaggagagtcaaagggatcaaggagagttggggatttgagctgcagcagagagggatgagggatttagccctctgccctaaggtgccattgaaaagggacaggacccttcggaggtgcctgtgaggagaggggagcaggacctctccctcctccagatccctgcctcctagtgccagcccctcacacgccttcatcctgaaacaggaagaggacggcaccaagttgggggtgctggatgaaagagacgaggggtgatctgtgagtcccatgtaaactttgtacattggaatatttatgtttgtgtacatatttgatgtgtgtgtgtatgatgagccaataaaccagactgtgtgcgtgg

SEQ ID NO: 315614 - DNA, 2483 bp, Homo sapiens
  misc_feature (2471)..(2471): n is a, c, g, or t
gccatgaacttccaggcgggcggggggcagagcccgcagcagcagcagcagctggccggcgggcccccccagcagttcgcgctctccaactccgcggccatccgggccgagatccagcgcttcgagtccgtgcatcccaatatctacgccatctacgacctgatcgagcgcatcgaggatttggcgctgcagaaccagatccgggagcacgtcatctccatcgaggactcgtttgtgaacagccaggagtggacgctgagccgctccgtaccggagcttaaagtgggcatagtggggaacctgtctagcgggaagtcagccctggtgcaccgctatctgacggggacctatgtccaggaggagtcccctgaaggggggcggtttaagaaggagattgtggtggatggccagagttacctgctgctgatccgagatgaaggaggcccccctgagctccagtttgctgcctgggtggatgcagtggtgtttgtgttcagcctggaggatgaaatcagtttccagacggtgtacaactacttcctgcgtctctgcagcttccgcaacgccagcgaggtgcccatggtgcttgtgggcacgcaggatgccatcagcgctgcgaatccccgggttatcgacgacagcagagcccgcaagctctccacagatctgaagcggtgcacctactatgagacgtgcgcgacctacgggctcaatgtggagcgtgtcttccaggacgtggcccagaaggtagtggccttgcgaaagaagcagcaactggccatcgggccctgcaagtcactgcccaactcgcccagccactcggccgtgtccgccgcctccatcccggccgtgcacatcaaccaggccacgaatggcggcggcagcgccttcagcgactactcgtcctcagtcccctccacccccagcatcagccagcgggagctgcgcatcgagaccatcgctgcctcctccacccccacacccatccgaaagcagtccaagcggcgctccaacatcttcacgatatgtgccactgtttccaacttttcatcaacaaaaaggcctttccaactccttccaaattagaagaccagttggtgacacacagcacctctggacatgccccctgtgcggggccggaggcgggccgggccctgggactgctctcagatgagaagcggccgcgagctccccactccagagacccacgggaacctttgtaactaaccccacccccagggaaggctaggagcgccggagcccgcgctgggggctgccggggaccaggcccggccggacgctgcaggctcgctgcatggagaagaaggcagctcggccccacgcccggcgctggccagcgcgacgaggcccagaggggcgggggagtccaagcccgcccggcccggctgctcctggggggcgctttcctgcccctcccctcctctgctccttcctgcatggacctctgccgttcctgctcctgctccggaagccgccgccgccgccgcgcttgccttgccccctctttttggcctccccctatttcctaggatccgcattcgggtggactctgccccaggagcttgacagggtgcagggcctcttctggcctctctcctctctctgtccatccactgtgccccttgggccacgccgacgcgctcggtgccacgtgccgtgtggtgtctgtgccgcagacgggccatctgcccgctcacttgtggactttgcgctcccggttgtcgcgccctgtgctcccgaccagcagccccaccgtccacctcctcgcccccgcttctcttacgcccccgccccgggcgtgctcctcgcgccctcggcctctctgtccttgctcttttgtaaggggcgggcccggctcagtgacctgtgctgctctgtatggtgccgtgtgtaagaataaacccgttggaatactcgtggtctcagttccttcccgtcccgccgccccggcccgacccactgctagggctgcccaggaggagggaggcaggagggaggccgggaagtccaggtgggcagctctcggcagaccctgggcctctttaacacgcctcttgttttctcttccagtctcggaagggtgctgacctggaccgggagaagaaggctgccgagtgcaaggtggacagcatcgggagcggccgcgccatccccatcaagcaggggatcctgctaaagcggagcggcaagtccctgaacaaggagtggaagaagaagtatgtgacgctctgtgacaacgggctgctcacctatcaccccagcctgcatgattacatgcagaacatccacggcaaggagattgacctgctgcggacaacggtgaaagtgccagggaagcgcctgccccgagccacacctgccacagccccgggcaccagcccccgtgccaacgggctgtccgtggagcggagtaacacacagctgggtgggggcacagaggcagaggagtngccctgtcatcc

SEQ ID NO: 315615 - DNA, 2796 bp, Homo sapiens
gccatgaacttccaggcgggcggggggcagagcccgcagcagcagcagcagctggccggcgggcccccccagcagttcgcgctctccaactccgcggccatccgggccgagatccagcgcttcgagtccgtgcatcccaatatctacgccatctacgacctgatcgagcgcatcgaggatttggcgctgcagaaccagatccgggagcacgtcatctccatcgaggactcgtttgtgaacagccaggagtggacgctgagccgctccgtaccggagcttaaagtgggcatagtggggaacctgtctagcgggaagtcagccctggtgcaccgctatctgacggggacctatgtccaggaggagtcccctgaaggggggcggtttaagaaggagattgtggtggatggccagagttacctgctgctgatccgagatgaaggaggcccccctgagctccagtttgctgcctgggtggatgcagtggtgtttgtgttcagcctggaggatgaaatcagtttccagacggtgtacaactacttcctgcgtctctgcagcttccgcaacgccagcgaggtgcccatggtgcttgtgggcacgcaggatgccatcagcgctgcgaatccccgggttatcgacgacagcagagcccgcaagctctccacagatctgaagcggtgcacctactatgagacgtgcgcgacctacgggctcaatgtggagcgtgtcttccaggacgtggcccagaaggtagtggccttgcgaaagaagcagcaactggccatcgggccctgcaagtcactgcccaactcgcccagccactcggccgtgtccgccgcctccatcccggccgtgcacatcaaccaggccacgaatggcggcggcagcgccttcagcgactactcgtcctcagtcccctccacccccagcatcagccagcgggagctgcgcatcgagaccatcgctgcctcctccacccccacacccatccgaaagcagtccaagcggcgctccaacatcttcacgatatgtgccactgtttccaacttttcatcaacaaaaaggcctttccaactccttccaaattagaagaccagttggtgacacacagcacctctggacatgccccctgtgcggggccggaggcgggccgggccctgggactgctctcagatgagaagcggccgcgagctccccactccagagacccacgggaacctttgtaactaaccccacccccagggaaggctaggagcgccggagcccgcgctgggggctgccggggaccaggcccggccggacgctgcaggctcgctgcatggagaagaaggcagctcggccccacgcccggcgctggccagcgcgacgaggcccagaggggcgggggagtccaagcccgcccggcccggctgctcctggggggcgctttcctgcccctcccctcctctgctccttcctgcatggacctctgccgttcctgctcctgctccggaagccgccgccgccgccgcgcttgccttgccccctctttttggcctccccctatttcctaggatccgcattcgggtggactctgccccaggagcttgacagggtgcagggcctcttctggcctctctcctctctctgtccatccactgtgccccttgggccacgccgacgcgctcggtgccacgtgccgtgtggtgtctgtgccgcagacgggccatctgcccgctcacttgtggactttgcgctcccggttgtcgcgccctgtgctcccgaccagcagccccaccgtccacctcctcgcccccgcttctcttacgcccccgccccgggcgtgctcctcgcgccctcggcctctctgtccttgctcttttgtaaggggcgggcccggctcagtgacctgtgctgctctgtatggtgccgtgtgtaagaataaacccgttggaatactcgtggtctcagttccttcccgtcccgccgccccggcccgacccactgctagggctgcccaggaggagggaggcaggagggaggccgggaagtccaggtgggcagctctcggcagaccctgggcctctttaacacgcctcttgttttctcttccagtctcggaagggtgctgacctggaccgggagaagaaggctgccgagtgcaaggtggacagcatcgggagcggccgcgccatccccatcaagcaggggatcctgctaaagcggagcggcaagtccctgaacaaggagtggaagaagaagtatgtgacgctctgtgacaacgggctgctcacctatcaccccagcctgcatgattacatgcagaacatccacggcaaggagattgacctgctgcggacaacggtgaaagtgccagggaagcgcctgccccgagccacacctgccacagccccgggcaccagcccccgtgccaacgggctgtccgtggagcggagtaacacacagctgggtgggggcacagcagggagccagaggacagctgggctgtttccctagagcaagggaaacgagaagacgctgtcctgtcccgttcctgtccctgacatccctcacctgggagcggcagtggcatggaggagacagccccgtgccctcgctcctgtaatgacagcgcccacacgcaggagctcgcggacggtgcccacccagcccgcgtcccgctgccgcatgccgacgccgacaccgaccctcgtgcacactcacacatgtctctcactcaccgggcgatgttaacatctcattatctttgttactgtaattacattatccgctgctttatgcagaattatcctccgagga

SEQ ID NO: 315616 - DNA, 2535 bp, Homo sapiens
gccatgaacttccaggcgggcggggggcagagcccgcagcagcagcagcagctggccggcgggcccccccagcagttcgcgctctccaactccgcggccatccgggccgagatccagcgcttcgagtccgtgcatcccaatatctacgccatctacgacctgatcgagcgcatcgaggatttggcgctgcagaaccagatccgggagcacgtcatctccatcgaggactcgtttgtgaacagccaggagtggacgctgagccgctccgtaccggagcttaaagtgggcatagtggggaacctgtctagcgggaagtcagccctggtgcaccgctatctgacggggacctatgtccaggaggagtcccctgaaggggggcggtttaagaaggagattgtggtggatggccagagttacctgctgctgatccgagatgaaggaggcccccctgagctccagtttgctgcctgggtggatgcagtggtgtttgtgttcagcctggaggatgaaatcagtttccagacggtgtacaactacttcctgcgtctctgcagcttccgcaacgccagcgaggtgcccatggtgcttgtgggcacgcaggatgccatcagcgctgcgaatccccgggttatcgacgacagcagagcccgcaagctctccacagatctgaagcggtgcacctactatgagacgtgcgcgacctacgggctcaatgtggagcgtgtcttccaggacgtggcccagaaggtagtggccttgcgaaagaagcagcaactggccatcgggccctgcaagtcactgcccaactcgcccagccactcggccgtgtccgccgcctccatcccggccgtgcacatcaaccaggccacgaatggcggcggcagcgccttcagcgactactcgtcctcagtcccctccacccccagcatcagccagcgggagctgcgcatcgagaccatcgctgcctcctccacccccacacccatccgaaagcagtccaagcggcgctccaacatcttcacgatatgtgccactgtttccaacttttcatcaacaaaaaggcctttccaactccttccaaattagaagaccagttggtgacacacagcacctctggacatgccccctgtgcggggccggaggcgggccgggccctgggactgctctcagatgagaagcggccgcgagctccccactccagagacccacgggaacctttgtaactaaccccacccccagggaaggctaggagcgccggagcccgcgctgggggctgccggggaccaggcccggccggacgctgcaggctcgctgcatggagaagaaggcagctcggccccacgcccggcgctggccagcgcgacgaggcccagaggggcgggggagtccaagcccgcccggcccggctgctcctggggggcgctttcctgcccctcccctcctctgctccttcctgcatggacctctgccgttcctgctcctgctccggaagccgccgccgccgccgcgcttgccttgccccctctttttggcctccccctatttcctaggatccgcattcgggtggactctgccccaggagcttgacagggtgcagggcctcttctggcctctctcctctctctgtccatccactgtgccccttgggccacgccgacgcgctcggtgccacgtgccgtgtggtgtctgtgccgcagacgggccatctgcccgctcacttgtggactttgcgctcccggttgtcgcgccctgtgctcccgaccagcagccccaccgtccacctcctcgcccccgcttctcttacgcccccgccccgggcgtgctcctcgcgccctcggcctctctgtccttgctcttttgtaaggggcgggcccggctcagtgacctgtgctgctctgtatggtgccgtgtgtaagaataaacccgttggaatactcgtggtctcagttccttcccgtcccgccgccccggcccgacccactgctagggctgcccaggaggagggaggcaggagggaggccgggaagtccaggtgggcagctctcggcagaccctgggcctctttaacacgcctcttgttttctcttccagtctcggaagggtgctgacctggaccgggagaagaaggctgccgagtgcaaggtggacagcatcgggagcggccgcgccatccccatcaagcaggggatcctgctaaagcggagcggcaagtccctgaacaaggagtggaagaagaagtatgtgacgctctgtgacaacgggctgctcacctatcaccccagcctgcatcaagggtctcgcctgagccccaagggcatcgggactggtgactcacctatggatgggggccggggagacaggacacacagaagatgagttcgtgggccagccctgagccccgcgcccgattctcgccggcccaagagagcccgccgcagcctcccccattttgcagccagcggagccattcacacaatcaccttctgttaattctatctgcaacatcaattaaattgtttgtagaaactaattgaa

SEQ ID NO: 315617 - DNA, 318 bp, Homo sapiens
gttcggcctgtgccccgccctgcccttcctgtccccaccatgtctgtcttgcctctgtgcgtcctgccacttctgctggcctcctgctcacacctgtccaccttcctctggcctcccagccttgcatgttgcttggaaacattggttggaattccatttagccggcaccgtagccttggcctcatccctgccccacggtgcctgccccttcccgctgcaatccccacttctctctgctctccaccattccacagcctgcattccctaccccgatgccctctgctgaaagtcctgggccatccacaggtggcatggtca

SEQ ID NO: 315618 - DNA, 265 bp, Homo sapiens
cttgctggttgggactgggagaggtggtatgtccagggagaagggtctacttgagttcacctgccctgcatgggagtttgccaggtccagttgcgggtgctaattttacttgctctaccctagtttgctgcctgggtggatgcagtggtgtttgtgttcagcctggaggatgaaatcagtttccagacggtgtacaactacttcctgcgtctctgcagcttccgcaacgccagcgaggtgcccatggtgcttgtgggcacgcagg

SEQ ID NO: 315619 - DNA, 550 bp, Homo sapiens
gggaggagcatcactgatggccactatctacacccctgagcgtctactcctggccgtctatacccctgactgtctacacctccgatcatctacacccgacggtctacacccctgacaggcttctcctgtcgaggtggctccacacactggggagggaagacgcccacctgccggaacagcggtccagctgcttcctgatggatgatgggggagagccgagttctggggaaggactggtctaaggggccttcccaagttcaccgataggtccttaaaggctgctttgctcaaagtggcccaggagaagcggggaggggggagggcattgcctgacgacatcgtgacctcctcatgccctatgacctagggggctggctcctggtttctgatcagacctctgttctcaggggatcctgctaaagcggagcggcaagtccctgaacaaggagtggaagaagaagtatgtgacgctctgtgacaacgggctgctcacctatcaccccagcctgcatgtgagtctgggaggaggagcctcctgggggagtatggg

SEQ ID NO: 315620 - DNA, 3123 bp, Homo sapiens
gccatgaacttccaggcgggcggggggcagagcccgcagcagcagcagcagctggccggcgggcccccccagcagttcgcgctctccaactccgcggccatccgggccgagatccagcgcttcgagtccgtgcatcccaatatctacgccatctacgacctgatcgagcgcatcgaggatttggcgctgcagaaccagatccgggagcacgtcatctccatcgaggactcgtttgtgaacagccaggagtggacgctgagccgctccgtaccggagcttaaagtgggcatagtggggaacctgtctagcgggaagtcagccctggtgcaccgctatctgacggggacctatgtccaggaggagtcccctgaaggggggcggtttaagaaggagattgtggtggatggccagagttacctgctgctgatccgagatgaaggaggcccccctgagctccagtttgctgcctgggtggatgcagtggtgtttgtgttcagcctggaggatgaaatcagtttccagacggtgtacaactacttcctgcgtctctgcagcttccgcaacgccagcgaggtgcccatggtgcttgtgggcacgcaggatgccatcagcgctgcgaatccccgggttatcgacgacagcagagcccgcaagctctccacagatctgaagcggtgcacctactatgagacgtgcgcgacctacgggctcaatgtggagcgtgtcttccaggacgtggcccagaaggtagtggccttgcgaaagaagcagcaactggccatcgggccctgcaagtcactgcccaactcgcccagccactcggccgtgtccgccgcctccatcccggccgtgcacatcaaccaggccacgaatggcggcggcagcgccttcagcgactactcgtcctcagtcccctccacccccagcatcagccagcgggagctgcgcatcgagaccatcgctgcctcctccacccccacacccatccgaaagcagtccaagcggcgctccaacatcttcacgtctcggaagggtgctgacctggaccgggagaagaaggctgccgagtgcaaggtggacagcatcgggagcggccgcgccatccccatcaagcaggggatcctgctaaagcggagcggcaagtccctgaacaaggagtggaagaagaagtatgtgacgctctgtgacaacgggctgctcacctatcaccccagcctgcatgattacatgcagaacatccacggcaaggagattgacctgctgcggacaacggtgaaagtgccagggaagcgcctgccccgagccacacctgccacagccccgggcaccagcccccgtgccaacgggctgtccgtggagcggagtaacacacagctgggtgggggcacaggtgccccccactcggccagcagcgcatccctgcactctgagcgccccctcagcagctcggcctgggctggcccgcgccctgaggggctgcaccagcgctcctgctccgtttccagcgccgaccagtggagtgaggccaccacttccctgcccccaggcatgcagcaccctgccagtggcccagctgaggtactcagttccagccccaagctggatcctcccccatctccccactccaaccggaagaagcaccggaggaaaaagagcaccgggaccccccgaccagacggccccagcagtgctactgaagaggcagaggagtcgtttgaatttgtggtggtgtccctcactgggcagacgtggcacttcgaggcttcaacggcggaggagcgggagctgtgggttcagagtgtgcaggcccagatccttgccagcctgcaaggctgccgcagtgccaaggacaagactcgactggggaaccagaacgcagctctggctgtgcaggccgtccgcaccgtccgcggcaacagcttttgtatcgactgcgatgcacccaatccagactgggccagcctgaacctgggtgccctgatgtgcattgagtgctcaggcatccaccgacacctgggggctcacctgtcccgggtgcgctcccttgacctcgatgactggccgcctgagctgctggctgtcatgactgccatgggcaatgccctcgccaacagcgtctgggagggggccttgggtggctactccaagccagggcctgatgcctgcagagaggagaaggaacgctggatacgggccaagtatgaacagaagctcttcctggccccactgccaagctcagatgtgccactggggcagcagctgctccgggccgtggtggaagatgacctgcggctgttggtgatgctcctggcacatggctccaaagaggaggtgaatgagacctatggggacggggacgggcggacggctctacatctctccagtgccatggccaacgttgtcttcacgcagctgctcatctggtacggggtggacgtgaggagccgggacgcccggggcctgactccactggcatatgctcgccgggccggcagccaggagtgtgcagacatcttgatccagcatggctgccctggggagggctgtggcttagcgcctacccccaacagagagcctgccaatggcaccaacccctctgctgagctgcaccgtagtcctagcctcctataaggcccaggaagagggcagaggggccagaaggactccatggcccaaagaccctcctccctgcaggcactgtgggaacagacacagagatggagaagcagggacatgctgagaggacgaagccaaggaaattagggaggagagtcaaagggatcaaggagagttggggatttgagctgcagcagagagggatgagggatttagccctctgccctaaggtgccattgaaaagggacaggacccttcggaggtgcctgtgaggagaggggagcaggacctctccctcctccagatccctgcctcctagtgccagcccctcacacgccttcatcctgaaacaggaagaggacggcaccaagttgggggtgctggatgaaagagacgaggggtgatctgtgagtcccatgtaaactttgtacattggaatatttatgtttgtgtacatatttgatgtgtgtgtgtatgatgagccaataaaccagactgtgtgcgtgg

SEQ ID NO: 315621 - DNA, 571 bp, Homo sapiens
tgtatatcgatgccactatcagaggaggcattttctgagtgcagcccactcacatgcaacaactcattcctgctcaacccatttatttctacacaaatggatattcgggactttcaaatagttcatccagctgagcgtggtggctcaggcctgtaatcccagcacttcgggaggccgaggcaggtggatcatctgaggtggggagtttgaggccagcctggccaacatggtgaaaccccgtttccactaaaaatacaaaaatgagcggggtgtgctgatgtgcattgagtgctcaggcatccaccgacacctgggggctcacctgtcccgggtgcgctcccttgacctcgatgactggccgcctgagctgctggctgtcatgactgccatgggcaatgccctcgccaacagcgtctgggagggggccttgggtggcatcgataaacagcggtgtttatcgatgccactcaaagtaaagataagcaaaaaaagtatataaataaaaatccatcaaaagcacaaacagggtctggcacctgtatgagaagaagctatgaacatcgggtaccga

SEQ ID NO: 315622 - DNA, 4191 bp, Homo sapiens
gccatgaacttccaggcgggcggggggcagagcccgcagcagcagcagcagctggccggcgggcccccccagcagttcgcgctctccaactccgcggccatccgggccgagatccagcgcttcgagtccgtgcatcccaatatctacgccatctacgacctgatcgagcgcatcgaggatttggcgctgcagaaccagatccgggagcacgtcatctccatcgaggactcgtttgtgaacagccaggagtggacgctgagccgctccgtaccggagcttaaagtgggcatagtggggaacctgtctagcgggaagtcagccctggtgcaccgctatctgacggggacctatgtccaggaggagtcccctgaaggggggcggtttaagaaggagattgtggtggatggccagagttacctgctgctgatccgagatgaaggaggcccccctgagctccagtttgctgcctgggtggatgcagtggtgtttgtgttcagcctggaggatgaaatcagtttccagacggtgtacaactacttcctgcgtctctgcagcttccgcaacgccagcgaggtgcccatggtgcttgtgggcacgcaggatgccatcagcgctgcgaatccccgggttatcgacgacagcagagcccgcaagctctccacagatctgaagcggtgcacctactatgagacgtgcgcgacctacgggctcaatgtggagcgtgtcttccaggacgtggcccagaaggtagtggccttgcgaaagaagcagcaactggccatcgggccctgcaagtcactgcccaactcgcccagccactcggccgtgtccgccgcctccatcccggccgtgcacatcaaccaggccacgaatggcggcggcagcgccttcagcgactactcgtcctcagtcccctccacccccagcatcagccagcgggagctgcgcatcgagaccatcgctgcctcctccacccccacacccatccgaaagcagtccaagcggcgctccaacatcttcacgatatgtgccactgtttccaacttttcatcaacaaaaaggcctttccaactccttccaaattagaagaccagttggtgacacacagcacctctggacatgccccctgtgcggggccggaggcgggccgggccctgggactgctctcagatgagaagcggccgcgagctccccactccagagacccacgggaacctttgtaactaaccccacccccagggaaggctaggagcgccggagcccgcgctgggggctgccggggaccaggcccggccggacgctgcaggctcgctgcatggagaagaaggcagctcggccccacgcccggcgctggccagcgcgacgaggcccagaggggcgggggagtccaagcccgcccggcccggctgctcctggggggcgctttcctgcccctcccctcctctgctccttcctgcatggacctctgccgttcctgctcctgctccggaagccgccgccgccgccgcgcttgccttgccccctctttttggcctccccctatttcctaggatccgcattcgggtggactctgccccaggagcttgacagggtgcagggcctcttctggcctctctcctctctctgtccatccactgtgccccttgggccacgccgacgcgctcggtgccacgtgccgtgtggtgtctgtgccgcagacgggccatctgcccgctcacttgtggactttgcgctcccggttgtcgcgccctgtgctcccgaccagcagccccaccgtccacctcctcgcccccgcttctcttacgcccccgccccgggcgtgctcctcgcgccctcggcctctctgtccttgctcttttgtaaggggcgggcccggctcagtgacctgtgctgctctgtatggtgccgtgtgtaagaataaacccgttggaatactcgtggtctcagttccttcccgtcccgccgccccggcccgacccactgctagggctgcccaggaggagggaggcaggagggaggccgggaagtccaggtgggcagctctcggcagaccctgggcctctttaacacgcctcttgttttctcttccagtctcggaagggtgctgacctggaccgggagaagaaggctgccgagtgcaaggtggacagcatcgggagcggccgcgccatccccatcaagcaggggatcctgctaaagcggagcggcaagtccctgaacaaggagtggaagaagaagtatgtgacgctctgtgacaacgggctgctcacctatcaccccagcctgcatgattacatgcagaacatccacggcaaggagattgacctgctgcggacaacggtgaaagtgccagggaagcgcctgccccgagccacacctgccacagccccgggcaccagcccccgtgccaacgggctgtccgtggagcggagtaacacacagctgggtgggggcacaggtgccccccactcggccagcagcgcatccctgcactctgagcgccccctcagcagctcggcctgggctggcccgcgccctgaggggctgcaccagcgctcctgctccgtttccagcgccgaccagtggagtgaggccaccacttccctgcccccaggcatgcagcaccctgccagtggcccagctgaggtactcagttccagccccaagctggatcctcccccatctccccactccaaccggaagaagcaccggaggaaaaagagcaccgggaccccccgaccagacggccccagcagtgctactgaagaggcagaggagtcgtttgaatttgtggtggtgtccctcactgggcagacgtggcacttcgaggcttcaacggcggaggagcgggagctgtgggttcagagtgtgcaggcccagatccttgccagcctgcaaggctgccgcagtgccaaggacaagactcgactggggaaccagaacgcagctctggctgtgcaggccgtccgcaccgtccgcggcaacagcttttgtatcgactgcgatgcacccaatccagactgggccagcctgaacctgggtgccctgatgtgcattgagtgctcaggcatccaccgacacctgggggctcacctgtcccgggtgcgctcccttgacctcgatgactggccgcctgagctgctggctgtcatgactgccatgggcaatgccctcgccaacagcgtctgggagggggccttgggtggctactccaagccagggcctgatgcctgcagagaggagaaggaacgctggatacgggccaagtatgaacagaagctcttcctggccccactgccaagctcagatgtgccactggggcagcagctgctccgggccgtggtggaagatgacctgcggctgttggtgatgctcctggcacatggctccaaagaggaggtgaatgagacctatggggacggggacgggcggacggctctacatctctccagtgccatggccaacgttgtcttcacgcagctgctcatctggtacggggtggacgtgaggagccgggacgcccggggcctgactccactggcatatgctcgccgggccggcagccaggagtgtgcagacatcttgatccagcatggctgccctggggagggctgtggcttagcgcctacccccaacagagagcctgccaatggcaccaacccctctgctgagctgcaccgtagtcctagcctcctataaggcccaggaagagggcagaggggccagaaggactccatggcccaaagaccctcctccctgcaggcactgtgggaacagacacagagatggagaagcagggacatgctgagaggacgaagccaaggaaattagggaggagagtcaaagggatcaaggagagttggggatttgagctgcagcagagagggatgagggatttagccctctgccctaaggtgccattgaaaagggacaggacccttcggaggtgcctgtgaggagaggggagcaggacctctccctcctccagatccctgcctcctagtgccagcccctcacacgccttcatcctgaaacaggaagaggacggcaccaagttgggggtgctggatgaaagagacgaggggtgatctgtgagtcccatgtaaactttgtacattggaatatttatgtttgtgtacatatttgatgtgtgtgtgtatgatgagccaataaaccagactgtgtgcgtgg

SEQ ID NO: 315623 - DNA, 3425 bp, Homo sapiens
gtctgcggcgggcagttcggcggcgcggggcccggggccgggggcggcggcggcccctcgcagcagctggccggcgggcccccccagcagttcgcgctctccaactccgcggccatccgggccgagatccagcgcttcgagtccgtgcatcccaatatctacgccatctacgacctgatcgagcgcatcgaggatttggcgctgcagaaccagatccgggagcacgtcatctccatcgaggactcgtttgtgaacagccaggagtggacgctgagccgctccgtaccggagcttaaagtgggcatagtggggaacctgtctagcgggaagtcagccctggtgcaccgctatctgacggggacctatgtccaggaggagtcccctgaaggggggcggtttaagaaggagattgtggtggatggccagagttacctgctgctgatccgagatgaaggaggcccccctgagctccagtttgctgcctgggtggatgcagtggtgtttgtgttcagcctggaggatgaaatcagtttccagacggtgtacaactacttcctgcgtctctgcagcttccgcaacgccagcgaggtgcccatggtgcttgtgggcacgcaggatgccatcagcgctgcgaatccccgggttatcgacgacagcagagcccgcaagctctccacagatctgaagcggtgcacctactatgagacgtgcgcgacctacgggctcaatgtggagcgtgtcttccaggacgtggcccagaaggtagtggccttgcgaaagaagcagcaactggccatcgggccctgcaagtcactgcccaactcgcccagccactcggccgtgtccgccgcctccatcccggccgtgcacatcaaccaggccacgaatggcggcggcagcgccttcagcgactactcgtcctcagtcccctccacccccagcatcagccagcgggagctgcgcatcgagaccatcgctgcctcctccacccccacacccatccgaaagcagtccaagcggcgctccaacatcttcacgtctcggaagggtgctgacctggaccgggagaagaaggctgccgagtgcaaggtggacagcatcgggagcggccgcgccatccccatcaagcaggggatcctgctaaagcggagcggcaagtccctgaacaaggagtggaagaagaagtatgtgacgctctgtgacaacgggctgctcacctatcaccccagcctgcatgattacatgcagaacatccacggcaaggagattgacctgctgcggacaacggtgaaagtgccagggaagcgcctgccccgagccacacctgccacagccccgggcaccagcccccgtgccaacgggctgtccgtggagcggagtaacacacagctgggtgggggcacaggtgccccccactcggccagcagcgcatccctgcactctgagcgccccctcagcagctcggcctgggctggcccgcgccctgaggggctgcaccagcgctcctgctccgtttccagcgccgaccagtggagtgaggccaccacttccctgcccccaggcatgcagcaccctgccagtggcccagctgaggtactcagttccagccccaagctggatcctcccccatctccccactccaaccggaagaagcaccggaggaaaaagagcaccgggaccccccgaccagacggccccagcagtgctactgaagaggcagaggagtcgtttgaatttgtggtggtgtccctcactgggcagacgtggcacttcgaggcttcaacggcggaggagcgggagctgtgggttcagagtgtgcaggcccagatccttgccagcctgcaaggctgccgcagtgccaaggacaagactcgactggggaaccagaacgcagctctggctgtgcaggccgtccgcaccgtccgcggcaacagcttttgtatcgactgcgatgcacccaatccagactgggccagcctgaacctgggtgccctgatgtgcattgagtgctcaggcatccaccgacacctgggggctcacctgtcccgggtgcgctcccttgacctcgatgactggccgcctgagctgctggctgtcatgactgccatgggcaatgccctcgccaacagcgtctgggagggggccttgggtggctactccaagccagggcctgatgcctgcagagaggagaaggaacgctggatacgggccaagtatgaacagaagctcttcctggccccactgccaagctcagatgtgccactggggcagcagctgctccgggccgtggtggaagatgacctgcggctgttggtgatgctcctggcacatggctccaaagaggaggtgaatgagacctatggggacggggacgggcggacggctctacatctctccagtgccatggccaacgttgtcttcacgcagctgctcatctggtacggggtggacgtgaggagccgggacgcccggggcctgactccactggcatatgctcgccgggccggcagccaggagtgtgcagacatcttgatccagcatggctgccctggggagggctgtggcttagcgcctacccccaacagagagcctgccaatggcaccaacccctctgctgagctgcaccgtagtcctagcctcctataaggcccaggaagagggcagaggggccagaaggactccatggcccaaagaccctcctccctgcaggcactgtgggaacagacacagagatggagaagcagggacatgctgagaggacgaagccaaggaaattagggaggagagtcaaagggatcaaggagagttggggatttgagctgcagcagagagggatgagggatttagccctctgccctaaggtgccattgaaaagggacaggacccttcggaggtgcctgtgaggagaggggagcaggacctctccctcctccagatccctgcctcctagtgccagcccctcacacgccttcatcctgaaacaggaagaggacggcaccaagttgggggtgctggatgaaagagacgaggggtgatctgtgagtcccatgtaaactttgtacattggaatatttatgtttgtgtacatatttgatgtgtgtgtgtatgatgagccaataaaccagactgtgtgcgtggaaaaaaaaaaaaaaacaaaagggggggggaaaaaaaattcccgaggggccaagttagggtaaccagattctggcacgagggggccccaaaaggaggacgcgaaaaagaccaaggcacggggccgcgcgataaccacgcggaccgggaaaaccggacagcgcggacacggggagagaacccatacccgggggggaccagtggcccacaccagcgagaataagggcagggcacataccgtcacgcaatcagggaacagcgcactcaccagaagtgcccgcagcaggatc

SEQ ID NO: 315624 - DNA, 4463 bp, Homo sapiens
gtctgcggcgggcagttcggcggcgcggggcccggggccgggggcggcggcggcccctcgcagcagctggccggcgggcccccccagcagttcgcgctctccaactccgcggccatccgggccgagatccagcgcttcgagtccgtgcatcccaatatctacgccatctacgacctgatcgagcgcatcgaggatttggcgctgcagaaccagatccgggagcacgtcatctccatcgaggactcgtttgtgaacagccaggagtggacgctgagccgctccgtaccggagcttaaagtgggcatagtggggaacctgtctagcgggaagtcagccctggtgcaccgctatctgacggggacctatgtccaggaggagtcccctgaaggggggcggtttaagaaggagattgtggtggatggccagagttacctgctgctgatccgagatgaaggaggcccccctgagctccagtttgctgcctgggtggatgcagtggtgtttgtgttcagcctggaggatgaaatcagtttccagacggtgtacaactacttcctgcgtctctgcagcttccgcaacgccagcgaggtgcccatggtgcttgtgggcacgcaggatgccatcagcgctgcgaatccccgggttatcgacgacagcagagcccgcaagctctccacagatctgaagcggtgcacctactatgagacgtgcgcgacctacgggctcaatgtggagcgtgtcttccaggacgtgggtataattgactctgctgtcccctgcagtggcccagaaggtagtggccttgcgaaagaagcagcaactggccatcgggccctgcaagtcactgcccaactcgcccagccactcggccgtgtccgccgcctccatcccggccgtgcacatcaaccaggccacgaatggcggcggcagcgccttcagcgactactcgtcctcagtcccctccacccccagcatcagccagcgggagctgcgcatcgagaccatcgctgcctcctccacccccacacccatccgaaagcagtccaagcggcgctccaacatcttcacgctaatgaaccggcggccggaaggctgtttgcccaaggcgacacagagggttagctggcccagctagagtcagagcccaggcctccccgtcgccttccggctctttttccgttaccccactgccgaggggaaaattcatgctttccacccaccgctgtgattggtttaacaaaggcttagccatcttttcctgggcttcaccacgctgcctcgttcctccctctcagatatgtgccactgtttccaacttttcatcaacaaaaaggcctttccaactccttccaaattagaagaccagttggtgacacacagcacctctggacatgccccctgtgcggggccggaggcgggccgggccctgggactgctctcagatgagaagcggccgcgagctccccactccagagacccacgggaacctttgtaactaaccccacccccagggaaggctaggagcgccggagcccgcgctgggggctgccggggaccaggcccggccggacgctgcaggctcgctgcatggagaagaaggcagctcggccccacgcccggcgctggccagcgcgacgaggcccagaggggcgggggagtccaagcccgcccggcccggctgctcctggggggcgctttcctgcccctcccctcctctgctccttcctgcatggacctctgccgttcctgctcctgctccggaagccgccgccgccgccgcgcttgccttgccccctctttttggcctccccctatttcctaggatccgcattcgggtggactctgccccaggagcttgacagggtgcagggcctcttctggcctctctcctctctctgtccatccactgtgccccttgggccacgccgacgcgctcggtgccacgtgccgtgtggtgtctgtgccgcagacgggccatctgcccgctcacttgtggactttgcgctcccggttgtcgcgccctgtgctcccgaccagcagccccaccgtccacctcctcgcccccgcttctcttacgcccccgccccgggcgtgctcctcgcgccctcggcctctctgtccttgctcttttgtaaggggcgggcccggctcagtgacctgtgctgctctgtatggtgccgtgtgtaagaataaacccgttggaatactcgtggtctcagttccttcccgtcccgccgccccggcccgacccactgctagggctgcccaggaggagggaggcaggagggaggccgggaagtccaggtgggcagctctcggcagaccctgggcctctttaacacgcctcttgttttctcttccagtctcggaagggtgctgacctggaccgggagaagaaggctgccgagtgcaaggtggacagcatcgggagcggccgcgccatccccatcaagcaggggatcctgctaaagcggagcggcaagtccctgaacaaggagtggaagaagaagtatgtgacgctctgtgacaacgggctgctcacctatcaccccagcctgcatgattacatgcagaacatccacggcaaggagattgacctgctgcggacaacggtgaaagtgccagggaagcgcctgccccgagccacacctgccacagccccgggcaccagcccccgtgccaacgggctgtccgtggagcggagtaacacacagctgggtgggggcacaggtgccccccactcggccagcagcgcatccctgcactctgagcgccccctcagcagctcggcctgggctggcccgcgccctgaggggctgcaccagcgctcctgctccgtttccagcgccgaccagtggagtgaggccaccacttccctgcccccaggcatgcagcaccctgccagtggcccagctgaggtactcagttccagccccaagctggatcctcccccatctccccactccaaccggaagaagcaccggaggaaaaagagcaccgggaccccccgaccagacggccccagcagtgctactgaagaggcagaggagtcgtttgaatttgtggtggtgtccctcactgggcagacgtggcacttcgaggcttcaacggcggaggagcgggagctgtgggttcagagtgtgcaggcccagatccttgccagcctgcaaggctgccgcagtgccaaggacaagactcgactggggaaccagaacgcagctctggctgtgcaggccgtccgcaccgtccgcggcaacagcttttgtatcgactgcgatgcacccaatccagactgggccagcctgaacctgggtgccctgatgtgcattgagtgctcaggcatccaccgacacctgggggctcacctgtcccgggtgcgctcccttgacctcgatgactggccgcctgagctgctggctgtcatgactgccatgggcaatgccctcgccaacagcgtctgggagggggccttgggtggctactccaagccagggcctgatgcctgcagagaggagaaggaacgctggatacgggccaagtatgaacagaagctcttcctggccccactgccaagctcagatgtgccactggggcagcagctgctccgggccgtggtggaagatgacctgcggctgttggtgatgctcctggcacatggctccaaagaggaggtgaatgagacctatggggacggggacgggcggacggctctacatctctccagtgccatggccaacgttgtcttcacgcagctgctcatctggtacggggtggacgtgaggagccgggacgcccggggcctgactccactggcatatgctcgccgggccggcagccaggagtgtgcagacatcttgatccagcatggctgccctggggagggctgtggcttagcgcctacccccaacagagagcctgccaatggcaccaacccctctgctgagctgcaccgtagtcctagcctcctataaggcccaggaagagggcagaggggccagaaggactccatggcccaaagaccctcctccctgcaggcactgtgggaacagacacagagatggagaagcagggacatgctgagaggacgaagccaaggaaattagggaggagagtcaaagggatcaaggagagttggggatttgagctgcagcagagagggatgagggatttagccctctgccctaaggtgccattgaaaagggacaggacccttcggaggtgcctgtgaggagaggggagcaggacctctccctcctccagatccctgcctcctagtgccagcccctcacacgccttcatcctgaaacaggaagaggacggcaccaagttgggggtgctggatgaaagagacgaggggtgatctgtgagtcccatgtaaactttgtacattggaatatttatgtttgtgtacatatttgatgtgtgtgtgtatgatgagccaataaaccagactgtgtgcgtgg

SEQ ID NO: 315625 - DNA, 3050 bp, Homo sapiens
gtctgcggcgggcagttcggcggcgcggggcccggggccgggggcggcggcggcccctcgcagcagctggccggcgggcccccccagcagttcgcgctctccaactccgcggccatccgggccgagatccagcgcttcgagtccgtgcatcccaatatctacgccatctacgacctgatcgagcgcatcgaggatttggcgctgcagaaccagatccgggagcacgtcatctccatcgaggactcgtttgtgaacagccaggagtggacgctgagccgctccgtaccggagcttaaagtgggcatagtggggaacctgtctagcgggaagtcagccctggtgcaccgctatctgacggggacctatgtccaggaggagtcccctgaaggggggcggtttaagaaggagattgtggtggatggccagagttacctgctgctgatccgagatgaaggaggcccccctgagctccagtttgctgcctgggtggatgcagtggtgtttgtgttcagcctggaggatgaaatcagtttccagacggtgtacaactacttcctgcgtctctgcagcttccgcaacgccagcgaggtgcccatggtgcttgtgggcacgcaggatgccatcagcgctgcgaatccccgggttatcgacgacagcagagcccgcaagctctccacagatctgaagcggtgcacctactatgagacgtgcgcgacctacgggctcaatgtggagcgtgtcttccaggacgtggcccagaaggtagtggccttgcgaaagaagcagcaactggccatcgggccctgcaagtcactgcccaactcgcccagccactcggccgtgtccgccgcctccatcccggccgtgcacatcaaccaggccacgaatggcggcggcagcgccttcagcgactactcgtcctcagtcccctccacccccagcatcagccagcgggagctgcgcatcgagaccatcgctgcctcctccacccccacacccatccgaaagcagtccaagcggcgctccaacatcttcacgtctcggaagggtgctgacctggaccgggagaagaaggctgccgagtgcaaggtggacagcatcgggagcggccgcgccatccccatcaagcaggggatcctgctaaagcggagcggcaagtccctgaacaaggagtggaagaagaagtatgtgacgctctgtgacaacgggctgctcacctatcaccccagcctgcatgattacatgcagaacatccacggcaaggagattgacctgctgcggacaacggtgaaagtgccagggaagcgcctgccccgagccacacctgccacagccccgggcaccagcccccgtgccaacgggctgtccgtggagcggagtaacacacagctgggtgggggcacaggtgccccccactcggccagcagcgcatccctgcactctgagcgccccctcagcagctcggcctgggctggcccgcgccctgaggggctgcaccagcgctcctgctccgtttccagcgccgaccagtggagtgaggccaccacttccctgcccccaggcatgcagcaccctgccagtggcccagctgaggtactcagttccagccccaagctggatcctcccccatctccccactccaaccggaagaagcaccggaggaaaaagagcaccgggaccccccgaccagacggccccagcagtgctactgaagaggcagaggagtcgtttgaatttgtggtggtgtccctcactgggcagacgtggcacttcgaggcttcaacggcggaggagcgggagctgtgggttcagagtgtgcaggcccagatccttgccagcctgcaaggctgccgcagtgccaaggacaagactcgactggggaaccagaacgcagctctggctgtgcaggccgtccgcaccgtccgcggcaacagcttttgtatcgactgcgatgcacccaatccagactgggccagcctgaacctgggtgccctgatgtgcattgagtgctcaggcatccaccgacacctgggggctcacctgtcccgggtgcgctcccttgacctcgatgactggccgcctgagctgctggctgtcatgactgccatgggcaatgccctcgccaacagcgtctgggagggggccttgggtggctactccaagccagggcctgatgcctgcagagaggagaaggaacgctggatacgggccaagtatgaacagaagctcttcctggccccactgccaagctcagatgtgccactggggcagcagctgctccgggccgtggtggaagatgacctgcggctgttggtgatgctcctggcacatggctccaaagaggaggtgaatgagacctatggggacggggacgggcggacggctctacatctctccagtgccatggccaacgttgtcttcacgcagctgctcatctggtacggggtggacgtgaggagccgggacgcccggggcctgactccactggcatatgctcgccgggccggcagccaggagtgtgcagacatcttgatccagcatggctgccctggggagggctgtggcttagcgcctacccccaacagagagcctgccaatggcaccaacccctctgctgagctgcaccgtagtcctagcctcctataaggcccaggaagagggcagaggggccagaaggactccatggcccaaagaccctcctccctgcaggcactgtgggaacagacacagagatggagaagcagggatgagggatttagccctctgccctaaggtgccattgaaaagggacaggacccttcggaggtgcctgtgaggagaggggagcaggacctctccctcctccagatccctgcctcctagtgccagcccctcacacgccttcatcctgaaacaggaagaggacggcaccaagttgggggtgctggatgaaagagacgaggggtgatctgtgagtcccatgtaaactttgtacattggaatatttatgtttgtgtacatatttgatgtgtgtgtgtatgatgagccaataaaccagactgtgtgcgtgg

SEQ ID NO: 315626 - DNA, 4237 bp, Homo sapiens
gtctgcggcgggcagttcggcggcgcggggcccggggccgggggcggcggcggcccctcgcagcagctggccggcgggcccccccagcagttcgcgctctccaactccgcggccatccgggccgagatccagcgcttcgagtccgtgcatcccaatatctacgccatctacgacctgatcgagcgcatcgaggatttggcgctgcagaaccagatccgggagcacgtcatctccatcgaggactcgtttgtgaacagccaggagtggacgctgagccgctccgtaccggagcttaaagtgggcatagtggggaacctgtctagcgggaagtcagccctggtgcaccgctatctgacggggacctatgtccaggaggagtcccctgaaggggggcggtttaagaaggagattgtggtggatggccagagttacctgctgctgatccgagatgaaggaggcccccctgagctccagtttgctgcctgggtggatgcagtggtgtttgtgttcagcctggaggatgaaatcagtttccagacggtgtacaactacttcctgcgtctctgcagcttccgcaacgccagcgaggtgcccatggtgcttgtgggcacgcaggatgccatcagcgctgcgaatccccgggttatcgacgacagcagagcccgcaagctctccacagatctgaagcggtgcacctactatgagacgtgcgcgacctacgggctcaatgtggagcgtgtcttccaggacgtgggtataattgactctgctgtcccctgcagtggcccagaaggtagtggccttgcgaaagaagcagcaactggccatcgggccctgcaagtcactgcccaactcgcccagccactcggccgtgtccgccgcctccatcccggccgtgcacatcaaccaggccacgaatggcggcggcagcgccttcagcgactactcgtcctcagtcccctccacccccagcatcagccagcgggagctgcgcatcgagaccatcgctgcctcctccacccccacacccatccgaaagcagtccaagcggcgctccaacatcttcacgatatgtgccactgtttccaacttttcatcaacaaaaaggcctttccaactccttccaaattagaagaccagttggtgacacacagcacctctggacatgccccctgtgcggggccggaggcgggccgggccctgggactgctctcagatgagaagcggccgcgagctccccactccagagacccacgggaacctttgtaactaaccccacccccagggaaggctaggagcgccggagcccgcgctgggggctgccggggaccaggcccggccggacgctgcaggctcgctgcatggagaagaaggcagctcggccccacgcccggcgctggccagcgcgacgaggcccagaggggcgggggagtccaagcccgcccggcccggctgctcctggggggcgctttcctgcccctcccctcctctgctccttcctgcatggacctctgccgttcctgctcctgctccggaagccgccgccgccgccgcgcttgccttgccccctctttttggcctccccctatttcctaggatccgcattcgggtggactctgccccaggagcttgacagggtgcagggcctcttctggcctctctcctctctctgtccatccactgtgccccttgggccacgccgacgcgctcggtgccacgtgccgtgtggtgtctgtgccgcagacgggccatctgcccgctcacttgtggactttgcgctcccggttgtcgcgccctgtgctcccgaccagcagccccaccgtccacctcctcgcccccgcttctcttacgcccccgccccgggcgtgctcctcgcgccctcggcctctctgtccttgctcttttgtaaggggcgggcccggctcagtgacctgtgctgctctgtatggtgccgtgtgtaagaataaacccgttggaatactcgtggtctcagttccttcccgtcccgccgccccggcccgacccactgctagggctgcccaggaggagggaggcaggagggaggccgggaagtccaggtgggcagctctcggcagaccctgggcctctttaacacgcctcttgttttctcttccagtctcggaagggtgctgacctggaccgggagaagaaggctgccgagtgcaaggtggacagcatcgggagcggccgcgccatccccatcaagcaggggatcctgctaaagcggagcggcaagtccctgaacaaggagtggaagaagaagtatgtgacgctctgtgacaacgggctgctcacctatcaccccagcctgcatgattacatgcagaacatccacggcaaggagattgacctgctgcggacaacggtgaaagtgccagggaagcgcctgccccgagccacacctgccacagccccgggcaccagcccccgtgccaacgggctgtccgtggagcggagtaacacacagctgggtgggggcacaggtgccccccactcggccagcagcgcatccctgcactctgagcgccccctcagcagctcggcctgggctggcccgcgccctgaggggctgcaccagcgctcctgctccgtttccagcgccgaccagtggagtgaggccaccacttccctgcccccaggcatgcagcaccctgccagtggcccagctgaggtactcagttccagccccaagctggatcctcccccatctccccactccaaccggaagaagcaccggaggaaaaagagcaccgggaccccccgaccagacggccccagcagtgctactgaagaggcagaggagtcgtttgaatttgtggtggtgtccctcactgggcagacgtggcacttcgaggcttcaacggcggaggagcgggagctgtgggttcagagtgtgcaggcccagatccttgccagcctgcaaggctgccgcagtgccaaggacaagactcgactggggaaccagaacgcagctctggctgtgcaggccgtccgcaccgtccgcggcaacagcttttgtatcgactgcgatgcacccaatccagactgggccagcctgaacctgggtgccctgatgtgcattgagtgctcaggcatccaccgacacctgggggctcacctgtcccgggtgcgctcccttgacctcgatgactggccgcctgagctgctggctgtcatgactgccatgggcaatgccctcgccaacagcgtctgggagggggccttgggtggctactccaagccagggcctgatgcctgcagagaggagaaggaacgctggatacgggccaagtatgaacagaagctcttcctggccccactgccaagctcagatgtgccactggggcagcagctgctccgggccgtggtggaagatgacctgcggctgttggtgatgctcctggcacatggctccaaagaggaggtgaatgagacctatggggacggggacgggcggacggctctacatctctccagtgccatggccaacgttgtcttcacgcagctgctcatctggtacggggtggacgtgaggagccgggacgcccggggcctgactccactggcatatgctcgccgggccggcagccaggagtgtgcagacatcttgatccagcatggctgccctggggagggctgtggcttagcgcctacccccaacagagagcctgccaatggcaccaacccctctgctgagctgcaccgtagtcctagcctcctataaggcccaggaagagggcagaggggccagaaggactccatggcccaaagaccctcctccctgcaggcactgtgggaacagacacagagatggagaagcagggacatgctgagaggacgaagccaaggaaattagggaggagagtcaaagggatcaaggagagttggggatttgagctgcagcagagagggatgagggatttagccctctgccctaaggtgccattgaaaagggacaggacccttcggaggtgcctgtgaggagaggggagcaggacctctccctcctccagatccctgcctcctagtgccagcccctcacacgccttcatcctgaaacaggaagaggacggcaccaagttgggggtgctggatgaaagagacgaggggtgatctgtgagtcccatgtaaactttgtacattggaatatttatgtttgtgtacatatttgatgtgtgtgtgtatgatgagccaataaaccagactgtgtgcgtgg

SEQ ID NO: 315627 - DNA, 5521 bp, Homo sapiens
gccatgaacttccaggcgggcggggggcagagcccgcagcagcagcagcagctggccggcgggcccccccagcagttcgcgctctccaactccgcggccatccgggccgagatccagcgcttcgagtccgtgcatcccaatatctacgccatctacgacctgatcgagcgcatcgaggatttggcgctgcagaaccagatccgggagcacgtcatctccatcgaggactcgtttgtgaacagccaggagtggacgctgagccgctccgtaccggagcttaaagtgggcatagtggggaacctgtctagcgggaagtcagccctggtgcaccgctatctgacggggacctatgtccaggaggagtcccctgaaggggggcggtttaagaaggagattgtggtggatggccagagttacctgctgctgatccgagatgaaggaggcccccctgagctccagtttgctgcctgggtggatgcagtggtgtttgtgttcagcctggaggatgaaatcagtttccagacggtgtacaactacttcctgcgtctctgcagcttccgcaacgccagcgaggtgcccatggtgcttgtgggcacgcaggatgccatcagcgctgcgaatccccgggttatcgacgacagcagagcccgcaagctctccacagatctgaagcggtgcacctactatgagacgtgcgcgacctacgggctcaatgtggagcgtgtcttccaggacgtggcccagaaggtagtggccttgcgaaagaagcagcaactggccatcgggccctgcaagtcactgcccaactcgcccagccactcggccgtgtccgccgcctccatcccggccgtgcacatcaaccaggccacgaatggcggcggcagcgccttcagcgactactcgtcctcagtcccctccacccccagcatcagccagcgggagctgcgcatcgagaccatcgctgcctcctccacccccacacccatccgaaagcagtccaagcggcgctccaacatcttcacgatatgtgccactgtttccaacttttcatcaacaaaaaggcctttccaactccttccaaattagaagaccagttggtgacacacagcacctctggacatgccccctgtgcggggccggaggcgggccgggccctgggactgctctcagatgagaagcggccgcgagctccccactccagagacccacgggaacctttgtaactaaccccacccccagggaaggctaggagcgccggagcccgcgctgggggctgccggggaccaggcccggccggacgctgcaggctcgctgcatggagaagaaggcagctcggccccacgcccggcgctggccagcgcgacgaggcccagaggggcgggggagtccaagcccgcccggcccggctgctcctggggggcgctttcctgcccctcccctcctctgctccttcctgcatggacctctgccgttcctgctcctgctccggaagccgccgccgccgccgcgcttgccttgccccctctttttggcctccccctatttcctaggatccgcattcgggtggactctgccccaggagcttgacagggtgcagggcctcttctggcctctctcctctctctgtccatccactgtgccccttgggccacgccgacgcgctcggtgccacgtgccgtgtggtgtctgtgccgcagacgggccatctgcccgctcacttgtggactttgcgctcccggttgtcgcgccctgtgctcccgaccagcagccccaccgtccacctcctcgcccccgcttctcttacgcccccgccccgggcgtgctcctcgcgccctcggcctctctgtccttgctcttttgtaaggggcgggcccggctcagtgacctgtgctgctctgtatggtgccgtgtgtaagaataaacccgttggaatactcgtggtctcagttccttcccgtcccgccgccccggcccgacccactgctagggctgcccaggaggagggaggcaggagggaggccgggaagtccaggtgggcagctctcggcagaccctgggcctctttaacacgcctcttgttttctcttccagtctcggaagggtgctgacctggaccgggagaagaaggctgccgagtgcaaggtggacagcatcgggagcggccgcgccatccccatcaagcaggggatcctgctaaagcggagcggcaagtccctgaacaaggagtggaagaagaagtatgtgacgctctgtgacaacgggctgctcacctatcaccccagcctgcatgattacatgcagaacatccacggcaaggagattgacctgctgcggacaacggtgaaagtgccagggaagcgcctgccccgagccacacctgccacagccccgggcaccagcccccgtgccaacgggctgtccgtggagcggagtaacacacagctgggtgggggcacaggtgccccccactcggccagcagcgcatccctgcactctgagcgccccctcagcagctcggcctgggctggcccgcgccctgaggggctgcaccagcgctcctgctccgtttccagcgccgaccagtggagtgaggccaccacttccctgcccccaggcatgcagcaccctgccagtggcccagctgaggtactcagttccagccccaagctggatcctcccccatctccccactccaaccggaagaagcaccggaggaaaaagagcaccgggaccccccgaccagacggccccagcagtgctactgaaggttagggggacccagagggaaaccgggcacaggaggtgggcagtgggacttggggatagtaccctaaaagtaacacctattttttattttttgtattcagtggattaagcactttctagtagttgctaatcaaagtagttctacagcttcttttggtaatctagacctggtatcttagaaaagttcttctgataactgaaaccctttctgttgaaatgtgggcttacttcatttattcttaaggtaaaagacagcagactgctacatcaatagctcctctaagatgttcgggcaggacctgtgttttctgtctcttgtgtcatactgagtttaataaagtgctgggtacttactaggtgcgtaatacatgtgtacagattggctgagtctctcattagttttccttaggctaaggaattccaggtcctgaagccttcttccataggacctttctcttcctctattaattatactgctgctcctcagattttcctcaaagtatcttcaaaacctccctcttcttggtgattggagtttctttgctcccaaataagtttaacttctacagactcataatttctcacttctgctctaatcatcagggtagacgtatgggtcaggggagcagagacacctagccaacctgtgacacagtgatgcttagtacttacagcgtggggtctcccttctggtccggcagactaagccccacaaatgatcatggagatcacgtagttcgaaggctgtggttgaaagcaaggtgaggcgcagtggtggtgcctggggaaggaggcgccggttctatttctgtgggaaggcagttctgctaacagtccctgagagcaagggcccagcagaggaggaattccaggggatgtcggtgtcactgaggtgaggctgcctggggccaagatgcagtgaggacttacaagcagagatggccttggcagaactggggttcaccctggggccttaccacaggcacctgtgctgtctttccagcccccaggacacagtcacactgcttgttaggaattgttcacccatggggcagtgaccattgggaatgagattcatgcggctgtcttctggggcctgggggaccagagcttggaagagcttcaccacattgcttgggttcacagtccagccctcagtgcttgtcagtacagatgccctcaggcccctatttgctcacatactgcaggtcctgtagaaaacctctcctcctctcccccatccacttgcccttcctgcctgtctatgccatggtagtgggggaggggcccagctcccaggagccccacgctgacgccgtcaggaatattgggtttaatgagctgcaaaatgaggcggctgcagctgacatgtacggatggtgcccacacccgccttcccccaccctctcccagtgtttgcctcctagcaccccgtcacatccttctccagatactcagctctttctgtgggatgcacccctctctggtttcacacccattcccggcagtgccaggggtgccaagatcttgcatcccccatctgttttcacttaagctccacaggtggttaggaatgagaactgggagctcacactagtcttgcaggtttactctggcctccccctgcaagctgtcctggagtgtgtggccttgcagctggggaagggtctaggggaggacacttgccagtggagcagggtagtgagtggagttgtggcgatagcatgccctgggtgtgcacgcaggccaggagccctgatggcataaacacccccccaacagaggcagaggagtcgtttgaatttgtggtggtgtccctcactgggcagacgtggcacttcgaggcttcaacggcggaggagcgggagctgtgggttcagagtgtgcaggcccagatccttgccagcctgcaaggctgccgcagtgccaaggacaagactcgactggggaaccagaacgcagctctggctgtgcaggccgtccgcaccgtccgcggcaacagcttttgtatcgactgcgatgcacccaatccagactgggccagcctgaacctgggtgccctgatgtgcattgagtgctcaggcatccaccgacacctgggggctcacctgtcccgggtgcgctcccttgacctcgatgactggccgcctgagctgctggctgtcatgactgccatgggcaatgccctcgccaacagcgtctgggagggggccttgggtggctactccaagccagggcctgatgcctgcagagaggagaaggaacgctggatacgggccaagtatgaacagaagactccatggcccaaagaccctcctccctgcaggcactgtgggaacagacacagagatggagaagcagggacatgctgagaggacgaagccaaggaaattagggaggagagtcaaagggatcaaggagagttggggatttgagctgcagcagagagggatgagggatttagccctctgccctaaggtgccattgaaaagggacaggacccttcggaggtgcctgtgaggagaggggagcaggacctctccctcctccagatccctgcctcctagtgccagcccctcacacgccttcatcctgaaacaggaagaggacggcaccaagttgggggtgctggatgaaagagacgaggggtgatctgtgagtcccatgtaaactttgtacattggaatatttatgtttgtgtacatatttgatgtgtgtgtgtatgatgagccaataaaccagactgtgtgcgtgg

SEQ ID NO: 315628 - DNA, 3612 bp, Homo sapiens
ggtccctgtcccgaggggcaggttgtggaggggcagtggtccaagcacctcttgtacaggccacgaatggcggcggcagcgccttcagcgactactcgtcctcagtcccctccacccccagcatcagccagcgggagctgcgcatcgagaccatcgctgcctcctccacccccacacccatccgaaagcagtccaagcggcgctccaacatcttcacgctaatgaaccggcggccggaaggctgtttgcccaaggcgacacagagggttagctggcccagctagagtcagagcccaggcctccccgtcgccttccggctctttttccgttaccccactgccgaggggaaaattcatgctttccacccaccgctgtgattggtttaacaaaggcttagccatcttttcctgggcttcaccacgctgcctcgttcctccctctcagatatgtgccactgtttccaacttttcatcaacaaaaaggcctttccaactccttccaaattagaagaccagttggtgacacacagcacctctggacatgccccctgtgcggggccggaggcgggccgggccctgggactgctctcagatgagaagcggccgcgagctccccactccagagacccacgggaacctttgtaactaaccccacccccagggaaggctaggagcgccggagcccgcgctgggggctgccggggaccaggcccggccggacgctgcaggctcgctgcatggagaagaaggcagctcggccccacgcccggcgctggccagcgcgacgaggcccagaggggcgggggagtccaagcccgcccggcccggctgctcctggggggcgctttcctgcccctcccctcctctgctccttcctgcatggacctctgccgttcctgctcctgctccggaagccgccgccgccgccgcgcttgccttgccccctctttttggcctccccctatttcctaggatccgcattcgggtggactctgccccaggagcttgacagggtgcagggcctcttctggcctctctcctctctctgtccatccactgtgccccttgggccacgccgacgcgctcggtgccacgtgccgtgtggtgtctgtgccgcagacgggccatctgcccgctcacttgtggactttgcgctcccggttgtcgcgccctgtgctcccgaccagcagccccaccgtccacctcctcgcccccgcttctcttacgcccccgccccgggcgtgctcctcgcgccctcggcctctctgtccttgctcttttgtaaggggcgggcccggctcagtgacctgtgctgctctgtatggtgccgtgtgtaagaataaacccgttggaatactcgtggtctcagttccttcccgtcccgccgccccggcccgacccactgctagggctgcccaggaggagggaggcaggagggaggccgggaagtccaggtgggcagctctcggcagaccctgggcctctttaacacgcctcttgttttctcttccagtctcggaagggtgctgacctggaccgggagaagaaggctgccgagtgcaaggtggacagcatcgggagcggccgcgccatccccatcaagcaggggatcctgctaaagcggagcggcaagtccctgaacaaggagtggaagaagaagtatgtgacgctctgtgacaacgggctgctcacctatcaccccagcctgcatgattacatgcagaacatccacggcaaggagattgacctgctgcggacaacggtgaaagtgccagggaagcgcctgccccgagccacacctgccacagccccgggcaccagcccccgtgccaacgggctgtccgtggagcggagtaacacacagctgggtgggggcacaggtgccccccactcggccagcagcgcatccctgcactctgagcgccccctcagcagctcggcctgggctggcccgcgccctgaggggctgcaccagcgctcctgctccgtttccagcgccgaccagtggagtgaggccaccacttccctgcccccaggcatgcagcaccctgccagtggcccagctgaggtactcagttccagccccaagctggatcctcccccatctccccactccaaccggaagaagcaccggaggaaaaagagcaccgggaccccccgaccagacggccccagcagtgctactgaagaggcagaggagtcgtttgaatttgtggtggtgtccctcactgggcagacgtggcacttcgaggcttcaacggcggaggagcgggagctgtgggttcagagtgtgcaggcccagatccttgccagcctgcaaggctgccgcagtgccaaggacaagactcgactggggaaccagaacgcagctctggctgtgcaggccgtccgcaccgtccgcggcaacagcttttgtatcgactgcgatgcacccaatccagactgggccagcctgaacctgggtgccctgatgtgcattgagtgctcaggcatccaccgacacctgggggctcacctgtcccgggtgcgctcccttgacctcgatgactggccgcctgagctgctggctgtcatgactgccatgggcaatgccctcgccaacagcgtctgggagggggccttgggtggctactccaagccagggcctgatgcctgcagagaggagaaggaacgctggatacgggccaagtatgaacagaagctcttcctggccccactgccaagctcagatgtgccactggggcagcagctgctccgggccgtggtggaagatgacctgcggctgttggtgatgctcctggcacatggctccaaagaggaggtgaatgagacctatggggacggggacgggcggacggctctacatctctccagtgccatggccaacgttgtcttcacgcagctgctcatctggtacggggtggacgtgaggagccgggacgcccggggcctgactccactggcatatgctcgccgggccggcagccaggagtgtgcagacatcttgatccagcatggctgccctggggagggctgtggcttagcgcctacccccaacagagagcctgccaatggcaccaacccctctgctgagctgcaccgtagtcctagcctcctataaggcccaggaagagggcagaggggccagaaggactccatggcccaaagaccctcctccctgcaggcactgtgggaacagacacagagatggagaagcagggacatgctgagaggacgaagccaaggaaattagggaggagagtcaaagggatcaaggagagttggggatttgagctgcagcagagagggatgagggatttagccctctgccctaaggtgccattgaaaagggacaggacccttcggaggtgcctgtgaggagaggggagcaggacctctccctcctccagatccctgcctcctagtgccagcccctcacacgccttcatcctgaaacaggaagaggacggcaccaagttgggggtgctggatgaaagagacgaggggtgatctgtgagtcccatgtaaactttgtacattggaatatttatgtttgtgtacatatttgatgtgtgtgtgtatgatgagccaataaaccagactgtgtgcgtgg

SEQ ID NO: 315629 - DNA, 2622 bp, Homo sapiens
gccatgaacttccaggcgggcggggggcagagcccgcagcagcagcagcagctggccggcgggcccccccagcagttcgcgctctccaactccgcggccatccgggccgagatccagcgcttcgagtccgtgcatcccaatatctacgccatctacgacctgatcgagcgcatcgaggatttggcgctgcagaaccagatccgggagcacgtcatctccatcgaggactcgtttgtgaacagccaggagtggacgctgagccgctccgtaccggagcttaaagtgggcatagtggggaacctgtctagcgggaagtcagccctggtgcaccgctatctgacggggacctatgtccaggaggagtcccctgaaggggggcggtttaagaaggagattgtggtggatggccagagttacctgctgctgatccgagatgaaggaggcccccctgagctccagtttgctgcctgggtggatgcagtggtgtttgtgttcagcctggaggatgaaatcagtttccagacggtgtacaactacttcctgcgtctctgcagcttccgcaacgccagcgaggtgcccatggtgcttgtgggcacgcaggatgccatcagcgctgcgaatccccgggttatcgacgacagcagagcccgcaagctctccacagatctgaagcggtgcacctactatgagacgtgcgcgacctacgggctcaatgtggagcgtgtcttccaggacgtggcccagaaggtagtggccttgcgaaagaagcagcaactggccatcgggccctgcaagtcactgcccaactcgcccagccactcggccgtgtccgccgcctccatcccggccgtgcacatcaaccaggccacgaatggcggcggcagcgccttcagcgactactcgtcctcagtcccctccacccccagcatcagccagcgggagctgcgcatcgagaccatcgctgcctcctccacccccacacccatccgaaagcagtccaagcggcgctccaacatcttcacgatatgtgccactgtttccaacttttcatcaacaaaaaggcctttccaactccttccaaattagaagaccagttggtgacacacagcacctctggacatgccccctgtgcggggccggaggcgggccgggccctgggactgctctcagatgagaagcggccgcgagctccccactccagagacccacgggaacctttgtaactaaccccacccccagggaaggctaggagcgccggagcccgcgctgggggctgccggggaccaggcccggccggacgctgcaggctcgctgcatggagaagaaggcagctcggccccacgcccggcgctggccagcgcgacgaggcccagaggggcgggggagtccaagcccgcccggcccggctgctcctggggggcgctttcctgcccctcccctcctctgctccttcctgcatggacctctgccgttcctgctcctgctccggaagccgccgccgccgccgcgcttgccttgccccctctttttggcctccccctatttcctaggatccgcattcgggtggactctgccccaggagcttgacagggtgcagggcctcttctggcctctctcctctctctgtccatccactgtgccccttgggccacgccgacgcgctcggtgccacgtgccgtgtggtgtctgtgccgcagacgggccatctgcccgctcacttgtggactttgcgctcccggttgtcgcgccctgtgctcccgaccagcagccccaccgtccacctcctcgcccccgcttctcttacgcccccgccccgggcgtgctcctcgcgccctcggcctctctgtccttgctcttttgtaaggggcgggcccggctcagtgacctgtgctgctctgtatggtgccgtgtgtaagaataaacccgttggaatactcgtggtctcagttccttcccgtcccgccgccccggcccgacccactgctagggctgcccaggaggagggaggcaggagggaggccgggaagtccaggtgggcagctctcggcagaccctgggcctctttaacacgcctcttgttttctcttccagtctcggaagggtgctgacctggaccgggagaagaaggctgccgagtgcaaggtggacagcatcgggagcggccgcgccatccccatcaagcaggggatcctgctaaagcggagcggcaagtccctgaacaaggagtggaagaagaagtatgtgacgctctgtgacaacgggctgctcacctatcaccccagcctgcatgattacatgcagaacatccacggcaaggagattgacctgctgcggacaacggtgaaagtgccagggaagcgcctgccccgagccacacctgccacagccccgggcaccagcccccgtgccaacgggctgtccgtggagcggagtaacacacagctgggtgggggcacagaatggcagtaaagctgaggcgaagcaaatggcatatgtggactagaatggagggtgcaggggcccaagccaggaggggcccctcaaggagcactgcggcgatgggtgtcagcaccacccagctcgttccacaagttggaagatctctgatgcagagaccccccg

SEQ ID NO: 315630 - DNA, 1932 bp, Homo sapiens
gccatgaacttccaggcgggcggggggcagagcccgcagcagcagcagcagctggccggcgggcccccccagcagttcgcgctctccaactccgcggccatccgggccgagatccagcgcttcgagtccgtgcatcccaatatctacgccatctacgacctgatcgagcgcatcgaggatttggcgctgcagaaccagatccgggagcacgtcatctccatcgaggactcgtttgtgaacagccaggagtggacgctgagccgctccgtaccggagcttaaagtgggcatagtggggaacctgtctagcgggaagtcagccctggtgcaccgctatctgacggggacctatgtccaggaggagtcccctgaaggggggcggtttaagaaggagattgtggtggatggccagagttacctgctgctgatccgagatgaaggaggcccccctgagctccagtttgctgcctgggtggatgcagtggtgtttgtgttcagcctggaggatgaaatcagtttccagacggtgtacaactacttcctgcgtctctgcagcttccgcaacgccagcgaggtgcccatggtgcttgtgggcacgcaggatgccatcagcgctgcgaatccccgggttatcgacgacagcagagcccgcaagctctccacagatctgaagcggtgcacctactatgagacgtgcgcgacctacgggctcaatgtggagcgtgtcttccaggacgtggcccagaaggtagtggccttgcgaaagaagcagcaactggccatcgggccctgcaagtcactgcccaactcgcccagccactcggccgtgtccgccgcctccatcccggccgtgcacatcaaccaggccacgaatggcggcggcagcgccttcagcgactactcgtcctcagtcccctccacccccagcatcagccagcgggagctgcgcatcgagaccatcgctgcctcctccacccccacacccatccgaaagcagtccaagcggcgctccaacatcttcacgatatgtgccactgtttccaacttttcatcaacaaaaaggcctttccaactccttccaaattagaagaccagttggtgacacacagcacctctggacatgccccctgtgcggggccggaggcgggccgggccctgggactgctctcagatgagaagcggccgcgagctccccactccagagacccacgggaacctttgtaactaaccccacccccagggaaggctaggagcgccggagcccgcgctgggggctgccggggaccaggcccggccggacgctgcaggctcgctgcatggagaagaaggcagctcggccccacgcccggcgctggccagcgcgacgaggcccagaggggcgggggagtccaagcccgcccggcccggctgctcctggggggcgctttcctgcccctcccctcctctgctccttcctgcatggacctctgccgttcctgctcctgctccggaagccgccgccgccgccgcgcttgccttgccccctctttttggcctccccctatttcctaggatccgcattcgggtggactctgccccaggagcttgacagggtgcagggcctcttctggcctctctcctctctctgtccatccactgtgccccttgggccacgccgacgcgctcggtgccacgtgccgtgtggtgtctgtgccgcagacgggccatctgcccgctcacttgtggactttgcgctcccggttgtcgcgccctgtgctcccgaccagcagccccaccgtccacctcctcgcccccgcttctcttacgcccccgccccgggcgtgctcctcgcgccctcggcctctctgtccttgctcttttgtaaggggcgggcccggctcagtgacctgtgctgctctgtatggtgccgtgtgtaagaataaacccgttggaa

SEQ ID NO: 315631 - DNA, 1304 bp, Homo sapiens
gccatgaacttccaggcgggcggggggcagagcccgcagcagcagcagcagctggccggcgggcccccccagcagttcgcgctctccaactccgcggccatccgggccgagatccagcgcttcgagtccgtgcatcccaatatctacgccatctacgacctgatcgagcgcatcgaggatttggcgctgcagaaccagatccgggagcacgtcatctccatcgaggactcgtttgtgaacagccaggagtggacgctgagccgctccgtaccggagcttaaagtgggcatagtggggaacctgtctagcgggaagtcagccctggtgcaccgctatctgacggggacctatgtccaggaggagtcccctgaaggggggcggtttaagaaggagattgtggtggatggccagagttacctgctgctgatccgagatgaaggaggcccccctgagctccagtttgctgcctgggtggatgcagtggtgtttgtgttcagcctggaggatgaaatcagtttccagacggtgtacaactacttcctgcgtctctgcagcttccgcaacgccagcgaggtgcccatggtgcttgtgggcacgcaggatgccatcagcgctgcgaatccccgggttatcgacgacagcagagcccgcaagctctccacagatctgaagcggtgcacctactatgagacgtgcgcgacctacgggctcaatgtggagcgtgtcttccaggacgtggcccagaaggtagtggccttgcgaaagaagcagcaactggccatcgggccctgcaagtcactgcccaactcgcccagccactcggccgtgtccgccgcctccatcccggccgtgcacatcaaccaggccacgaatggcggcggcagcgccttcagcgactactcgtcctcagtcccctccacccccagcatcagccagcgggagctgcgcatcgagaccatcgctgcctcctccacccccacacccatccgaaagcagtccaagcggcgctccaacatcttcacgctaatgaaccggcggccggaaggctgtttgcccaaggcgacacagagggttagctggcccagctagagtcagagcccaggcctccccgtcgccttccggctctttttccgttaccccactgccgaggggaaaattcatgctttccacccaccgctgtgattggtttaacaaaggcttagccatcttttcctgggcttcaccacgctgcctcgttcctccctctcaggtttgtcctgtctccttgtgagctcctcactcacccctcacaaacctcacacccc

SEQ ID NO: 315632 - DNA, 555 bp, Homo sapiens
gagggtgattaaggatcctggtattgagtggcatgtgacctctactatgaagcactgtgcggtggctgccgagccttcctgatccgggagctcttcccaacatggctgttggtcatggagatcctcaatgtcacgctggtgccctacggaaacgcacaggaacaaaatgtcagtggcaggtgggagttcaagtgccagcatggagaagaggagtgcaaattcaacaaggtggaggcctgcgtgttggatgaacttgacatggagctagccttcctgaccattgtctgcatggaagagtttgaggacatggagagaagtctgccactatgcctgcagctctacgccccagggctgtcgccagacactatcatggagtgtgcaatgggggaccgcggcatgcagctcatgcacgccaacgcccagcggacagatgctctccagccaccacacgagtatgtgccctgggtcaccgtcaatgggaaacccttggaagatcagacccagctccttacccttgtctgccagttgtaccagggcaagagaccggatgtctgg

SEQ ID NO: 315633 - DNA, 328 bp, Homo sapiens
tcaggtggtgggggtagggtctccttccaggaccccaactcatggccttcacctccagggcaagaagccggatgtctgcccttcctcaaccagctccctcaggagtgtttgcttcaagtgatggccggtgagctgcggagagctcatggaaggcgagtgggaacccggctgcctgcctttttttctgatccagaccctcggcacctgctacttaccaactggaaaattttatgcatcccatgaagcccagatacacaaaattccaccccatgatcaagaatcctgctccactaagaatggtgctaaagtaaaactagtttaataagcc

SEQ ID NO: 315634 - DNA, 679 bp, Homo sapiens
gaggcgggggccagacttgggaatatgtgcagccctttctgggctggaaccagggtgcatgggttggggtagctgctgggaatatgcgacccctgtcttgctttgtgcagaaacccttggaagatcagacccagctccttacccttgtctgccagttgtaccagggcaagaagccggatgtctgcccttcctcaaccagctccctcaggagtgtttgcttcaagtgatggccggtgagctgcggagagctcatggaaggcgagtgggaacccggctgcctgcctttttttctgatccagaccctcggcacctgctacttaccaactggaaaattttatgcatcccatgaagcccagatacacaaaattccaccccatgatcaagaatcctgctccactaagaatggtgctaaagtaaaactagtttaataagcccccttctggatggtgtaattaatttgataagtcagccattcccccttccccaggcctggcaaaacccgctctctactaaaaatacaaaaattagccaggcgcggtggcgggcgcctgtaatcccagctacttgggaggctgaggcaggagaattgcttgaacccggcaggcagaggttgcagtgagccgaaatcgcgccactgtgctccagcctgggcgacaagagcaaaattccatctcaaaat

SEQ ID NO: 315635 - DNA, 1029 bp, Homo sapiens
  misc_feature (35)..(35): n is a, c, g, or t
  misc_feature (43)..(43): n is a, c, g, or t
  misc_feature (45)..(45): n is a, c, g, or t
gggggggggatcctaacttaggctaggtagaggcngggtggtnanagccacacctttgcccctgctgcgatgaccctgtcgccacttctgctgttcctgccaccgctgctgctgctgctggacgtccccacggcggcggtgcaggcgtcccctctgcaagcgttagacttctttgggaatgggccaccagttaactacaagacaggcaatctatacctgcgggggcccctgaagaagtccaatgcaccgcttgtcaatgtgaccctctactatgaagcactgtgcggtggctgccgagccttcctgatccgggagctcttcccaacatggctgttggtcatggagatcctcaatgtcacgctggtgccctacggaaacgcacaggaacaaaatgtcagtggcaggtgggagttcaagtgccagcatggagaagaggagtgcaaattcaacaaggtggaggcctgcgtgttggatgaacttgacatggagctagccttcctgaccattgtctgcatggaagagtttgaggacatggagagaagtctgccactatgcctgcagctctacgccccagggctgtcgccagacactatcatggagtgtgcaatgggggaccgcggcatgcagctcatgcacgccaacgcccagcggacagatgctctccagccaccacacgagtatgtgccctgggtcaccgtcaatgggaaacccttggaagatcagacccagctccttacccttgtctgccagttgtaccagggcaagaagccggatgtctgcccttcctcaaccagctccctcaggagtgtttgcttcaagtgatggccggtgagctgcggagagctcatggaaggcgagtgggaacccggctgcctgcctttttttctgatccagaccctcggcacctgctacttaccaactggaaaattttatgcatcccatgaagcccagatacacaaaattccaccccatgatcaagaatcctgctccactaagaatggtgctaaagtaaaactagtttaataagcc

SEQ ID NO: 315636 - DNA, 1386 bp, Homo sapiens
tggcaggggtgggggtgggacactcagaggaaggagtggaggagggagagacgctggcccgggacccgaggggcgtgggcatcgggaggcgggcccgggttaggggcgggaccgccgcctggttaaaggcgcttatttcccaggcagccgctgcagtcgccacacctttgcccctgctgcgatgaccctgtcgccacttctgctgttcctgccaccgctgctgctgctgctggacgtccccacggcggcggtgcaggcgtcccctctgcaagcgttagacttctttgggaatgggccaccagttaactacaagacaggcaatctatacctgcgggggcccctgaagaagtccaatgcaccgcttgtcaatgtgaccctctactatgaagcactgtgcggtggctgccgagccttcctgatccgggagctcttcccaacatggctgttggtcatggagatcctcaatgtcacgctggtgccctacggaaacgcacaggaacaaaatgtcagtggcaggtgggagttcaagtgccagcatggagaagaggagtgcaaattcaacaaggtggaggcctgcgtgttggatgaacttgacatggagctagccttcctgaccattgtctgcatggaagagtttgaggacatggagagaagtctgccactatgcctgcagctctacgccccagggctgtcgccagacactatcatggagtgtgcaatgggggaccgcggcatgcagctcatgcacgccaacgcccagcggacagatgctctccagccaccacacgagtatgtgccctgggtcaccgtcaatgggaaacccttggaagatcagacccagctccttacccttgtctgccagttgtaccagggcaagaagccggatgtctgcccttcctcaaccagctccctcaggagtgtttgcttcaagtgatggccggtgagctgcggagagctcatggaaggcgagtgggaacccggctgcctgcctttttttctgatccagaccctcggcacctgctacttaccaactggaaaattttatgcatcccatgaagcccagatacacaaaattccaccccatgatcaagaatcctgctccactaagaatggtgctaaagtaaaactagtttaataagcccccttctggatggtgtaattaatttgataagtcagccattcccccttccccaggcctggcaaaacccgctctctactaaaaatacaaaaattagccaggcgcggtggcgggcgcctgtaatcccagctacttgggaggctgaggcaggagaattgcttgaacccggcaggcagaggttgcagtgagccgaaatcgcgccactgtgctccagcctgggcgacaagagcaaaattccatctcaaaat

SEQ ID NO: 315637 - DNA, 1229 bp, Homo sapiens
tggcaggggtgggggtgggacactcagaggaaggagtggaggagggagagacgctggcccgggacccgaggggcgtgggcatcgggaggcgggcccgggttaggggcgggaccgccgcctggttaaaggcgcttatttcccaggcagccgctgcagtcgccacacctttgcccctgctgcgatgaccctgtcgccacttctgctgttcctgccaccgctgctgctgctgctggacgtccccacggcggcggtgcaggcgtcccctctgcaagcgttagacttctttgggaatgggccaccagttaactacaagacaggcaatctatacctgcgggggcccctgaagaagtccaatgcaccgcttgtcaatgtgaccctctactatgaagcactgtgcggtggctgccgagccttcctgatccgggagctcttcccaacatggctgttggtcatggagatcctcaatgtcacgctggtgccctacggaaacgcacaggtgtgtgggcgctggggaaactgaggcacgtgggcaggggagcaggggacccagcctaccagcaggctctcaccctgctgccttgcaggaacaaaatgtcagtggcaggtgggagttcaagtgccagcatggagaagaggagtgcaaattcaacaaggtggaggcctgcgtgttggatgaacttgacatggagctagccttcctgaccattgtctgcatggaagagtttgaggacatggagagaagtctgccactatgcctgcagctctacgccccagggctgtcgccagacactatcatggagtgtgcaatgggggaccgcggcatgcagctcatgcacgccaacgcccagcggacagatgctctccagccaccacacgagtatgtgccctgggtcaccgtcaatgggaaacccttggaagatcagacccagctccttacccttgtctgccagttgtaccagggcaagaagccggatgtctgcccttcctcaaccagctccctcaggagtgtttgcttcaagtgatggccggtgagctgcggagagctcatggaaggcgagtgggaacccggctgcctgcctttttttctgatccagaccctcggcacctgctacttaccaactggaaaattttatgcatcccatgaagcccagatacacaaaattccaccccatgatcaagaatcctgctccactaagaatggtgctaaagtaaaactagtttaataagcc

SEQ ID NO: 315638 - DNA, 1085 bp, Homo sapiens
tggcaggggtgggggtgggacactcagaggaaggagtggaggagggagagacgctggcccgggacccgaggggcgtgggcatcgggaggcgggcccgggttaggggcgggaccgccgcctggttaaaggcgcttatttcccaggcagccgctgcagtcgccacacctttgcccctgctgcgatgaccctgtcgccacttctgctgttcctgccaccgctgctgctgctgctggacgtccccacggcggcggtgcaggcgtcccctctgcaagcgttagacttctttgggaatgggccaccagttaactacaagacaggcaatctatacctgcgggggcccctgaagaagtccaatgcaccgcttgtcaatgtgaccctctactatgaagcactgtgcggtggctgccgagccttcctgatccgggagctcttcccaacatggctgttggtcatggagatcctcaatgtcacgctggtgccctacggaaacgcacaggaacaaaatgtcagtggcaggtgggagttcaagtgccagcatggagaagaggagtgcaaattcaacaaggtggaggcctgcgtgttggatgaacttgacatggagctagccttcctgaccattgtctgcatggaagagtttgaggacatggagagaagtctgccactatgcctgcagctctacgccccagggctgtcgccagacactatcatggagtgtgcaatgggggaccgcggcatgcagctcatgcacgccaacgcccagcggacagatgctctccagccaccacacgagtatgtgccctgggtcaccgtcaatgggaaacccttggaagatcagacccagctccttacccttgtctgccagttgtaccagggcaagaagccggatgtctgcccttcctcaaccagctccctcaggagtgtttgcttcaagtgatggccggtgagctgcggagagctcatggaaggcgagtgggaacccggctgcctgcctttttttctgatttctacactggaaattttgctccatgagcagtaaaattcccctggaaactgcgccaaaggtggattttagcaaaaaaccggtt

SEQ ID NO: 315639 - DNA, 1084 bp, Homo sapiens
tggcaggggtgggggtgggacactcagaggaaggagtggaggagggagagacgctggcccgggacccgaggggcgtgggcatcgggaggcgggcccgggttaggggcgggaccgccgcctggttaaaggcgcttatttcccaggcagccgctgcagtcgccacacctttgcccctgctgcgatgaccctgtcgccacttctgctgttcctgccaccgctgctgctgctgctggacgtccccacggcggcggtgcaggcgtcccctctgcaagcgttagacttctttgggaatgggccaccagttaactacaagacaggcaatctatacctgcgggggcccctgaagaagtccaatgcaccgcttgtcaatgtgaccctctactatgaagcactgtgcggtggctgccgagccttcctgatccgggagctcttcccaacatggctgttggtcatggagatcctcaatgtcacgctggtgccctacggaaacgcacagcccctctccaaaccccaggcctgcgtgttggatgaacttgacatggagctagccttcctgaccattgtctgcatggaagagtttgaggacatggagagaagtctgccactatgcctgcagctctacgccccagggctgtcgccagacactatcatggagtgtgcaatgggggaccgcggcatgcagctcatgcacgccaacgcccagcggacagatgctctccagccaccacacgagtatgtgccctgggtcaccgtcaatgggaaacccttggaagatcagacccagctccttacccttgtctgccagttgtaccagggcaagaagccggatgtctgcccttcctcaaccagctccctcaggagtgtttgcttcaagtgatggccggtgagctgcggagagctcatggaaggcgagtgggaacccggctgcctgcctttttttctgatccagaccctcggcacctgctacttaccaactggaaaattttatgcatcccatgaagcccagatacacaaaattccaccccatgatcaagaatcctgctccactaagaatggtgctaaagtaaaactagtttaataagcc

SEQ ID NO: 315640 - DNA, 1048 bp, Homo sapiens
tggcaggggtgggggtgggacactcagaggaaggagtggaggagggagagacgctggcccgggacccgaggggcgtgggcatcgggaggcgggcccgggttaggggcgggaccgccgcctggttaaaggcgcttatttcccaggcagccgctgcagtcgccacacctttgcccctgctgcgatgaccctgtcgccacttctgctgttcctgccaccgctgctgctgctgctggacgtccccacggcggcggtgcaggcgtcccctctgcaagcgttagacttctttgggaatgggccaccagttaactacaagacaggcaatctatacctgcgggggcccctgaagaagtccaatgcaccgcttgtcaatgtgaccctctactatgaagcactgtgcggtggctgccgagccttcctgatccgggagctcttcccaacatggctgttggtcatggagatcctcaatgtcacgctggtgccctacggaaacgcacaggaacaaaatgtcagtggcaggtgggagttcaagtgccagcatggagaagaggagtgcaaattcaacaaggtggagtgcctgcagctctacgccccagggctgtcgccagacactatcatggagtgtgcaatgggggaccgcggcatgcagctcatgcacgccaacgcccagcggacagatgctctccagccaccacacgagtatgtgccctgggtcaccgtcaatgggaaacccttggaagatcagacccagctccttacccttgtctgccagttgtaccagggcaagaagccggatgtctgcccttcctcaaccagctccctcaggagtgtttgcttcaagtgatggccggtgagctgcggagagctcatggaaggcgagtgggaacccggctgcctgcctttttttctgatccagaccctcggcacctgctacttaccaactggaaaattttatgcatcccatgaagcccagatacacaaaattccaccccatgatcaagaatcctgctccactaagaatggtgctaaagtaaaactagtttaataagcc

SEQ ID NO: 315641 - DNA, 1113 bp, Homo sapiens
tggcaggggtgggggtgggacactcagaggaaggagtggaggagggagagacgctggcccgggacccgaggggcgtgggcatcgggaggcgggcccgggttaggggcgggaccgccgcctggttaaaggcgcttatttcccaggcagccgctgcagtcgccacacctttgcccctgctgcgatgaccctgtcgccacttctgctgttcctgccaccgctgctgctgctgctggacgtccccacggcggcggtgcaggcgtcccctctgcaagcgttagacttctttgggaatgggccaccagttaactacaagacaggcaatctatacctgcgggggcccctgaagaagtccaatgcaccgcttgtcaatgtgaccctctactatgaagcactgtgcggtggctgccgagccttcctgatccgggagctcttcccaacatggctgttggtcatggagatcctcaatgtcacgctggtgccctacggaaacgcacaggaacaaaatgtcagtggcaggtgggagttcaagtgccagcatggagaagaggagtgcaaattcaacaaggtggaggcctgcgtgttggatgaacttgacatggagctagccttcctgaccattgtctgcatggaagagtttgaggacatggagagaagtctgccactatgcctgcagctctacgccccagggctgtcgccagacactatcatggagtgtgcaatgggggaccgcggcatgcagctcatgcacgccaacgcccagcggacagatgctctccagccaccacacgaaaacccttggaagatcagacccagctccttacccttgtctgccagttgtaccagggcaagaagccggatgtctgcccttcctcaaccagctccctcaggagtgtttgcttcaagtgatggccggtgagctgcggagagctcatggaaggcgagtgggaacccggctgcctgcctttttttctgatccagaccctcggcacctgctacttaccaactggaaaattttatgcatcccatgaagcccagatacacaaaattccaccccatgatcaagaatcctgctccactaagaatggtgctaaagtaaaactagtttaataagcc

SEQ ID NO: 315642 - DNA, 993 bp, Homo sapiens
tggcaggggtgggggtgggacactcagaggaaggagtggaggagggagagacgctggcccgggacccgaggggcgtgggcatcgggaggcgggcccgggttaggggcgggaccgccgcctggttaaaggcgcttatttcccaggcagccgctgcagtcgccacacctttgcccctgctgcgatgaccctgtcgccacttctgctgttcctgccaccgctgctgctgctgctggacgtccccacggcggcggtgcaggcgtcccctctgcaagcgttagacttctttgggaatgggccaccagttaactacaagacaggcaatctatacctgcgggggcccctgaagaagtccaatgcaccgcttgtcaatgtgaccctctactatgaagcactgtgcggtggctgccgagccttcctgatccgggagctcttcccaacatggctgttggtcatggagatcctcaatgtcacgctggtgccctacggaaacgcacaggaacaaaatgtcagtggcaggtgggagttcaagtgccagcatggagaagaggagtgcaaattcaacaaggtggaggcctgcgtgttggatgaacttgacatggagctagccttcctgaccattgtctgcatggaagagtttgaggacatggagagaagtctgccactatgcctgcagctctacgccccagggctgtcgccagacactatcatggagtgtgcaatgggggaccgcggcatgcagctcatgcacgcccaaccagctccctcaggagtgtttgcttcaagtgatggccggtgagctgcggagagctcatggaaggcgagtgggaacccggctgcctgcctttttttctgatccagaccctcggcacctgctacttaccaactggaaaattttatgcatcccatgaagcccagatacacaaaattccaccccatgatcaagaatcctgctccactaagaatggtgctaaagtaaaactagtttaataagcc

SEQ ID NO: 315643 - DNA, 584 bp, Homo sapiens
ggagggtgggcagcactcgctttattgtccagcattccacatggataggccacacctttgcccctgctgcgatgaccctgtcgccacttctgctgttcctgccaccgctgctgctgctgctggacgtccccacggcggcggtgcaggcgtcccctctgcaagcgttagacttctttgggaatgggccaccagttaactacaagacaggcaatctatacctgcgggggcccctgaagaagtccaatgcaccgcttgtcaataaacccttggaagatcagacccagctccttacccttgtctgccagttgtaccagggcaagaagccggatgtctgcccttcctcaaccagctccctcaggagtgtttgcttcaagtgatggccggtgagctgcggagagctcatggaaggcgagtgggaacccggctgcctgcctttttttctgatccagaccctcggcacctgctacttaccaactggaaaattttatgcatcccatgaagcccagatacacaaaattccaccccatgatcaagaatcctgctccactaagaatggtgctaaagtaaaactagtttaataagcc

SEQ ID NO: 315644 - DNA, 590 bp, Homo sapiens
tggcaggggtgggggtgggacactcagaggaaggagtggaggagggagagacgctggcccgggacccgaggggcgtgggcatcgggaggcgggcccgggttaggggcgggaccgccgcctggttaaaggcgcttatttcccaggcagccgctgcagtcgccacacctttgcccctgctgcgatgaccctgtcgccacttctgctgttcctgccaccgctgctgctgctgctggacgtccccacggcggcggtgcaggcgtcccctctgcaagcgttagacttctttgggaatgggccaccagttaactacaagacaggcaatctatacctgcgggggcccctgaagaagtccaatgcaccgcttgtcaatgtgaccctctactatgaagcactgtgcggtggctgccgagccttcctgatccgggagctcttcccaacatggctgttggtcatggagatcctcaatgtcacgctggtgccctacggaaacgcacaggaacaaaatgtcagtggcaggtgggagttcaagtgccagcatggagaagaggagtgcaaattcaacaaggtggagatagaagagtgccccaggg

SEQ ID NO: 315645 - DNA, 325 bp, Homo sapiens
ggagggtgggcagcactcgctttattgtccagcattccacatggataggccacacctttgcccctgctgcgatgaccctgtcgccacttctgctgttcctgccaccgctgctgctgctgctggacgtccccacggcggcggtgcaggcgtcccctctgcaagcgttagacttctttgggaatgggccaccagttaactacaagacaggcaatctatacctgcgggggcccctgaagaagtccaatgcaccgcttgtcaatccgacgtccaccgtgatccacatccgcagcgagaccttcgtgcccgaccatgtcgtctggtccct

SEQ ID NO: 315646 - DNA, 807 bp, Homo sapiens
gccacacctttgcccctgctgcgatgaccctgtcgccacttctgctgttcctgccaccgctgctgctgctgctggacgtccccacggcggcggtgcaggcgtcccctctgcaagcgttagacttctttgggaatgggccaccagttaactacaaggtagggacggcgacagggcgggcaggctggagggaacaggcgccctgtcggggcacgcggctccttctttctccccagacttcacaggggaagaccagggccccgaggggacgctgtccctgccgggttcctggaaaaaccctgttcagttcccggcgctgcggccacactccctccgtgccgtttcgctttcgcatcccgcatctgagaggcgcagctgcctccacccgcctagtcccgcccaagggttcaatgagcgcctactgtgtacttttggggcaggagctggggtctccttttgtggcccagggcacaagttcagcagctggccaagggccgccggcatgcattcttgctgctacccttgatgcattcattccagccagggcagggctcgcgtgtctttgggacctattaggcagatgccctagaggctgagcgacttgctcaccgctccagcgacatgggccacccgccacccctcagctgaagccggaagtcagcacctattaggtgccgcctctattcagtcggacttggaaagggttcacgtggatcccttgctcagctcagaggcaaggtctccaggtgaagtgacaagaaatgagcatgggccaaggccggaggcggtggctcatgcctgtaatcccaa

SEQ ID NO: 315647 - DNA, 1031 bp, Homo sapiens
ggagggtgggcagcactcgctttattgtccagcattccacatggataggccacacctttgcccctgctgcgatgaccctgtcgccacttctgctgttcctgccaccgctgctgctgctgctggacgtccccacggcggcggtgcaggcgtcccctctgcaagcgttagacttctttgggaatgggccaccagttaactacaagacaggcaatctatacctgcgggggcccctgaagaagtccaatgcaccgcttgtcaatgtgaccctctactatgaagcactgtgcggtggctgccgagccttcctgatccgggagctcttcccaacatggctgttggtcatggagatcctcaatgtcacgctggtgccctacggaaacgcacaggaacaaaatgtcagtggcaggtgggagttcaagtgccagcatggagaagaggagtgcaaattcaacaaggtggaggcctgcgtgttggatgaacttgacatggagctagccttcctgaccattgtctgcatggaagagtttgaggacatggagagaagtctgccactatgcctgcagctctacgccccagggctgtcgccagacactatcatggagtgtgcaatgggggaccgcggcatgcagctcatgcacgccaacgcccagcggacagatgctctccagccaccacacgagtatgtgccctgggtcaccgtcaatgggaaacccttggaagatcagacccagctccttacccttgtctgccagttgtaccagggcaagaagccggatgtctgcccttcctcaaccagctccctcaggagtgtttgcttcaagtgatggccggtgagctgcggagagctcatggaaggcgagtgggaacccggctgcctgcctttttttctgatccagaccctcggcacctgctacttaccaactggaaaattttatgcatcccatgaagcccagatacacaaaattccaccccatgatcaagaatcctgctccactaagaatggtgctaaagtaaaactagtttaataagcc

SEQ ID NO: 315648 - DNA, 1141 bp, Homo sapiens
tggcaggggtgggggtgggacactcagaggaaggagtggaggagggagagacgctggcccgggacccgaggggcgtgggcatcgggaggcgggcccgggttaggggcgggaccgccgcctggttaaaggcgcttatttcccaggcagccgctgcagtcgccacacctttgcccctgctgcgatgaccctgtcgccacttctgctgttcctgccaccgctgctgctgctgctggacgtccccacggcggcggtgcaggcgtcccctctgcaagcgttagacttctttgggaatgggccaccagttaactacaagacaggcaatctatacctgcgggggcccctgaagaagtccaatgcaccgcttgtcaatgtgaccctctactatgaagcactgtgcggtggctgccgagccttcctgatccgggagctcttcccaacatggctgttggtcatggagatcctcaatgtcacgctggtgccctacggaaacgcacaggaacaaaatgtcagtggcaggtgggagttcaagtgccagcatggagaagaggagtgcaaattcaacaaggtggaggcctgcgtgttggatgaacttgacatggagctagccttcctgaccattgtctgcatggaagagtttgaggacatggagagaagtctgccactatgcctgcagctctacgccccagggctgtcgccagacactatcatggagtgtgcaatgggggaccgcggcatgcagctcatgcacgccaacgcccagcggacagatgctctccagccaccacacgagtatgtgccctgggtcaccgtcaatgggaaacccttggaagatcagacccagctccttacccttgtctgccagttgtaccagggcaagaagccggatgtctgcccttcctcaaccagctccctcaggagtgtttgcttcaagtgatggccggtgagctgcggagagctcatggaaggcgagtgggaacccggctgcctgcctttttttctgatccagaccctcggcacctgctacttaccaactggaaaattttatgcatcccatgaagcccagatacacaaaattccaccccatgatcaagaatcctgctccactaagaatggtgctaaagtaaaactagtttaataagcc

SEQ ID NO: 315649 - DNA, 1825 bp, Homo sapiens
tggcaggggtgggggtgggacactcagaggaaggagtggaggagggagagacgctggcccgggacccgaggggcgtgggcatcgggaggcgggcccgggttaggggcgggaccgccgcctggttaaaggcgcttatttcccaggcagccgctgcagtcgccacacctttgcccctgctgcgatgaccctgtcgccacttctgctgttcctgccaccgctgctgctgctgctggacgtccccacggcggcggtgcaggcgtcccctctgcaagcgttagacttctttgggaatgggccaccagttaactacaagacaggcaatctatacctgcgggggcccctgaagaagtccaatgcaccgcttgtcaatgtgaccctctactatgaagcactgtgcggtggctgccgagccttcctgatccgggagctcttcccaacatggctgttggtcatggagatcctcaatgtcacgctggtgccctacggaaacgcacaggaacaaaatgtcagtggcaggtgggagttcaagtgccagcatggagaagaggagtgcaaattcaacaaggtggaggcctgcgtgttggatgaacttgacatggagctagccttcctgaccattgtctgcatggaagagtttgaggacatggagagaagtctgccactatgcctgcagctctacgccccagggctgtcgccagacactatcatggagtgtgcaatgggggaccgcggcatgcagctcatgcacgccaacgcccagcggacagatgctctccagccaccacacgagtatgtgccctgggtcaccgtcaatgggaaacccttggaagatcagacccagctccttacccttgtctgccagttgtaccagggcaagaagccggatgtctgcccttcctcaaccagctccctcaggagtgtttgcttcaagtgatggccggtgagctgcggagagctcatggaaggcgagtgggaacccggctgcctgcctttttttctgatccagaccctcggcacctgctacttaccaactggaaaattttatgcatcccatgaagcccagatacacaaaattccaccccatgatcaagaatcctgctccactaagaatggtgctaaagtaaaactagtttaataagccaaaaaaaaaaaaaaaaaaaaaaaaaaaaaaaaaaaaaaaaaaaaaaaaagaaaaaaaaaaaaaaaaaaaaaaaaaagaagagggagggcggcgcgcgcagccaaaaagaaactccacccgcggcgggggcgcgccctagattccagcgcgcgcacgcacccgaggttgttttagcgagaaaagagggggcgcgccaactaagagagaggcgacgactatataataaacgcgagcgagagcgagcgcgcgcggcgccagcgggattaaaaacaacaccggccgccagagcgcggggggaaaacaaaaaagccgccgcacacgcggagaagcccaaccatgggtcggggaggaggaagcaaaccaccactacatcacgagcggggggggggggagcaaacaactacaatgtagtgggacgaccaaacacacatcccacctctcacgagagcagagaaatttataaaaggaccccgccaccaggcggaggcgggaagaaacaaatacaacacgtctgcaacgaggcgagcacaattagtcgaggcgggactacacaaccacacacacgccgcataaaacttagctacccggggggacgacgacaaaaacgaacagcgctgtgcctcacaccaacggagcagtaggatgtaacttaagcaagcaacagaatattatcacccgagcggg

SEQ ID NO: 315650 - DNA, 1086 bp, Homo sapiens
tggcaggggtgggggtgggacactcagaggaaggagtggaggagggagagacgctggcccgggacccgaggggcgtgggcatcgggaggcgggcccgggttaggggcgggaccgccgcctggttaaaggcgcttatttcccaggcagccgctgcagtcgccacacctttgcccctgctgcgatgaccctgtcgccacttctgctgttcctgccaccgctgctgctgctgctggacgtccccacggcggcggtgcaggcgtcccctctgcaagcgttagacttctttgggaatgggccaccagttaactacaagacaggcaatctatacctgcgggggcccctgaagaagtccaatgcaccgcttgtcaatgtgaccctctactatgaagcactgtgcggtggctgccgagccttcctgatccgggagctcttcccaacatggctgttggtcatggagatcctcaatgtcacgctggtgccctacggaaacgcacagaacaattcaacaaggtggaggcctgcgtgttggatgaacttgacatggagctagccttcctgaccattgtctgcatggaagagtttgaggacatggagagaagtctgccactatgcctgcagctctacgccccagggctgtcgccagacactatcatggagtgtgcaatgggggaccgcggcatgcagctcatgcacgccaacgcccagcggacagatgctctccagccaccacacgagtatgtgccctgggtcaccgtcaatgggaaacccttggaagatcagacccagctccttacccttgtctgccagttgtaccagggcaagaagccggatgtctgcccttcctcaaccagctccctcaggagtgtttgcttcaagtgatggccggtgagctgcggagagctcatggaaggcgagtgggaacccggctgcctgcctttttttctgatccagaccctcggcacctgctacttaccaactggaaaattttatgcatcccatgaagcccagatacacaaaattccaccccatgatcaagaatcctgctccactaagaatggtgctaaagtaaaactagtttaataagcc

SEQ ID NO: 315651 - DNA, 1052 bp, Homo sapiens
tggcaggggtgggggtgggacactcagaggaaggagtggaggagggagagacgctggcccgggacccgaggggcgtgggcatcgggaggcgggcccgggttaggggcgggaccgccgcctggttaaaggcgcttatttcccaggcagccgctgcagtcgccacacctttgcccctgctgcgatgaccctgtcgccacttctgctgttcctgccaccgctgctgctgctgctggacgtccccacggcggcggtgcaggcgtcccctctgcaagcgttagacttctttgggaatgggccaccagttaactacaagacaggcaatctatacctgcgggggcccctgaagaagtccaatgcaccgcttgtcaatgtgaccctctactatgaagcactgtgcggtggctgccgagccttcctgatccgggagctcttcccaacatggctgttggtcatggagatcctcaatgtcacgctggtgccctacggaaacgcacaggaacaaaatgtcagtggcaggtgggagttcaagtgccagcatggagaagaggagtgcaaattcaacaaggtggaggcctgcgtgttggatgaacttgacatggagctagccttcctgaccattgtctgcatggaagagtttgaggacatggagagaagtctgccactatgcctgcagctctacgccccagggctgtcgccagacactatcatggagtgtgcaatgggggaccgcggcatgcagctcatgcacgccaacgcccagcggacagatgctctccagccaccacacgagtatgtgccctgggtcaccgtcaatgggaaacccttggaagatcagacccagctccttacccttgtctgccagttgtaccagggcaagaagccggatgtctgcccttcctcaaccagctccctcaggagtgtttgcttcaagtgatggccggtgagctgcggagagctcatggaaggcgagtgggaacccggctgcctgcctttttttctgataatcctgctccactaagaatggtgctaaagtaaaactagtttaataagcc

SEQ ID NO: 315652 - DNA, 888 bp, Homo sapiens
ggtacaactggcagacaagggtaaggagctgggtctgatcttccaagggtttcccattgacggtgacccagggcacatactcgtgtggtggctggagagcatctgtccgctgggcgttggcgtgcatgagctgcatgccgcggtcccccattgccaccgctgctgctgctgctggacgtccccacggcggcggtgcaggcgtcccctctgcaagcgttagacttctttgggaatgggccaccagttaactacaagacaggcaatctatacctgcgggggcccctgaagaagtccaatgcaccgcttgtcaatgtgaccctctactatgaagcactgtgcggtggctgcctagccttcctgaccattgtctgcatggaagagtttgaggacatggagagaagtctgccactatgcctgcagctctacgccccagggctgtcgccagacactatcatggagtgtgcaatgggggaccgcggcatgcagctcatgcacgccaacgcccagcggacagatgctctccagccaccacacgagtatgtgccctgggtcaccgtcaatgggaaacccttggaagatcagacccagctccttacccttgtctgccagttgtaccagggcaagaagccggatgtctgcccttcctcaaccagctccctcaggagtgtttgcttcaagtgatggccggtgagctgcggagagctcatggaaggcgagtgggaacccggctgcctgcctttttttctgatccagaccctcggcacctgctacttaccaactggaaaattttatgcatcccatgaagcccagatacacaaaattccaccccatgatcaagaatcctgctccactaagaatggtgctaaagtaaaactagtttaataagcc

SEQ ID NO: 315653 - DNA, 1083 bp, Homo sapiens
tggcaggggtgggggtgggacactcagaggaaggagtggaggagggagagacgctggcccgggacccgaggggcgtgggcatcgggaggcgggcccgggttaggggcgggaccgccgcctggttaaaggcgcttatttcccaggcagccgctgcagtcgccacacctttgcccctgctgcgatgaccctgtcgccacttctgctgttcctgccaccgctgctgctgctgctggacgtccccacggcggcggtgcaggcgtcccctctgcaagcgttagacttctttgggaatgggccaccagttaactacaagacaggcaatctatacctgcgggggcccctgaagaagtccaatgcaccgcttgtcaatgtgaccctctactatgaagcactgtgcggtggctgccgagccttcctgatccgggagctcttcccaacatggctgttggtcatggagatcctcaatgtcacgctggtgccctacggaaacgcacaggaacaaaatgtcagtggcaggtgggagttcaagtgccagcatggagaagaggagtgcaaattcaacaaggtggaggcctgcgtgttggatgaacttgacatggagctagccttcctgaccattgtctgcatggaagagtttgaggacatggagagaagtctgccactatgcctgcagctctacgccccagggctgtcgccagacactatcatggagtgtgcaatgggggaccgcggcatgcagctcatgcacgccaacgcccagcggacagatgctctccagccaccacacgagtatgtgccctgggtcaccgtcaatgggaaacccttggaagatcagacccagcaaccagctccctcaggagtgtttgcttcaagtgatggccggtgagctgcggagagctcatggaaggcgagtgggaacccggctgcctgcctttttttctgatccagaccctcggcacctgctacttaccaactggaaaattttatgcatcccatgaagcccagatacacaaaattccaccccatgatcaagaatcctgctccactaagaatggtgctaaagtaaaactagtttaataagcc

SEQ ID NO: 315654 - DNA, 855 bp, Homo sapiens
tggcaggggtgggggtgggacactcagaggaaggagtggaggagggagagacgctggcccgggacccgaggggcgtgggcatcgggaggcgggcccgggttaggggcgggaccgccgcctggttaaaggcgcttatttcccaggcagccgctgcagtcgccacacctttgcccctgctgcgatgaccctgtcgccacttctgctgttcctgccaccgctgctgctgctgctggacgtccccacggcggcggtgcaggcgtcccctctgcaagcgttagacttctttgggaatgggccaccagttaactacaagacaggcaatctatacctgcgggggcccctgaagaagtccaatgcaccgcttgtcaatgtgaccctctactatgaagcactgtgcggtggctgccgagccttcctgatccgggagctcttcccaacatggctgttggtcatggagatcctcaatgtcacgctggtgccctacggaaacgcacaggaacaaaatgtcagtggcaggtgggagttcaagtgccagcatggagaagaggagtgcaaattcaacaaggtggaggcctgcgtgttggatgaacttgacatggagctagccttcctgaccattgtctgcatggaagagtttgaggacatggagagaagtctgccactatgcctgcagctctacgccccagggctgtcgccagacactatcatggagtgtgcaatgggggaccgcggcatgcagctcatgcacgcctggtgccctacggaaacgcacaggaacaaaatgtcagtggcaggtgggagttcaagtgcagcatggagaagaggagtcaattccccaggggccggtaccgagcc

SEQ ID NO: 315655 - DNA, 401 bp, Homo sapiens
accaaggaggagatcgttgacaagtatgacttatttgttggcagccaggccacagattttggggaggccttaatgggaaacccttggaagatcagacccagctccttacccttgtctgccagttgtaccagggcaagaagccggatgtctgcccttcctcaaccagctccctcaggagtgtttgcttcaagtgatggccggtgagctgcggagagctcatggaaggcgagtgggaacccggctgcctgcctttttttctgatccagaccctcggcacctgctacttaccaactggaaaattttatgcatcccatgaagcccagatacacaaaattccaccccatgatcaagaatcctgctccactaagaatggtgctaaagtaaaactagtttaataagcc

SEQ ID NO: 315656 - DNA, 740 bp, Homo sapiens
ggtacaactggcagacaagggtaaggagctgggtctgatcttccaagggtttcccattgacggtgacccagggcacatactcgtgtggtggctggagagcatctgtccgctgggcgttggcgtgcatgagctgcatgccgcggtcccccattgccaccgctgctgctgctgctggacgtccccacggcggcggtgcaggcgtcccctctgcaagcgttagacttctttgggaatgggccaccagttaactacaagacaggcaatctatacctgcgggggcccctgaagaagtccaatgcaccgcttgtcaatgtgaccctctactatgaagcactgtgcggtggctgcctagccttcctgaccattgtctgcatggaagagtttgaggacatggagagaagtctgccactatgcctgcagctctacgccccagggctgtcgccagacactatcatggagtgtgcaatgggggaccgcggcatgcagctcatgcacgcccaaccagctccctcaggagtgtttgcttcaagtgatggccggtgagctgcggagagctcatggaaggcgagtgggaacccggctgcctgcctttttttctgatccagaccctcggcacctgctacttaccaactggaaaattttatgcatcccatgaagcccagatacacaaaattccaccccatgatcaagaatcctgctccactaagaatggtgctaaagtaaaactagtttaataagcc

SEQ ID NO: 315657 - DNA, 478 bp, Homo sapiens
actaccaagtggggttgagagaagtggggaactgcccagggctacacctgcctcccacgccttcctaatccacagacaggcaatctatacctgcgggggcccctgaagaagtccaatgcaccgcttgtcaatgtgaccctctactatgaagcactgtgcggtggctgccgagccttcctgatccgggagctcttcccaacatggctgttggtcatggagatcctcaatgtcacgctggtgccctacggaaacgcacaggtgtgtgggcgctggggaaactgaggcacgtgggcaggggagcaggggacccagcctaccagcaggctctcaccctgctgccttgcaggaacaaaatgtcagtggcaggtgggagttcaagtgccagcatggagaagaggagtgcaaattcaacaaggtggagatagaagagtgccccagggccccacactggggtgggggaaaactgtcccacgtacag

SEQ ID NO: 315658 - DNA, 1262 bp, Homo sapiens
  misc_feature (2)..(2): n is a, c, g, or t
  misc_feature (8)..(8): n is a, c, g, or t
  misc_feature (27)..(27): n is a, c, g, or t
  misc_feature (77)..(77): n is a, c, g, or t
  misc_feature (96)..(96): n is a, c, g, or t
cncagggnatcccccttggatttggcntgggttcctgatccccccatgagggtgccagaccaaaagaagggtgccgnttgacgccttgccggttgngtattcaacagcctccctcagtcgttacaggcccctccccctccagctgaagtatcttcaagagtatttaaagggccagcaccaattgcccccctctttcatttttctctttttccccttttgggagccagacattaaaagactaggaaattcaaaaacaactatggggaaaataagaaaatttagaaaattagacagtgactgcatgctcagggaaaggtacagctcaaaaaagatctggaaagaccttaaatttccatcttgggttgatcctctgcacagaaacagcctgcaacaatcaaaacaagaacaataaataaaaataacaaaaacagcaaacctagggcaaggggaggaagaatctaatttctagagttaccacattattagacttaacatgtccagtgttcagcaaaaaaaaaaaaaaaaaaaaaaaaagcctacaaagagacaggaaaatatggccatttaaagggaaaacaaaatcagcagaaactatccctaaaagaaaggccagatgatagatctactagacagagactctaaaacatctgccttaaagatgctgagaaaactaaaggaaaacctgcagaaagtcaagaaaatcatgcatgaacaaaatggcagtatcaatgaagagatagaaaacctataaagagaaacaaacaaaaaaaggaattgttgagcctgagaaacagaaaagaagattgaagaaaagtgaacggatcataaggggtatgtgggctaccaccaagcagaccaatatatctattgtgggagtcccagatggtgaagagagaaagaggcagagacaactttgaaaaaataatggctgaaaaattcccaggtttgatgaaacacacaaatataaacatctaaagaagctcaataaactccagatgatcaaactttcgaaaaccagaaaaagaatcttgaaaaccgcaagaggaaagctactcattacatgcaaggtgtattagtctatttttacactgctctagagatactacccaagactgggtaatttataaaggaaagaggtttaattgatgactcacagttccacataacaggggaggcctcaagaaacttaccatcacggtgaaggtgaagggtacctttgcacatggcggcaggagagagaagtgtgtgagagcccaggaaaa

SEQ ID NO: 315659 - DNA, 577 bp, Homo sapiens
gagaggatcctgggataatggcagagcaggaagctgtgtccccacctagaccacagttgcaccagaaggacctgtctgatgtaaccattttggaactctggaagctactgaaggcttgcaacttccaggggaggcttggatggcaaattggggttaattttggtttcagctcttggcacagcagcggctacccatgccccacagacagccatgcacatgttcttggagcacctcgcacacagcttgaggggttcagggtgagcaagaaggatccttttctccaaatagtgggtatctgtgctcaggatccctgattgctgcttctgatcacagaggtgcagacaaagaggtgcgctgcgctgccgttgttatcacacctccctcagtcgttacaggcccctccccctccagctgaagtatcttcaagagtatttaaagggccagcaccaattgcccccctctttcatttttctctttttccccttttgggagccagacattaaaagactaggaaattcaaaaacaactatggggaaaataagaaaatttagaaaattagacagtgactgcatgctca

SEQ ID NO: 315660 - DNA, 4183 bp, Homo sapiens
  misc_feature (8)..(8): n is a, c, g, or t
  misc_feature (4178)..(4180): n is a, c, g, or t
  misc_feature (4182)..(4183): n is a, c, g, or t
tccggccncagagaactcagcctcattcctgctttaaaatctctcggccacctttgatgaggggactgggcagttctagacagtcccgaagttctcaaggcacaggtctcttcctggtttgactgtccttaccccggggaggcagtgcagccagctgcaagccccacagtgaagaacatctgagctcaaatccagataagtgacataagtgacctgctttgtaaagccatagagatggcctgtccttggaaatttctgttcaagaccaaattccaccagtatgcaatgaatggggaaaaagacatcaacaacaatgtggagaaagccccctgtgccacctccagtccagtgacacaggatgaccttcagtatcacaacctcagcaagcagcagaatgagtccccgcagcccctcgtggagacgggaaagaagtctccagaatctctggtcaagctggatgcaaccccattgtcctccccacggcatgtgaggatcaaaaactggggcagcgggatgactttccaagacacacttcaccataaggccaaagggattttaacttgcaggtccaaatcttgcctggggtccattatgactcccaaaagtttgaccagaggacccagggacaagcctacccctccagatgagcttctacctcaagctatcgaatttgtcaaccaatattacggctccttcaaagaggcaaaaatagaggaacatctggccagggtggaagcggtaacaaaggagatagaaacaacaggaacctaccaactgacgggagatgagctcatcttcgccaccaagcaggcctggcgcaatgccccacgctgcattgggaggatccagtggtccaacctgcaggtcttcgatgcccgcagctgttccactgcccgggaaatgtttgaacacatctgcagacacgtgcgttactccaccaacaatggcaacatcaggtcggccatcaccgtgttcccccagcggagtgatggcaagcacgacttccgggtgtggaatgctcagctcatccgctatgctggctaccagatgccagatggcagcatcagaggggaccctgccaacgtggaattcactcagctgtgcatcgacctgggctggaagcccaagtacggccgcttcgatgtggtccccctggtcctgcaggccaatggccgtgaccctgagctcttcgaaatcccacctgaccttgtgcttgaggtggccatggaacatcccaaatacgagtggtttcgggaactggagctaaagtggtacgccctgcctgcagtggccaacatgctgcttgaggtgggcggcctggagttcccagggtgccccttcaatggctggtacatgggcacagagatcggagtccgggacttctgtgacgtccagcgctacaacatcctggaggaagtgggcaggagaatgggcctggaaacgcacaagctggcctcgctctggaaagaccaggctgtcgttgagatcaacattgctgtgctccatagtttccagaagcagaatgtgaccatcatggaccaccactcggctgcagaatccttcatgaagtacatgcagaatgaataccggtcccgtgggggctgcccggcagactggatttggctggtccctcccatgtctgggagcatcacccccgtgtttcaccaggagatgctgaactacgtcctgtcccctttctactactatcaggtagaggcctggaaaacccatgtctggcaggacgagaagcggagacccaagagaagagagattccattgaaagtcttggtcaaagctgtgctctttgcctgtatgctgatgcgcaagacaatggcgtcccgagtcagagtcaccatcctctttgcgacagagacaggaaaatcagaggcgctggcctgggacctgggggccttattcagctgtgccttcaaccccaaggttgtctgcatggataagtacaggctgagctgcctggaggaggaacggctgctgttggtggtgaccagtacgtttggcaatggagactgccctggcaatggagagaaactgaagaaatcgctcttcatgctgaaagagctcaacaacaaattcaggtacgctgtgtttggcctcggctccagcatgtaccctcggttctgcgcctttgctcatgacattgatcagaagctgtcccacctgggggcctctcagctcaccccgatgggagaaggggatgagctcagtgggcaggaggacgccttccgcagctgggccgtgcaaaccttcaaggcagcctgtgagacgtttgatgtccgaggcaaacagcacattcagatccccaagctctacacctccaatgtgacctgggacccgcaccactacaggctcgtgcaggactcacagcctttggacctcagcaaagccctcagcagcatgcatgccaagaacgtgttcaccatgaggctcaaatctcggcagaatctacaaagtccgacatccagccgtgccaccatcctggtggaactctcctgtgaggatggccaaggcctgaactacctgccgggggagcaccttggggtttgcccaggcaaccagccggccctggtccaaggcatcctggagcgagtggtggatggccccacaccccaccagacagtgcgcctggaggccctggatgagagtggcagctactgggtcagtgacaagaggctgcccccctgctcactcagccaggccctcacctacttcctggacatcaccacacccccaacccagctgctgctccaaaagctggcccaggtggccacagaagagcctgagagacagaggctggaggccctgtgccagccctcagagtacagcaagtggaagttcaccaacagccccacattcctggaggtgctagaggagttcccgtccctgcgggtgtctgctggcttcctgctttcccagctccccattctgaagcccaggttctactccatcagctcctcccgggatcacacgcccacggagatccacctgactgtggccgtggtcacctaccacacccgagatggccagggtcccctgcaccacggcgtctgcagcacatggctcaacagcctgaagccccaagacccagtgccctgctttgtgcggaatgccagcggcttccacctccccgaggatccctcccatccttgcatcctcatcgggcctggcacaggcatcgcgcccttccgcagtttctggcagcaacggctccatgactcccagcacaagggagtgcggggaggccgcatgaccttggtgtttgggtgccgccgcccagatgaggaccacatctaccaggaggagatgctggagatggcccagaagggggtgctgcatgcggtgcacacagcctattcccgcctgcctggcaagcccaaggtctatgttcaggacatcctgcggcagcagctggccagcgaggtgctccgtgtgctccacaaggagccaggccacctctatgtttgcggggatgtgcgcatggcccgggacgtggcccacaccctgaagcagctggtggctgccaagctgaaattgaatgaggagcaggtcgaggactatttctttcagctcaagagccagaagcgctatcacgaagatatctttggtgctgtatttccttacgaggcgaagaaggacagggtggcggtgcagcccagcagcctggagatgtcagcgctctgagggcctacaggaggggttaaagctgccggcacagaacttaaggatggagccagctctgcattatctgaggtcacagggcctggggagatggaggaaagtgatatcccccagcctcaagtcttatttcctcaacgttgctccccatcaagccctttacttgacctcctaacaagtagcaccctggattgatcggagcctcctctctcaaactggggcctccctggtcccttggagacaaaatcttaaatgccaggcctggcaagtgggtgaaagatggaacttgctgctgagtgcaccacttcaagtgaccaccaggaggtgctatcgcaccactgtgtatttaactgccttgtgtacagttatttatgcctctgtatttaaaaaactaacacccagtctgttccccatggccacttgggtcttccctgtatgattccttgatggagatatttacatgaattgcattttactttaatcacaannnann

SEQ ID NO: 315661 - DNA, 413 bp, Homo sapiens
ctggcctgtgaggtatccattagtctttggtggatttagtcattgtgagtctgtagatcaccagtgagtgtcttgctaaagttcaggtctgggccagagaaggacgtggttagtttatcaggaccacgccaacttactgcccctttgggggctggtgatcagccttccctggcagtcctttctccatgcgccaccttcttcctgccttttgctcttagagccaggtctttagagcctcctttcccctgcagctggagaatagagggtgtctgcctgggggcctcgctacctgctgagaatcctgaatggggcctcttttccatcctgacaccttccttccccatccaggcagctactgggtcagtgacaagaggctgcccccctgctcactcagccaggccctcacctacttc

SEQ ID NO: 315662 - DNA, 539 bp, Homo sapiens
gcgcgcgctcccggaacgcgcgcaccgcagacggcgcggatcgcagggagccggtccgccgccggaacgggagcctgggtgtgcgtgtggagtccggactcgtgggagacgatcgcgatgaacacggtgctgtcgcgggcgaactcactgttcgccttctcgctgagcgtgatggcggcgctcaccttcggctgcttcatcaccaccgccttcaaagacaggagcgtcccggtgcggctgcacgtctcgcggatcatgctgtgagtgaggccgggccggcggtgcaggacgccgggaccgggctggggcggaagccgaagccgggccgccgcgccggggctgccgtgccggggccgcgggcagggcgtccggatcgccctcctgagcggcagttcgcccccgagggcggtcgtcaggggtggacgtcgcaggcttttccggcgtcccctcggaacttgcacccctccaccgtaaattcccgggcttgctcttaaattttaattttgagcgttcctcaggtcggtgcctccgcttgcttc

SEQ ID NO: 315663 - DNA, 4576 bp, Homo sapiens
gcgcgcgctcccggaacgcgcgcaccgcagacggcgcggatcgcagggagccggtccgccgccggaacgggagcctgggtgtgcgtgtggagtccggactcgtgggagacgatcgcgatgaacacggtgctgtcgcgggcgaactcactgttcgccttctcgctgagcgtgatggcggcgctcaccttcggctgcttcatcaccaccgccttcaaagacaggagcgtcccggtgcggctgcacgtctcgcggatcatgctaaaaaatgtagaagatttcactggacctagagaaagaagtgatctgggatttatcacatttgatataactgctgatctagagaatatatttgattggaatgttaagcagttgtttctttatttatcagcagaatattcaacaaaaaataatgctctgaaccaagttgtcctatgggacaagattgttttgagaggtgataatccgaagctgctgctgaaagatatgaaaacaaaatattttttctttgacgatggaaatggtctcaagggaaacaggaatgtcactttgaccctgtcttggaacgtcgtaccaaatgctggaattctacctcttgtgacaggatcaggacacgtatctgtcccatttccagatacatatgaaataacgaagagttattaaattattctgaatttgaaacaacatatttttatacttaatgaattgtatctcattaatctcttcccttacatcttcatgtattgttggtttgttttttggttttgggttttttttttttttttttttggtataagaactaacatcaaaaggcctgtttaaagggaaaggttaatgggctacttaatattatgaacaaaacaaaaaaacaaggctgccacagtggaatattatcttacaagaataagaactacataaaacagatttgtaaaaaatacatatttgaagtattccctgtatttccattattctttatggaatataaagtaagcatgaaaggtagttaaaactttcaggtgcctgtagagtcataataactgtattttatgccttgcattcacgcaaattcacattggatgtgatttaaaagtagacattctctttttcctcttttaggatatgtttgattactggaaaattaatatggttatttgttagaagtctggtttataaaaaagccaaaagtgatggaatttattccatttgtcttaggaaggcccataatacttgtttttcttacatgtgactagcaactttctccacttaaagactaaatacctctttatatgatgtaaattattctaattcattttaaaatcttttaggtcagcaaaatgtgtgtcttcagtgctttctctaaaaacgttcctttatagctttgtacttttttttttagcgttgccattgaaagttaaaatgtttgcatggtttaccctctgagttatgtttcttctagtgagcatgcctgctgtcactaagtgaattatttactactttttgtaggtctatattttaataattattgggataataataattgtggtatgctttccatttacaaaccactcatatactttagtgtatgtcatcctcaataatctaatgaggtaagtagtataagtgttagctctttgcagataagaaactgaaacccagaagtttattgaattgcttcattgttacctagccagcaaggagtggaattaaaacttgaactcagatcttctaattttctgagctcatcctttctcttatacctcagattgcagactaatcaaattttacttaaaaccttcctgatatttttgttaccctggacaccctttctattctagaaaaggtttcccattttatatggaagtgactaattttcaagctggcaacaacttatatcgaggtaatattttgattctctgaataaattcatttcacttatattaaaagcataaggaaatctacatgtatgtaaaaataacttagaaattcagtacataatacatgattgaatacatgatcgtatttaacatgttttttttttctgcagtggacaaataaacatcctcaaagtagcaactgcaaatcagttacccttagaaaagcaagaccaaacactgtagttacactattagcagtgaccaaaaagggctaatattttctaagaatagtttaaattacagacatttgttatatttaccttatgtgaaatacatcactatttaattacattaattttaacatctgttgtgtggagttgtatagttcatgcaaaagcctgtgggtatgggtttttcaaaccagcagaaaggtcaaaggtacctgaatgctaaactgcctggctcccagctttttcattaaacttttcagggtcttggtttctttatctgtaaaatgacagagttggaccagttaactttaatggccatccttttacaccacacaagttgataaaatttatctgttcagcaaagagattgaacaaaaaagcacgttagtaatatgaagacaggaaaacgaatgaaagtctaacacataactcatattgatttactttatttctgttagattttacactctgaaaatttcacctcatttagtttgtacaaatactagacatggaaacttaaaatgtgcaggtgtcaaagcttaaaaatcaggtgtgtcctctttaaaggcatgtgcgataagcctgcagtcttaaccagacctggtaccagtttaacagttcattatacttctgtgatgagtggatctgttagtctggtagagattaatgttgaaatttacttgaattacagttatttgacaagcccactttttttggagtttggtgaggaagataagtaaaaatgcccaactagtacaatgtggagaaagttttctgtttgcttgactaagggaaattgctcagaaaaagaatgctccaacatgggaataaggaccttcagtctcaggaactcatttttgggtgcagtttctacatttaaaaaattgacttgtgttcagtttgataaccagttcatttgctttagtctcagtgttttaaagaagtctcataatgttctacaaagacacaaagcttcaggcttatacaaaactgagtatgattagaaatacctgagcccagaaatgattctgagaaaagagaataatttgaagacacttatttaaaagtaattatggttagaaatgaattaatttaaaaatgtgttcacatatccctttctctaacagtttaacctagacaaacatctgtatcagtatttttttattcccctgattgattacatttggtttctttattctgaaaggaaaataacaaaaacttcagaaattcctaagggtgtaataagaaagtgggttttgagtttcctttcctggaattattttacagttctttggtgggtctcgtcagccaattcatagctgggctttaagattatcatcttagagatgatagatgggctttttaaagatttcatcttagagatgaaaagctgggctttttctctaagatgataatcttaaagcccagctattaattgataatgaacatttttcactatttttttttctatctgaagcttagagatctagagctttggatctttcgggtatatgtcaatggaggtattattttataatactttgcattgacatgaagtgggttcatgggggaaaaccatgagctgtgaacattggtagcaaacaagcatatattcatttcaaaactttccttgcttttagcagagagaagcctgtatatgttacatgtgtgactttcagtagtttaaagagatgtttcaaaaaattgttgcatgtttttgatgcaatttgggaaattgtttacttcacaatgtagtcattcataaaaaaattcatgaaaatactgaacatatgtttgaggatttttcttttcctttttaaatttttttattttttctgagacggagatctgctcttacgcccaggctagagtgaagtggcgcgatcttggcttactgcaacctccaccccccaggttcaagcgattctcctgcctcagcctccggagtagctgggattacaggcgcccgccaccacgtccggctaatttttgtattttcagtagagacggggttttgctatgttggccaggctggtctcaaactcctgacctcaagtgatccacctgcctcggcctcccaaagtgttaggataacaggtgtgagccaccgtgcccggctgaagatttttcttaattgcaataaatattcagcattttttctaatgaaaatgaattttgtttaccagtaaaagtatgcattttaaaagactttcagatttatgctttttacgtgaagctgctaaactaaaagtaaatggaagaaaccaagtctagtaggttttttctttttttttgtgggggtgggatgggggaggttagttacacttaaaatatcttctccagagactgtatgctcctatactagactgtaagctctttgagggcagtctgtcagatttatctttgtatcttccccagcgcctagtgtagtgccttgcacataataggcgcccaataaatattgatgaagaatga

SEQ ID NO: 315664 - DNA, 4880 bp, Homo sapiens
gcgcgcgctcccggaacgcgcgcaccgcagacggcgcggatcgcagggagccggtccgccgccggaacgggagcctgggtgtgcgtgtggagtccggactcgtgggagacgatcgcgatgaacacggtgctgtcgcgggcgaactcactgttcgccttctcgctgagcgtgatggcggcgctcaccttcggctgcttcatcaccaccgccttcaaagacaggagcgtcccggtgcggctgcacgtctcgcggatcatgctaaaaaatgtagaagatttcactggacctagagaaagaagtgatctgggatttatcacatttgatataactgctgatctagagaatatatttgattggaatgttaagcagttgtttctttatttatcagcagaatattcaacaaaaaataatgctctgaaccaagttgtcctatgggacaagattgttttgagaggtgataatccgaagctgctgctgaaagatatgaaaacaaaatattttttctttgacgatggaaatggtctcaagggaaacaggaatgtcactttgaccctgtcttggaacgtcgtaccaaatgctggaattctacctcttgtgacaggatcaggacacgtatctgtcccatttccagatacatatgaaataacgaagagttattaaattattctgaatttgaaacaacatatttttatacttaatgaattgtatctcattaatctcttcccttacatcttcatgtattgttggtttgttttttggttttgggttttttttttttttttttttggtataagaactaacatcaaaaggcctgtttaaagggaaaggttaatgggctacttaatattatgaacaaaacaaaaaaacaaggctgccacagtggaatattatcttacaagaataagaactacataaaacagatttgtaaaaaatacatatttgaagtattccctgtatttccattattctttatggaatataaagtaagcatgaaaggtagttaaaactttcaggtgcctgtagagtcataataactgtattttatgccttgcattcacgcaaattcacattggatgtgatttaaaagtagacattctctttttcctcttttaggatatgtttgattactggaaaattaatatggttatttgttagaagtctggtttataaaaaagccaaaagtgatggaatttattccatttgtcttaggaaggcccataatacttgtttttcttacatgtgactagcaactttctccacttaaagactaaatacctctttatatgatgtaaattattctaattcattttaaaatcttttaggtcagcaaaatgtgtgtcttcagtgctttctctaaaaacgttcctttatagctttgtacttttttttttagcgttgccattgaaagttaaaatgtttgcatggtttaccctctgagttatgtttcttctagtgagcatgcctgctgtcactaagtgaattatttactactttttgtaggtctatattttaataattattgggataataataattgtggtatgctttccatttacaaaccactcatatactttagtgtatgtcatcctcaataatctaatgaggtaagtagtataagtgttagctctttgcagataagaaactgaaacccagaagtttattgaattgcttcattgttacctagccagcaaggagtggaattaaaacttgaactcagatcttctaattttctgagctcatcctttctcttatacctcagattgcagactaatcaaattttacttaaaaccttcctgatatttttgttaccctggacaccctttctattctagaaaaggtttcccattttatatggaagtgactaattttcaagctggcaacaacttatatcgaggtaatattttgattctctgaataaattcatttcacttatattaaaagcataaggaaatctacatgtatgtaaaaataacttagaaattcagtacataatacatgattgaatacatgatcgtatttaacatgttttttttttctgcagtggacaaataaacatcctcaaagtagcaactgcaaatcagttacccttagaaaagcaagaccaaacactgtagttacactattagcagtgaccaaaaagggctaatattttctaagaatagtttaaattacagacatttgttatatttaccttatgtgaaatacatcactatttaattacattaattttaacatctgttgtgtggagttgtatagttcatgcaaaagcctgtgggtatgggtttttcaaaccagcagaaaggtcaaaggtacctgaatgctaaactgcctggctcccagctttttcattaaacttttcagggtcttggtttctttatctgtaaaatgacagagttggaccagttaactttaatggccatccttttacaccacacaagttgataaaatttatctgttcagcaaagagattgaacaaaaaagcacgttagtaatatgaagacaggaaaacgaatgaaagtctaacacataactcatattgatttactttatttctgttagattttacactctgaaaatttcacctcatttagtttgtacaaatactagacatggaaacttaaaatgtgcaggtgtcaaagcttaaaaatcaggtgtgtcctctttaaaggcatgtgcgataagcctgcagtcttaaccagacctggtaccagtttaacagttcattatacttctgtgatgagtggatctgttagtctggtagagattaatgttgaaatttacttgaattacagttatttgacaagcccactttttttggagtttggtgaggaagataagtaaaaatgcccaactagtacaatgtggagaaagttttctgtttgcttgactaagggaaattgctcagaaaaagaatgctccaacatgggaataaggaccttcagtctcaggaactcatttttgggtgcagtttctacatttaaaaaattgacttgtgttcagtttgataaccagttcatttgctttagtctcagtgttttaaagaagtctcataatgttctacaaagacacaaagcttcaggcttatacaaaactgagtatgattagaaatacctgagcccagaaatgattctgagaaaagagaataatttgaagacacttatttaaaagtaattatggttagaaatgaattaatttaaaaatgtgttcacatatccctttctctaacagtttaacctagacaaacatctgtatcagtatttttttattcccctgattgattacatttggtttctttattctgaaaggaaaataacaaaaacttcagaaattcctaagggtgtaataagaaagtgggttttgagtttcctttcctggaattattttacagttctttggtgggtctcgtcagccaattcatagctgggctttaagattatcatcttagagatgatagatgggctttttaaagatttcatcttagagatgaaaagctgggctttttctctaagatgataatcttaaagcccagctattaattgataatgaacatttttcactatttttttttctatctgaagcttagagatctagagctttggatctttcgggtatatgtcaatggaggtattattttataatactttgcattgacatgaagtgggttcatgggggaaaaccatgagctgtgaacattggtagcaaacaagcatatattcatttcaaaactttccttgcttttagcagagagaagcctgtatatgttacatgtgtgactttcagtagtttaaagagatgtttcaaaaaattgttgcatgtttttgatgcaatttgggaaattgtttacttcacaatgtagtcattcataaaaaaattcatgaaaatactgaacatatgtttgaggatttttcttttcctttttaaatttttttattttttctgagacggagatctgctcttacgcccaggctagagtgaagtggcgcgatcttggcttactgcaacctccaccccccaggttcaagcgattctcctgcctcagcctccggagtagctgggattacaggcgcccgccaccacgtccggctaatttttgtattttcagtagagacggggttttgctatgttggccaggctggtctcaaactcctgacctcaagtgatccacctgcctcggcctcccaaagtgttaggataacaggtgtgagccaccgtgcccggctgaagatttttcttaattgcaataaatattcagcattttttctaatgaaaatgaattttgtttaccagtaaaagtatgcattttaaaagactttcagatttatgctttttacgtgaagctgctaaactaaaagtaaatggaagaaaccaagtctagtaggttttttctttttttttgtgggggtgggatgggggaggttagttacacttaaaatatcttctccagagactgtatgctcctatactagactgtaagctctttgagggcagtctgtcagatttatctttgtatcttccccagcgcctagtgtagtgccttgcacataataggcgcccaataaatattgatgaagaatgaaggcgttgtgtttctaatgtgaccaaaccatggggattctttgtcattaataccgtcctcctttgtaagtgctgttttttttttttcattcttgagctcctaatgacattagatcttatcaggggcagttggacagttcagtaaaggtaaatgctgctcttgctctagttgctgtgacctatgttctttctgacttgctaagagagccaagtgatagtggctagtgataagattgatacataaattgctttactttgaaataacactggaaaaccctaccgtagacctgatcaagaaaaaaaaa

SEQ ID NO: 315665 - DNA, 4508 bp, Homo sapiens
gcgcgcgctcccggaacgcgcgcaccgcagacggcgcggatcgcagggagccggtccgccgccggaacgggagcctgggtgtgcgtgtggagtccggactcgtgggagacgatcgcgatgaacacggtgctgtcgcgggcgaactcactgttcgccttctcgctgagcgtgatggcggcgctcaccttcggctgcttcatcaccaccgccttcaaagacaggagcgtcccggtgcggctgcacgtctcgcggatcatgctaaaaaatgtagaagatttcactggacctagagaaagaagtgatctgggatttatcacatttgatataactgctgatctagagaatatatttgattggaatgttaagcagttgtttctttatttatcagcagaatattcaacaaaaaataatgctctgaaccaagttgtcctatgggacaagattgttttgagaggtgataatccgaagctgctgctgaaagatatgaaaacaaaatattttttctttgacgatggaaatggtctcaagggaaacaggaatgtcactttgaccctgtcttggaacgtcgtaccaaatgctggaattctacctcttgtgacaggatcaggacacgtatctgtcccatttccagatacatatgaaataacgaagagttattaaattattctgaatttgaaacaacatatttttatacttaatgaattgtatctcattaatctcttcccttacatcttcatgtattgttggtttgttttttggttttgggttttttttttttttttttttggtataagaactaacatcaaaaggcctgtttaaagggaaaggttaatgggctacttaatattatgaacaaaacaaaaaaacaaggctgccacagtggaatattatcttacaagaataagaactacataaaacagatttgtaaaaaatacatatttgaagtattccctgtatttccattattctttatggaatataaagtaagcatgaaaggtagttaaaactttcaggtgcctgtagagtcataataactgtattttatgccttgcattcacgcaaattcacattggatgtgatttaaaagtagacattctctttttcctcttttaggatatgtttgattactggaaaattaatatggttatttgttagaagtctggtttataaaaaagccaaaagtgatggaatttattccatttgtcttaggaaggcccataatacttgtttttcttacatgtgactagcaactttctccacttaaagactaaatacctctttatatgatgtaaattattctaattcattttaaaatcttttaggtcagcaaaatgtgtgtcttcagtgctttctctaaaaacgttcctttatagctttgtacttttttttttagcgttgccattgaaagttaaaatgtttgcatggtttaccctctgagttatgtttcttctagtgagcatgcctgctgtcactaagtgaattatttactactttttgtaggtctatattttaataattattgggataataataattgtggtatgctttccatttacaaaccactcatatactttagtgtatgtcatcctcaataatctaatgaggtaagtagtataagtgttagctctttgcagataagaaactgaaacccagaagtttattgaattgcttcattgttacctagccagcaaggagtggaattaaaacttgaactcagatcttctaattttctgagctcatcctttctcttatacctcagattgcagactaatcaaattttacttaaaaccttcctgatatttttgttaccctggacaccctttctattctagaaaaggtttcccattttatatggaagtgactaattttcaagctggcaacaacttatatcgaggtaatattttgattctctgaataaattcatttcacttatattaaaagcataaggaaatctacatgtatgtaaaaataacttagaaattcagtacataatacatgattgaatacatgatcgtatttaacatgttttttttttctgcagtggacaaataaacatcctcaaagtagcaactgcaaatcagttacccttagaaaagcaagaccaaacactgtagttacactattagcagtgaccaaaaagggctaatattttctaagaatagtttaaattacagacatttgttatatttaccttatgtgaaatacatcactatttaattacattaattttaacatctgttgtgtggagttgtatagttcatgcaaaagcctgtgggtatgggtttttcaaaccagcagaaaggtcaaaggtacctgaatgctaaactgcctggctcccagctttttcattaaacttttcagggtcttggtttctttatctgtaaaatgacagagttggaccagttaactttaatggccatccttttacaccacacaagttgataaaatttatctgttcagcaaagagattgaacaaaaaagcacgttagtaatatgaagacaggaaaacgaatgaaagtctaacacataactcatattgatttactttatttctgttagattttacactctgaaaatttcacctcatttagtttgtacaaatactagacatggaaacttaaaatgtgcaggtgtcaaagcttaaaaatcaggtgtgtcctctttaaaggcatgtgcgataagcctgcagtcttaaccagacctggtaccagtttaacagttcattatacttctgtgatgagtggatctgttagtctggtagagattaatgttgaaatttacttgaattacagttatttgacaagcccactttttttggagtttggtgaggaagataagtaaaaatgcccaactagtacaatgtggagaaagttttctgtttgcttgactaagggaaattgctcagaaaaagaatgctccaacatgggaataaggaccttcagtctcaggaactcatttttgggtgcagtttctacatttaaaaaattgacttgtgttcagtttgataaccagttcatttgctttagtctcagtgttttaaagaagtctcataatgttctacaaagacacaaagcttcaggcttatacaaaactgagtatgattagaaatacctgagcccagaaatgattctgagaaaagagaataatttgaagacacttatttaaaagtaattatggttagaaatgaattaatttaaaaatgtgttcacatatccctttctctaacagtttaacctagacaaacatctgtatcagtatttttttattcccctgattgattacatttggtttctttattctgaaaggaaaataacaaaaacttcagaaattcctaagggtgtaataagaaagtgggttttgagtttcctttcctggaattattttacagttctttggtgggtctcgtcagccaattcatagctgggctttaagattatcatcttagagatgatagatgggctttttaaagatttcatcttagagatgaaaagctgggctttttctctaagatgataatcttaaagcccagctattaattgataatgaacatttttcactatttttttttctatctgaagcttagagatctagagctttggatctttcgggtatatgtcaatggaggtattattttataatactttgcattgacatgaagtgggttcatgggggaaaaccatgagctgtgaacattggtagcaaacaagcatatattcatttcaaaactttccttgcttttagcagagagaagcctgtatatgttacatgtgtgactttcagtagtttaaagagatgtttcaaaaaattgttgcatgtttttgatgcaatttgggaaattgtttacttcacaatgtagtcattcataaaaaaattcatgaaaatactgaacatatgtttgaggatttttcttttcctttttaaatttttttattttttctgagacggagatctgctcttacgcccaggctagagtgaagtggcgcgatcttggcttactgcaacctccaccccccaggttcaagcgattctcctgcctcagcctccggagtagctgggattacaggcgcccgccaccacgtccggctaatttttgtattttcagtagagacggggttttgctatgttggccaggctggtctcaaactcctgacctcaagtgatccacctgcctcggcctcccaaagtgttaggataacaggtgtgagccaccgtgcccggctgaagatttttcttaattgcaataaatattcagcattttttctaatgaaaatgaattttgtttaccagtaaaagtatgcattttaaaagactttcagatttatgctttttacgtgaagctgctaaactaaaagtaaatggaagaaaccaagtctagtaggttttttcttttggggggggaagggggggggagtacttaaaatttttccgaagagggtggcaataaaagagctggggggggggaaaattttggtatccacaagggggggaaaggggaattgggggagaag

SEQ ID NO: 315666 - DNA, 427 bp, Homo sapiens
ttctttctctttaagaagttacgtgaattgtgtatgttctgttggaaggatggtaaaacttttatctttattcctagaaaaaatgtagaagatttcactggacctagagaaagaagtgatctgggatttatcacatttgatataactgctgatatcctttaagaaaatatttcgttgcgttttctgtagttttataatgagatatgtgttgtttaatgatttgggatacagtgtgactatctcattgaatcagccaaaccttggaaattccgcctttttcatcagtaaaataatgttaatacctccccatgacacttggagaaaacttcatagattcatgagtagttgtgtgaacatactttaaattcttaaccgaaacattaaattgattgaaaactacataagaaagtttgaatctgtattttag

SEQ ID NO: 315667 - DNA, 679 bp, Homo sapiens
gcgcgcgctcccggaacgcgcgcaccgcagacggcgcggatcgcagggagccggtccgccgccggaacgggagcctgggtgtgcgtgtggagtccggactcgtgggagacgatcgcgatgaacacggtgctgtcgcgggcgaactcactgttcgccttctcgctgagcgtgatggcggcgctcaccttcggctgcttcatcaccaccgccttcaaagacaggagcgtcccggtgcggctgcacgtctcgcggatcatgctaaaaaatgtagaagatttcactggacctagagaaagaagtgatctgggatttatcacatttgatataactgctgatctagagaatatatttgattggaatgttaagcagttgtttctttatttatcagcagaatattcaacaaaaaataatgctctgaaccaagttgtcctatgggacaagattgttttgagaggtgataatccgaagctgctgctgaaagatatgaaaacaaaatattttttctttgacgatggaaatggtctcaagggaaacaggaatgtcactttgaccctgtcttggaacgtcgtaccaaatgctggaattctacctcttgtgacaggatcaggacacgtatctgtcccatttccagatacatatgaaataacgaagagttattaaattattctgaatttgaaac

SEQ ID NO: 315668 - DNA, 4459 bp, Homo sapiens
gcgcgcgctcccggaacgcgcgcaccgcagacggcgcggatcgcagggagccggtccgccgccggaacgggagcctgggtgtgcgtgtggagtccggactcgtgggagacgatcgcgatgaacacggtgctgtcgcgggcgaactcactgttcgccttctcgctgagcgtgatggcggcgctcaccttcggctgcttcatcaccaccgccttcaaagacaggagcgtcccggtgcggctgcacgtctcgcggatcatgctaaaaaatgtagaagatttcactggacctagagaaagaagtgatctgggatttatcacatttgatataactgctgatctagagaatatatttgattggaatgttaagcagttgtttctttatttatcagcagaatattcaacaaaaaataatgctctgaaccaagttgtcctatgggacaagattgttttgagaggtgataatccgaagctgctgctgaaagatatgaaaacaaaatattttttctttgacgatggaaatggtctcaagggaaacaggaatgtcactttgaccctgtcttggaacgtcgtaccaaatgctggaattctacctcttgtgacaggatcaggacacgtatctgtcccatttccagatacatatgaaataacgaagagttattaaattattctgaatttgaaacaacatatttttatacttaatgaattgtatctcattaatctcttcccttacatcttcatgtattgttggtttgttttttggttttgggttttttttttttttttttttggtataagaactaacatcaaaaggcctgtttaaagggaaaggttaatgggctacttaatattatgaacaaaacaaaaaaacaaggctgccacagtggaatattatcttacaagaataagaactacataaaacagatttgtaaaaaatacatatttgaagtattccctgtatttccattattctttatggaatataaagtaagcatgaaaggtagttaaaactttcaggtgcctgtagagtcataataactgtattttatgccttgcattcacgcaaattcacattggatgtgatttaaaagtagacattctctttttcctcttttaggatatgtttgattactggaaaattaatatggttatttgttagaagtctggtttataaaaaagccaaaagtgatggaatttattccatttgtcttaggaaggcccataatacttgtttttcttacatgtgactagcaactttctccacttaaagactaaatacctctttatatgatgtaaattattctaattcattttaaaatcttttaggtcagcaaaatgtgtgtcttcagtgctttctctaaaaacgttcctttatagctttgtacttttttttttagcgttgccattgaaagttaaaatgtttgcatggtttaccctctgagttatgtttcttctagtgagcatgcctgctgtcactaagtgaattatttactactttttgtaggtctatattttaataattattgggataataataattgtggtatgctttccatttacaaaccactcatatactttagtgtatgtcatcctcaataatctaatgaggtaagtagtataagtgttagctctttgcagataagaaactgaaacccagaagtttattgaattgcttcattgttacctagccagcaaggagtggaattaaaacttgaactcagatcttctaattttctgagctcatcctttctcttatacctcagattgcagactaatcaaattttacttaaaaccttcctgatatttttgttaccctggacaccctttctattctagaaaaggtttcccattttatatggaagtgactaattttcaagctggcaacaacttatatcgaggtaatattttgattctctgaataaattcatttcacttatattaaaagcataaggaaatctacatgtatgtaaaaataacttagaaattcagtacataatacatgattgaatacatgatcgtatttaacatgttttttttttctgcagtggacaaataaacatcctcaaagtagcaactgcaaatcagttacccttagaaaagcaagaccaaacactgtagttacactattagcagtgaccaaaaagggctaatattttctaagaatagtttaaattacagacatttgttatatttaccttatgtgaaatacatcactatttaattacattaattttaacatctgttgtgtggagttgtatagttcatgcaaaagcctgtgggtatgggtttttcaaaccagcagaaaggtcaaaggtacctgaatgctaaactgcctggctcccagctttttcattaaacttttcagggtcttggtttctttatctgtaaaatgacagagttggaccagttaactttaatggccatccttttacaccacacaagttgataaaatttatctgttcagcaaagagattgaacaaaaaagcacgttagtaatatgaagacaggaaaacgaatgaaagtctaacacataactcatattgatttactttatttctgttagattttacactctgaaaatttcacctcatttagtttgtacaaatactagacatggaaacttaaaatgtgcaggtgtcaaagcttaaaaatcaggtgtgtcctctttaaaggcatgtgcgataagcctgcagtcttaaccagacctggtaccagtttaacagttcattatacttctgtgatgagtggatctgttagtctggtagagattaatgttgaaatttacttgaattacagttatttgacaagcccactttttttggagtttggtgaggaagataagtaaaaatgcccaactagtacaatgtggagaaagttttctgtttgcttgactaagggaaattgctcagaaaaagaatgctccaacatgggaataaggaccttcagtctcaggaactcatttttgggtgcagtttctacatttaaaaaattgacttgtgttcagtttgataaccagttcatttgctttagtctcagtgttttaaagaagtctcataatgttctacaaagacacaaagcttcaggcttatacaaaactgagtatgattagaaatacctgagcccagaaatgattctgagaaaagagaataatttgaagacacttatttaaaagtaattatggttagaaatgaattaatttaaaaatgtgttcacatatccctttctctaacagtttaacctagacaaacatctgtatcagtatttttttattcccctgattgattacatttggtttctttattctgaaaggaaaataacaaaaacttcagaaattcctaagggtgtaataagaaagtgggttttgagtttcctttcctggaattattttacagttctttggtgggtctcgtcagcagctattaattgataatgaacatttttcactatttttttttctatctgaagcttagagatctagagctttggatctttcgggtatatgtcaatggaggtattattttataatactttgcattgacatgaagtgggttcatgggggaaaaccatgagctgtgaacattggtagcaaacaagcatatattcatttcaaaactttccttgcttttagcagagagaagcctgtatatgttacatgtgtgactttcagtagtttaaagagatgtttcaaaaaattgttgcatgtttttgatgcaatttgggaaattgtttacttcacaatgtagtcattcataaaaaaattcatgaaaatactgaacatatgtttgaggatttttcttttcctttttaaatttttttattttttctgagacggagatctgctcttacgcccaggctagagtgaagtggcgcgatcttggcttactgcaacctccaccccccaggttcaagcgattctcctgcctcagcctccggagtagctgggattacaggcgcccgccaccacgtccggctaatttttgtattttcagtagagacggggttttgctatgttggccaggctggtctcaaactcctgacctcaagtgatccacctgcctcggcctcccaaagtgttaggataacaggtgtgagccaccgtgcccggctgaagatttttcttaattgcaataaatattcagcattttttctaatgaaaatgaattttgtttaccagtaaaagtatgcattttaaaagactttcagatttatgctttttacgtgaagctgctaaactaaaagtaaatggaagaaaccaagtctagtaggttttttctttttttttgtgggggtgggatgggggaggttagttacacttaaaatatcttctccagagactgtatgctcctatactagactgtaagctctttgagggcagtctgtcagatttatctttgtatcttccccagcgcctagtgtagtgccttgcacataataggcgcccaataaatattgatgaagaatga

SEQ ID NO: 315669 - DNA, 3858 bp, Homo sapiens
gcgcgcgctcccggaacgcgcgcaccgcagacggcgcggatcgcagggagccggtccgccgccggaacgggagcctgggtgtgcgtgtggagtccggactcgtgggagacgatcgcgatgaacacggtgctgtcgcgggcgaactcactgttcgccttctcgctgagcgtgatggcggcgctcaccttcggctgcttcatcaccaccgccttcaaagacaggagcgtcccggtgcggctgcacgtctcgcggatcatgctaaaaaatgtagaagatttcactggacctagagaaagaagtgatctgggatttatcacatttgatataactgctgatctagagaatatatttgattggaatgttaagcagttgtttctttatttatcagcagaatattcaacaaaaaataatgctctgaaccaagttgtcctatgggacaagattgttttgagaggtgataatccgaagctgctgctgaaagatatgaaaacaaaatattttttctttgacgatggaaatggtctcaagggaaacaggaatgtcactttgaccctgtcttggaacgtcgtaccaaatgctggaattctacctcttgtgacaggatcaggacacgtatctgtcccatttccagatacatatgaaataacgaagagttattaaattattctgaatttgaaacaacatatttttatacttaatgaattgtatctcattaatctcttcccttacatcttcatgtattgttggtttgttttttggttttgggttttttttttttttttttttggtataagaactaacatcaaaaggcctgtttaaagggaaaggttaatgggctacttaatattatgaacaaaacaaaaaaacaaggctgccacagtggaatattatcttacaagaataagaactacataaaacagatttgtaaaaaatacatatttgaagtattccctgtatttccattattctttatggaatataaagtaagcatgaaaggtagttaaaactttcaggtgcctgtagagtcataataactgtattttatgccttgcattcacgcaaattcacattggatgtgatttaaaagtagacattctctttttcctcttttaggatatgtttgattactggaaaattaatatggttatttgttagaagtctggtttataaaaaagccaaaagtgatggaatttattccatttgtcttaggaaggcccataatacttgtttttcttacatgtgactagcaactttctccacttaaagactaaatacctctttatatgatgtaaattattctaattcattttaaaatcttttaggtcagcaaaatgtgtgtcttcagtgctttctctaaaaacgttcctttatagctttgtacttttttttttagcgttgccattgaaagttaaaatgtttgcatggtttaccctctgagttatgtttcttctagtgagcatgcctgctgtcactaagtgaattatttactactttttgtaggtctatattttaataattattgggataataataattgtggtatgctttccatttacaaaccactcatatactttagtgtatgtcatcctcaataatctaatgaggtaagtagtataagtgttagctctttgcagataagaaactgaaacccagaagtttattgaattgcttcattgttacctagccagcaaggagtggaattaaaacttgaactcagatcttctaattttctgagctcatcctttctcttatacctcagattgcagactaatcaaattttacttaaaaccttcctgatatttttgttaccctggacaccctttctattctagaaaaggtttcccattttatatggaagtgactaattttcaagctggcaacaacttatatcgaggtaatattttgattctctgaataaattcatttcacttatattaaaagcataaggaaatctacatgtatgtaaaaataacttagaaattcagtacataatacatgattgaatacatgatcgtatttaacatgttttttttttctgcagtggacaaataaacatcctcaaagtagcaactgcaaatcagttacccttagaaaagcaagaccaaacactgtagttacactattagcagtgaccaaaaagggctaatattttctaagaatagtttaaattacagacatttgttatatttaccttatgtgaaatacatcactatttaattacattaattttaacatctgttgtgtggagttgtatagttcatgcaaaagcctgtgggtatgggtttttcaaaccagcagaaaggtcaaaggtacctgaatgctaaactgcctggctcccagctttttcattaaacttttcagggtcttggtttctttatctgtaaaatgacagagttggaccagttaactttaatggccatccttttacaccacacaagttgataaaatttatctgttcagcaaagagattgaacaaaaaagcacgttagtaatatgaagacaggaaaacgaatgaaagtctaacacataactcatattgatttactttatttctgttagattttacactctgaaaatttcacctcatttagtttgtacaaatactagacatggaaacttaaaatgtgcaggtgtcaaagcttaaaaatcaggtgtgtcctctttaaaggcatgtgcgataagcctgcagtcttaaccagacctggtaccagtttaacagttcattatacttctgtgatgagtggatctgttagtctggtagagattaatgttgaaatttacttgaattacagttatttgacaagcccacagctattaattgataatgaacatttttcactatttttttttctatctgaagcttagagatctagagctttggatctttcgggtatatgtcaatggaggtattattttataatactttgcattgacatgaagtgggttcatgggggaaaaccatgagctgtgaacattggtagcaaacaagcatatattcatttcaaaactttccttgcttttagcagagagaagcctgtatatgttacatgtgtgactttcagtagtttaaagagatgtttcaaaaaattgttgcatgtttttgatgcaatttgggaaattgtttacttcacaatgtagtcattcataaaaaaattcatgaaaatactgaacatatgtttgaggatttttcttttcctttttaaatttttttattttttctgagacggagatctgctcttacgcccaggctagagtgaagtggcgcgatcttggcttactgcaacctccaccccccaggttcaagcgattctcctgcctcagcctccggagtagctgggattacaggcgcccgccaccacgtccggctaatttttgtattttcagtagagacggggttttgctatgttggccaggctggtctcaaactcctgacctcaagtgatccacctgcctcggcctcccaaagtgttaggataacaggtgtgagccaccgtgcccggctgaagatttttcttaattgcaataaatattcagcattttttctaatgaaaatgaattttgtttaccagtaaaagtatgcattttaaaagactttcagatttatgctttttacgtgaagctgctaaactaaaagtaaatggaagaaaccaagtctagtaggttttttctttttttttgtgggggtgggatgggggaggttagttacacttaaaatatcttctccagagactgtatgctcctatactagactgtaagctctttgagggcagtctgtcagatttatctttgtatcttccccagcgcctagtgtagtgccttgcacataataggcgcccaataaatattgatgaagaatga

SEQ ID NO: 315670 - DNA, 3830 bp, Homo sapiens
gcgcgcgctcccggaacgcgcgcaccgcagacggcgcggatcgcagggagccggtccgccgccggaacgggagcctgggtgtgcgtgtggagtccggactcgtgggagacgatcgcgatgaacacggtgctgtcgcgggcgaactcactgttcgccttctcgctgagcgtgatggcggcgctcaccttcggctgcttcatcaccaccgccttcaaagacaggagcgtcccggtgcggctgcacgtctcgcggatcatgctaaaaaatgtagaagatttcactggacctagagaaagaagtgatctgggatttatcacatttgatataactgctgatctagagaatatatttgattggaatgttaagcagttgtttctttatttatcagcagaatattcaacaaaaaataatgctctgaaccaagttgtcctatgggacaagattgttttgagaggtgataatccgaagctgctgctgaaagatatgaaaacaaaatattttttctttgacgatggaaatggtctcaagggaaacaggaatgtcactttgaccctgtcttggaacgtcgtaccaaatgctggaattctacctcttgtgacaggatcaggacacgtatctgtcccatttccagatacatatgaaataacgaagagttattaaattattctgaatttgaaacaacatatttttatacttaatgaattgtatctcattaatctcttcccttacatcttcatgtattgttggtttgttttttggttttgggttttttttttttttttttttggtataagaactaacatcaaaaggcctgtttaaagggaaaggttaatgggctacttaatattatgaacaaaacaaaaaaacaaggctgccacagtggaatattatcttacaagaataagaactacataaaacagatttgtaaaaaatacatatttgaagtattccctgtatttccattattctttatggaatataaagtaagcatgaaaggtagttaaaactttcaggtgcctgtagagtcataataactgtattttatgccttgcattcacgcaaattcacattggatgtgatttaaaagtagacattctctttttcctcttttaggatatgtttgattactggaaaattaatatggttatttgttagaagtctggtttataaaaaagccaaaagtgatggaatttattccatttgtcttaggaaggcccataatacttgtttttcttacatgtgactagcaactttctccacttaaagactaaatacctctttatatgatgtaaattattctaattcattttaaaatcttttaggtcagcaaaatgtgtgtcttcagtgctttctctaaaaacgttcctttatagctttgtacttttttttttagcgttgccattgaaagttaaaatgtttgcatggtttaccctctgagttatgtttcttctagtgagcatgcctgctgtcactaagtgaattatttactactttttgtaggtctatattttaataattattgggataataataattgtggtatgctttccatttacaaaccactcatatactttagtgtatgtcatcctcaataatctaatgaggtaagtagtataagtgttagctctttgcagataagaaactgaaacccagaagtttattgaattgcttcattgttacctagccagcaaggagtggaattaaaacttgaactcagatcttctaattttctgagctcatcctttctcttatacctcagattgcagactaatcaaattttacttaaaaccttcctgatatttttgttaccctggacaccctttctattctagaaaaggtttcccattttatatggaagtgactaattttcaagctggcaacaacttatatcgaggtaatattttgattctctgaataaattcatttcacttatattaaaagcataaggaaatctacatgtatgtaaaaataacttagaaattcagtacataatacatgattgaatacatgatcgtatttaacatgttttttttttctgcagtggacaaataaacatcctcaaagtagcaactgcaaatcagttacccttagaaaagcaagaccaaacactgtagttacactattagcagtgaccaaaaagggctaatattttctaagaatagtttaaattacagacatttgttatatttaccttatgtgaaatacatcactatttaattacattaattttaacatctgttgtgtggagttgtatagttcatgcaaaagcctgtgggtatgggtttttcaaaccagcagaaaggtcaaaggtacctgaatgctaaactgcctggctcccagctttttcattaaacttttcagggtcttggtttctttatctgtaaaatgacagagttggaccagttaactttaatggccatccttttacaccacacaagttgataaaatttatctgttcagcaaagagattgaacaaaaaagcacgttagtaatatgaagacaggaaaacgaatgaaagtctaacacataactcatattgatttactttatttctgttagattttacactctgaaaatttcacctcatttagtttgtacaaatactagacatggaaacttaaaatgtgcaggtgtcaaagcttaaaaatcaggtgtgtcctctttaaaggcatgtgcgataagcctgcagtcttaaccagacctggtaccagtttaacagttcattatacttctgtgatgagtggatctgttagtctggtagagattaatgttgaaatttacagctattaattgataatgaacatttttcactatttttttttctatctgaagcttagagatctagagctttggatctttcgggtatatgtcaatggaggtattattttataatactttgcattgacatgaagtgggttcatgggggaaaaccatgagctgtgaacattggtagcaaacaagcatatattcatttcaaaactttccttgcttttagcagagagaagcctgtatatgttacatgtgtgactttcagtagtttaaagagatgtttcaaaaaattgttgcatgtttttgatgcaatttgggaaattgtttacttcacaatgtagtcattcataaaaaaattcatgaaaatactgaacatatgtttgaggatttttcttttcctttttaaatttttttattttttctgagacggagatctgctcttacgcccaggctagagtgaagtggcgcgatcttggcttactgcaacctccaccccccaggttcaagcgattctcctgcctcagcctccggagtagctgggattacaggcgcccgccaccacgtccggctaatttttgtattttcagtagagacggggttttgctatgttggccaggctggtctcaaactcctgacctcaagtgatccacctgcctcggcctcccaaagtgttaggataacaggtgtgagccaccgtgcccggctgaagatttttcttaattgcaataaatattcagcattttttctaatgaaaatgaattttgtttaccagtaaaagtatgcattttaaaagactttcagatttatgctttttacgtgaagctgctaaactaaaagtaaatggaagaaaccaagtctagtaggttttttctttttttttgtgggggtgggatgggggaggttagttacacttaaaatatcttctccagagactgtatgctcctatactagactgtaagctctttgagggcagtctgtcagatttatctttgtatcttccccagcgcctagtgtagtgccttgcacataataggcgcccaataaatattgatgaagaatga

SEQ ID NO: 315671 - DNA, 2195 bp, Homo sapiens
cctttcgttgtgtcctgcattaatctggccgtgccatgcatctactccatgttcaggcttgtggagaggtacgagatgccacggcacgaagtctacgttctcctgatccgaaacatctttttgaaaatatcaatcattggcattctttgttactattggctcaacaccgtggccctgtctggtgaagagtgttgggaaaccctcattggccaggacatctaccggctccttctgatggattttgtgttctctttagtcaattccttcctgggggagtttctgaggagaatcattgggatgcaactgatcacaagtcttggccttcaggagtttgacattgccaggaacgttctagaactgatctatgcacaaactctggtgtggattggcatcttcttctgccccctgctgccctttatccaaatgattatgcttttcatcatgttctactccaaaaatatcagcctgatgatgaatttccagcctccgagcaaagcctggcgggcctcacagatgatgactttcttcatcttcttgctctttttcccatccttcaccggggtcttgtgcaccctggccatcaccatctggagattgaagccttcagctgactgtggcccttttcgaggtctgcctctcttcattcactccatctacagctggatcgacaccctaagtacacggcctggctacctgtgggttgtttggatctatcggaacctcattggaagtgtgcacttctttttcatcctcaccctcattgtgctaatcatcacctatctttactggcagatcacagagggaaggaagattatgataaggctgctccatgagcagatcattaatgagggcaaagataaaatgttcctgatagaaaaattgatcaagctgcaggatatggagaagaaagcaaaccccagctcacttgttctggaaaggagagaggtggagcaacaaggctttttgcatttgggggaacatgatggcagtcttgacttgcgatctagaagatcagttcaagaaggtaatccaagggcctgatgactcttttggtaaccagacaccaatcaaataaggggaggagatgaaaatggaatgatttcttccatgccacctgtgcctttaggaactgcccagaagaaaatccaaggctttagccaggagcggaaactgactaccatgtaattatcaaagtaaaattgggcattccatgctatttttaatacctggattgctgatttttcaagacaaaatacttggggttttccaataaagattgttgtaatattgaaatgagcctacaaaaacctaggaagagataactagggaataatgtatattatcttcaagaaatgtgtgcaggaatgattggttcttagaaatctctcctgccagacttcccagacctggcaaaggtttagaaactgttgctaagaaaagtggtccatcctgaataaacatgtaatactccagcagggatatgaagcctctgaattgtagaacctgcatttatttgtgactttgaactaaagacatcccccatgtcccaaaggtggaatacaaccagaggtctcatctctgaactttcttgcgtactgattacatgagtctttggagtcggggatggaggaggttctgcccctgtgaggtgttatacatgaccatcaaagtcctacgtcaagctagctttgcacagtggcagtaccgtagccaatgagatttatccgagacgcgattattgctaattggaaattttcccaataccccaccgtgatgacttgaaatataatcagcgctggcaatttttgacagtctctacggagactgaataagaaaaaagaaaagaaaagaaattagctgggtgcgatggcttatgcctgtaatcccggcactttgggaggctgaggcaagcggatcacttaatgtcaggagttcaagaccagcctggccaacatggtgaaaccccgtctctactaaaaataaaaaaactagctgggcgtggtggtacatgcctataatcccagctactcgggaggctgaggcaggagaattgcttgaacctgggaggcagaggttgcagtgaggcgagattgtaccactgcattccagcctgggcaacagtgagactctgcctcaaaaaaataaataaataaataaagtaaattaaaagtcttattcaaaccaaatatgaaact

SEQ ID NO: 315672 - DNA, 2312 bp, Homo sapiens
cctttcgttgtgtcctgcattaatctggccgtgccatgcatctactccatgttcaggcttgtggagaggtacgagatgccacggcacgaagtctacgttctcctgatccgcaggggattgatgtagttctcaagtatgggatgtacagatgggcaggcagtgcacgcacaaaggctcctgggctgaggacgggactgaaatcatccagcgttccccttagtcaagctaaacatctttttgaaaatatcaatcattggcattctttgttactattggctcaacaccgtggccctgtctggtgaagagtgttgggaaaccctcattggccaggacatctaccggctccttctgatggattttgtgttctctttagtcaattccttcctgggggagtttctgaggagaatcattgggatgcaactgatcacaagtcttggccttcaggagtttgacattgccaggaacgttctagaactgatctatgcacaaactctggtgtggattggcatcttcttctgccccctgctgccctttatccaaatgattatgcttttcatcatgttctactccaaaaatatcagcctgatgatgaatttccagcctccgagcaaagcctggcgggcctcacagatgatgactttcttcatcttcttgctctttttcccatccttcaccggggtcttgtgcaccctggccatcaccatctggagattgaagccttcagctgactgtggcccttttcgaggtctgcctctcttcattcactccatctacagctggatcgacaccctaagtacacggcctggctacctgtgggttgtttggatctatcggaacctcattggaagtgtgcacttctttttcatcctcaccctcattgtgctaatcatcacctatctttactggcagatcacagagggaaggaagattatgataaggctgctccatgagcagatcattaatgagggcaaagataaaatgttcctgatagaaaaattgatcaagctgcaggatatggagaagaaagcaaaccccagctcacttgttctggaaaggagagaggtggagcaacaaggctttttgcatttgggggaacatgatggcagtcttgacttgcgatctagaagatcagttcaagaaggtaatccaagggcctgatgactcttttggtaaccagacaccaatcaaataaggggaggagatgaaaatggaatgatttcttccatgccacctgtgcctttaggaactgcccagaagaaaatccaaggctttagccaggagcggaaactgactaccatgtaattatcaaagtaaaattgggcattccatgctatttttaatacctggattgctgatttttcaagacaaaatacttggggttttccaataaagattgttgtaatattgaaatgagcctacaaaaacctaggaagagataactagggaataatgtatattatcttcaagaaatgtgtgcaggaatgattggttcttagaaatctctcctgccagacttcccagacctggcaaaggtttagaaactgttgctaagaaaagtggtccatcctgaataaacatgtaatactccagcagggatatgaagcctctgaattgtagaacctgcatttatttgtgactttgaactaaagacatcccccatgtcccaaaggtggaatacaaccagaggtctcatctctgaactttcttgcgtactgattacatgagtctttggagtcggggatggaggaggttctgcccctgtgaggtgttatacatgaccatcaaagtcctacgtcaagctagctttgcacagtggcagtaccgtagccaatgagatttatccgagacgcgattattgctaattggaaattttcccaataccccaccgtgatgacttgaaatataatcagcgctggcaatttttgacagtctctacggagactgaataagaaaaaagaaaagaaaagaaattagctgggtgcgatggcttatgcctgtaatcccggcactttgggaggctgaggcaagcggatcacttaatgtcaggagttcaagaccagcctggccaacatggtgaaaccccgtctctactaaaaataaaaaaactagctgggcgtggtggtacatgcctataatcccagctactcgggaggctgaggcaggagaattgcttgaacctgggaggcagaggttgcagtgaggcgagattgtaccactgcattccagcctgggcaacagtgagactctgcctcaaaaaaataaataaataaataaagtaaattaaaagtcttattcaaaccaaatatgaaact

SEQ ID NO: 315673 - DNA, 2178 bp, Homo sapiens
cctttcgttgtgtcctgcattaatctggccgtgccatgcatctactccatgttcaggcttgtggagaggtacgagatgccacggcacgaagtctacgttctcctgatccgcaggggattgatgtagttctcaagtatgggatgtacagatgggcaggcagtgcacgcacaaaggctcctgggctgaggacgggactgaaatcatccagcgttccccttagtcaagctaaacatctttttgaaaatatcaatcattggcattctttgttactattggctcaacaccgtggccctgtctggtgaagagtgttgggaaaccctcattggccaggacatctaccggctccttctgatggattttgtgttctctttagtcaattccttcctgggggagtttctgaggagaatcattgggatgcaactgatcacaagtcttggccttcaggagtttgacattgccaggaacgttctagaactgatctatgcacaaactctggtgtggattggcatcttcttctgccccctgctgccctttatccaaatgattatgcttttcatcatgttctactccaaaaatattgaagccttcagctgactgtggcccttttcgaggtctgcctctcttcattcactccatctacagctggatcgacaccctaagtacacggcctggctacctgtgggttgtttggatctatcggaacctcattggaagtgtgcacttctttttcatcctcaccctcattgtgctaatcatcacctatctttactggcagatcacagagggaaggaagattatgataaggctgctccatgagcagatcattaatgagggcaaagataaaatgttcctgatagaaaaattgatcaagctgcaggatatggagaagaaagcaaaccccagctcacttgttctggaaaggagagaggtggagcaacaaggctttttgcatttgggggaacatgatggcagtcttgacttgcgatctagaagatcagttcaagaaggtaatccaagggcctgatgactcttttggtaaccagacaccaatcaaataaggggaggagatgaaaatggaatgatttcttccatgccacctgtgcctttaggaactgcccagaagaaaatccaaggctttagccaggagcggaaactgactaccatgtaattatcaaagtaaaattgggcattccatgctatttttaatacctggattgctgatttttcaagacaaaatacttggggttttccaataaagattgttgtaatattgaaatgagcctacaaaaacctaggaagagataactagggaataatgtatattatcttcaagaaatgtgtgcaggaatgattggttcttagaaatctctcctgccagacttcccagacctggcaaaggtttagaaactgttgctaagaaaagtggtccatcctgaataaacatgtaatactccagcagggatatgaagcctctgaattgtagaacctgcatttatttgtgactttgaactaaagacatcccccatgtcccaaaggtggaatacaaccagaggtctcatctctgaactttcttgcgtactgattacatgagtctttggagtcggggatggaggaggttctgcccctgtgaggtgttatacatgaccatcaaagtcctacgtcaagctagctttgcacagtggcagtaccgtagccaatgagatttatccgagacgcgattattgctaattggaaattttcccaataccccaccgtgatgacttgaaatataatcagcgctggcaatttttgacagtctctacggagactgaataagaaaaaagaaaagaaaagaaattagctgggtgcgatggcttatgcctgtaatcccggcactttgggaggctgaggcaagcggatcacttaatgtcaggagttcaagaccagcctggccaacatggtgaaaccccgtctctactaaaaataaaaaaactagctgggcgtggtggtacatgcctataatcccagctactcgggaggctgaggcaggagaattgcttgaacctgggaggcagaggttgcagtgaggcgagattgtaccactgcattccagcctgggcaacagtgagactctgcctcaaaaaaataaataaataaataaagtaaattaaaagtcttattcaaaccaaatatgaaact

SEQ ID NO: 315674 - DNA, 1589 bp, Homo sapiens
cctttcgttgtgtcctgcattaatctggccgtgccatgcatctactccatgttcaggcttgtggagaggtacgagatgccacggcacgaagtctacgttctcctgatccgcaggggattgatgtagttctcaagtatgggatgtacagatgggcaggcagtgcacgcacaaaggctcctgggctgaggacgggactgaaatcatccagcgttccccttagtcaagctaaacatctttttgaaaatatcaatcattggcattctttgttactattggctcaacaccgtggccctgtctggtgaagagtgttgggaaaccctcattggccaggacatctaccggctccttctgatggattttgtgttctctttagtcaattccttcctgggggagtttctgaggagaatcattgggatgcaactgatcacaagtcttggccttcaggagtttgacattgccaggaacgttctagaactgatctatgcacaaactctggtgtggattggcatcttcttctgccccctgctgccctttatccaaatgattatgcttttcatcatgttctactccaaaaatatcagcctgatgatgaatttccagcctccgagcaaagcctggcgggcctcacagatgatgactttcttcatcttcttgctctttttcccatccttcaccggggtcttgtgcaccctggccatcaccatctggagattgaagccttcagctgactgtggcccttttcgaggtctgcctctcttcattcactccatctacagctggatcgacaccctaagtacacggcctggctacctgtgggttgtttggatctatcggaacctcattggaagtgtgcacttctttttcatcctcaccctcattgtgctaatcatcacctatctttactggcagatcacagagggaaggaagattatgataaggctgctccatgagcagatcattaatgagggcaaagataaaatgttcctgatagaaaaattgatcaagctgcaggatatggagaagaaagcaaaccccagctcacttgttctggaaaggagagaggtggagcaacaaggctttttgcatttgggggaacatgatggcagtcttgacttgcgatctagaagatcagttcaagaaggtaatccaagggcctgatgactcttttggtaaccagacaccaatcaaataaggggaggagatgaaaatggaatgatttcttccatgccacctgtgcctttaggaactgcccagaagaaaatccaaggctttagccaggagcggaaactgactaccatgtaattatcaaagtaaaattgggcattccatgctatttttaatacctggattgctgatttttcaagacaaaatacttggggttttccaataaagattgttgtaatattgaaatgagcctacaaaaacctaggaagagataactagggaataatgtatattatcttcaagaaatgtgtgcaggaatgattggttcttagaaatctctcctgccagacttcccagacctggcaaaggtttagaaactgttgctaagaaaagtggtccatcctgaataaacatgtaatactcca

SEQ ID NO: 315675 - DNA, 1405 bp, Homo sapiens
ccattggtgtgtttgttgttgttactgtttttgtttgttttcaatgtagacaatacagctttggaaggggaagtctcatacaggttataggtctttctctctctagatttcaagaagcaggaactggccagttcctgcttcttgaaaggagagaggtggagcaacaaggctttttgcatttgggggaacatgatggcagtcttgacttgcgatctagaagatcagttcaagaaggtaatccaagggcctgatgactcttttggtaaccagacaccaatcaaataaggggaggagatgaaaatggaatgatttcttccatgccacctgtgcctttaggaactgcccagaagaaaatccaaggctttagccaggagcggaaactgactaccatgtaattatcaaagtaaaattgggcattccatgctatttttaatacctggattgctgatttttcaagacaaaatacttggggttttccaataaagattgttgtaatattgaaatgagcctacaaaaacctaggaagagataactagggaataatgtatattatcttcaagaaatgtgtgcaggaatgattggttcttagaaatctctcctgccagacttcccagacctggcaaaggtttagaaactgttgctaagaaaagtggtccatcctgaataaacatgtaatactccagcagggatatgaagcctctgaattgtagaacctgcatttatttgtgactttgaactaaagacatcccccatgtcccaaaggtggaatacaaccagaggtctcatctctgaactttcttgcgtactgattacatgagtctttggagtcggggatggaggaggttctgcccctgtgaggtgttatacatgaccatcaaagtcctacgtcaagctagctttgcacagtggcagtaccgtagccaatgagatttatccgagacgcgattattgctaattggaaattttcccaataccccaccgtgatgacttgaaatataatcagcgctggcaatttttgacagtctctacggagactgaataagaaaaaagaaaagaaaagaaattagctgggtgcgatggcttatgcctgtaatcccggcactttgggaggctgaggcaagcggatcacttaatgtcaggagttcaagaccagcctggccaacatggtgaaaccccgtctctactaaaaataaaaaaactagctgggcgtggtggtacatgcctataatcccagctactcgggaggctgaggcaggagaattgcttgaacctgggaggcagaggttgcagtgaggcgagattgtaccactgcattccagcctgggcaacagtgagactctgcctcaaaaaaataaataaataaataaagtaaattaaaagtcttattcaaaccaaatatgaaact

SEQ ID NO: 315676 - DNA, 1302 bp, Homo sapiens
gcatgagaagctatggaatcttgaaggcaagctggtctttcccttgtagagatggggcagagtgtgcctgcgttaacttctctttcctgtgtcaaacctagacttgcgatctagaagatcagttcaagaaggtaatccaagggcctgatgactcttttggtaaccagacaccaatcaaataaggggaggagatgaaaatggaatgatttcttccatgccacctgtgcctttaggaactgcccagaagaaaatccaaggctttagccaggagcggaaactgactaccatgtaattatcaaagtaaaattgggcattccatgctatttttaatacctggattgctgatttttcaagacaaaatacttggggttttccaataaagattgttgtaatattgaaatgagcctacaaaaacctaggaagagataactagggaataatgtatattatcttcaagaaatgtgtgcaggaatgattggttcttagaaatctctcctgccagacttcccagacctggcaaaggtttagaaactgttgctaagaaaagtggtccatcctgaataaacatgtaatactccagcagggatatgaagcctctgaattgtagaacctgcatttatttgtgactttgaactaaagacatcccccatgtcccaaaggtggaatacaaccagaggtctcatctctgaactttcttgcgtactgattacatgagtctttggagtcggggatggaggaggttctgcccctgtgaggtgttatacatgaccatcaaagtcctacgtcaagctagctttgcacagtggcagtaccgtagccaatgagatttatccgagacgcgattattgctaattggaaattttcccaataccccaccgtgatgacttgaaatataatcagcgctggcaatttttgacagtctctacggagactgaataagaaaaaagaaaagaaaagaaattagctgggtgcgatggcttatgcctgtaatcccggcactttgggaggctgaggcaagcggatcacttaatgtcaggagttcaagaccagcctggccaacatggtgaaaccccgtctctactaaaaataaaaaaactagctgggcgtggtggtacatgcctataatcccagctactcgggaggctgaggcaggagaattgcttgaacctgggaggcagaggttgcagtgaggcgagattgtaccactgcattccagcctgggcaacagtgagactctgcctcaaaaaaataaataaataaataaagtaaattaaaagtcttattcaaaccaaatatgaaact

SEQ ID NO: 315677 - DNA, 604 bp, Homo sapiens
cctttcgttgtgtcctgcattaatctggccgtgccatgcatctactccatgttcaggcttgtggagaggtacgagatgccacggcacgaagtctacgttctcctgatccgaaacatctttttgaaaatatcaatcattggcattctttgttactattggctcaacaccgtggccctgtctggtgaagagtgttgggaaaccctcattggccaggacatctaccggctccttctgatggattttgtgttctctttagtcaattccttcctgggggagtttctgaggaggtaaatatttgccattcttaagtaattagggcctgatgctgtaaacagaacctgattcctggctgagtgggacatacaggtgcctgacatactcaaagcgtgcgttgttccaagtctgcctgttgtccttggggatactgttcacttctaaattagctaaaatttcaccttaacctgacagttctgttgtcatagttcactcggttcagttgaccttttacaaccttttgaaaacaaattctaaaaataaaagacagaaactgagccatttgaaatcttatccagccgagggcagtggctcacgcctgtaatcccaa

SEQ ID NO: 315678 - DNA, 480 bp, Homo sapiens
tagagccaggaacagaggagaattgagctgaggccacagccccttcccacatcctgactcttgtttgccttccagtgttgggaaaccctcattggccaggacatctaccggctccttctgatggattttgtgttctctttagtcaattccttcctgggggagtttctgaggaggtaaatatttgccattcttaagtaattagggcctgatgctgtaaacagaacctgattcctggctgagtgggacatacaggtgcctgacatactcaaagcgtgcgttgttccaagtctgcctgttgtccttggggatactgttcacttctaaattagctaaaatttcaccttaacctgacagttctgttgtcatagttcactcggttcagttgaccttttacaaccttttgaaaacaaattctaaaaataaaagacagaaactgagccatttgaaatcttatccagccgagggcagtggctcacgcct

SEQ ID NO: 315679 - DNA, 1846 bp, Homo sapiens
ccagcctctgactctctaacttccaccgctacaggattggcatcttcttctgccccctgctgccctttatccaaatgattatgcttttcatcatgttctactccaaaaatatcagcctgatgatgaatttccagcctccgagcaaagcctggcgggcctcacagatgatgactttcttcatcttcttgctctttttcccatccttcaccggggtcttgtgcaccctggccatcaccatctggagattgaagccttcagctgactgtggcccttttcgaggtctgcctctcttcattcactccatctacagctggatcgacaccctaagtacacggcctggctacctgtgggttgtttggatctatcggaacctcattggaagtgtgcacttctttttcatcctcaccctcattgtgctaatcatcacctatctttactggcagatcacagagggaaggaagattatgataaggctgctccatgagcagatcattaatgagggcaaagataaaatgttcctgatagaaaaattgatcaagctgcaggatatggagaagaaagcaaaccccagctcacttgttctggaaaggagagaggtggagcaacaaggctttttgcatttgggggaacatgatggcagtcttgacttgcgatctagaagatcagttcaagaaggtaatccaagggcctgatgactcttttggtaaccagacaccaatcaaataaggggaggagatgaaaatggaatgatttcttccatgccacctgtgcctttaggaactgcccagaagaaaatccaaggctttagccaggagcggaaactgactaccatgtaattatcaaagtaaaattgggcattccatgctatttttaatacctggattgctgatttttcaagacaaaatacttggggttttccaataaagattgttgtaatattgaaatgagcctacaaaaacctaggaagagataactagggaataatgtatattatcttcaagaaatgtgtgcaggaatgattggttcttagaaatctctcctgccagacttcccagacctggcaaaggtttagaaactgttgctaagaaaagtggtccatcctgaataaacatgtaatactccagcagggatatgaagcctctgaattgtagaacctgcatttatttgtgactttgaactaaagacatcccccatgtcccaaaggtggaatacaaccagaggtctcatctctgaactttcttgcgtactgattacatgagtctttggagtcggggatggaggaggttctgcccctgtgaggtgttatacatgaccatcaaagtcctacgtcaagctagctttgcacagtggcagtaccgtagccaatgagatttatccgagacgcgattattgctaattggaaattttcccaataccccaccgtgatgacttgaaatataatcagcgctggcaatttttgacagtctctacggagactgaataagaaaaaagaaaagaaaagaaattagctgggtgcgatggcttatgcctgtaatcccggcactttgggaggctgaggcaagcggatcacttaatgtcaggagttcaagaccagcctggccaacatggtgaaaccccgtctctactaaaaataaaaaaactagctgggcgtggtggtacatgcctataatcccagctactcgggaggctgaggcaggagaattgcttgaacctgggaggcagaggttgcagtgaggcgagattgtaccactgcattccagcctgggcaacagtgagactctgcctcaaaaaaataaataaataaataaagtaaattaaaagtcttattcaaaccaaatatgaaact

SEQ ID NO: 315680 - DNA, 1442 bp, Homo sapiens
cctttcgttgtgtcctgcattaatctggccgtgccatgcatctactccatgttcaggcttgtggagaggtacgagatgccacggcacgaagtctacgttctcctgatccgcaggggattgatgtagttctcaagtatgggatgtacagatgggcaggcagtgcacgcacaaaggctcctgggctgaggacgggactgaaatcatccagcgttccccttagtcaagctaaacatctttttgaaaatatcaatcattggcattctttgttactattggctcaacaccgtggccctgtctggtgaagagtgttgggaaaccctcattggccaggacatctaccggctccttctgatggattttgtgttctctttagtcaattccttcctgggggagtttctgaggagaatcattgggatgcaactgatcacaagtcttggccttcaggagtttgacattgccaggaacgttctagaactgatctatgcacaaactctggtgtggattggcatcttcttctgccccctgctgccctttatccaaatgattatgcttttcatcatgttctactccaaaaatatcagcctgatgatgaatttccagcctccgagcaaagcctggcgggcctcacagatgatgactttcttcatcttcttgctctttttcccatccttcaccggggtcttgtgcaccctggccatcaccatctggagattgaagccttcagctgactgtggcccttttcgaggtctgcctctcttcattcactccatctacagctggatcgacaccctaagtacacggcctggctacctgtgggttgtttggatctatcggaacctcattggaagtgtgcacttctttttcatcctcaccctcattgtgctaatcatcacctatctttactggcagatcacagagggaaggaagattatgataaggctgctccatgagcagatcattaatgagggcaaagataaaatgttcctgatagaaaaattgatcaagctgcaggatatggagaagaaagcaaaccccagctcacttgttctggaaaggagagaggtggagcaacaaggctttttgcatttgggggaacatgatggcagtcttggtgagtaattaaactgggacagaataagacactaatttatttctggtgaaatatcctaagacaagtgtaagaattgctcatgtgtccattactttttcagttgcaaattggatccaaactggcttaaacaaaattccaagaataattcttgctttaggccttgcctaacgcaggaactcacagtgtcaccagaacccggtttctttcagttccgttcttacccatgttagttccttttgcaatagactctgcctaataagtgcaagacagctttatcaacttcttatatcttctcagagtcagtctggtgggaaagactgagggacccagg

SEQ ID NO: 315681 - DNA, 1632 bp, Homo sapiens
agcggagcgcggccggcaccatcgagccgggaagatggcaccgcccacggagctgctggccaggccggagcgaggcagcgcgcccggctcccgcgccatggggcggctggtggctgtgggcttgctggggatcgcgctggcgctcctgggcgagaggcttctggcactcagaaatcgacttaaagcctccagagaagtagaatctgtagaccttccacactgccacctgattaaaggaattgaagctggctctgaagatattgacatacttcccaatggtctggctttttttagtgtgggtctaaaattcccaggactccacagctttgcaccagataagcctggaggaatactaatgatggatctaaaagaagaaaaaccaagggcacgggaattaagaatcagtcgtgggtttgatttggcctcattcaatccacatggcatcagcactttcatagacaacgatgacacagtttatctctttgttgtaaaccacccagaattcaagaatacagtggaaatttttaaatttgaagaagcagaaaattctctgttgcatctgaaaacagtcaaacatgagcttcttccaagtgtgaatgacatcacagctgttggaccggcacatttctatgccacaaatgaccactacttctctgatcctttcttaaagtatttagaaacatacttgaacttacactgggcaaatgttgtttactacagtccaaatgaagttaaagtggtagcagaaggatttgattcagcaaatgggatcaatatttcacctgatgataagtatatctatgttgctgacatattggctcatgaaattcatgttttggaaaaacacactaatatgaatttaactcagttgaaggtacttgagctggatacactggtggataatttatctattgatccttcctcgggggacatctgggtaggctgtcatcctaatggccagaagctcttcgtgtatgacccgaacaatcctccctcgtcagaggttctccgcatccagaacattctatctgagaagcctacagtgactacagtttatgccaacaatgggtctgttctccaaggaagttctgtagcctcagtgtatgatgggaagctgctcataggcactttataccacagagccttgtattgtgaactctaaattgtacttttggcatgaaagtgcgataacttaacaattaattttctatgaattgctaattctgagggaatttaaccagcaacattgacccagaaatgtatggcatgtgtagttaattttattccagtaaggaacggcccttttagttcttagagcacttttaacaaaaaaggaaaatgaacaggttctttaaaatgccaagcaagggacagaaaagaaagctgctttcgaataaagtgaatacattttgcacaaagtaagcctcacctttgccttccaactgccagaacatggattccactgaaatagagtgaattatatttccttaaaatgtgagtgacctcacttctggcactgtgactactatggctgtttagaactactgataataacgtattttgatgttttgtacttacatctttgtttaccattaaaaagttggagttatattaaagactaactaaaatccc

SEQ ID NO: 315682 - DNA, 456 bp, Homo sapiens
  misc_feature (17)..(17): n is a, c, g, or t
  misc_feature (50)..(50): n is a, c, g, or t
gagacggggcggatggnggggggtgtggggggatatgggggatatacttnggtagtcaaacggggcaacattgacccagaaatgtatggcatgtgtagttaattttattccagtaaggaacggcccttttagttcttagagcacttttaacaaaaaaggaaaatgaacaggttctttaaaatgccaagcaagggacagaaaagaaagctgctttcgaataaagtgaatacattttgcacaaagtaagcctcacctttgccttccaactgccagaacatggattccactgaaatagagtgaattatatttccttaaaatgtgagtgacctcacttctggcactgtgactactatggctgtttagaactactgataataacgtattttgatgttttgtacttacatctttgtttaccattaaaaagttggagttatattaaagactaactaaaatccc

SEQ ID NO: 315683 - DNA, 858 bp, Homo sapiens
tttttttgtagagacagagtcttgctatgttgcccaggctggtctcaaactgctggcctcaagcagtcctcccacgtcagcctcccaaagtgctggaattataggcatgagccaccaggcctgacctaaagctgtagtaatttaaaaagtgttatattggcacaggaatagacatgagacattaaaataacaaaacagagagtccctaaatagaccaatatgtaaatgtcagagatctagcacatgataaaggtgatattttgaatcagtgggagaaggatggactgtatgccaggcactgttccaggcactgggatctagcagtgaacaaatttccacagtcagtatgtagatgtcacttttctccaccctcagctctccctggaatcacctagtccaccaaccttctgattactctctgaagagaataaatccctgatcttcttttcagttattttcaggctttcagtattccacctccccgttattattttttctgttatcttttctctgttttttgagtttttgtggctttatgccactactttaaccacaatctctatttatccttcatgtacagttcccatgttagtccataaaaatacttaagcttttgtatttaacatttttcaccgttttggaaagggtctaaaattcccaggactccacagctttgcaccagataagcctggaggaatactaatgatggatctaaaagaagaaaaaccaagggcacgggaattaagaatcagtcgtgggtttgatttggcctcattcaatccacatggcatcagcactttcatagacaacggtaagagccaatgggctaccaacatttagtaacgtgtgatggttcac

SEQ ID NO: 315684 - DNA, 479 bp, Homo sapiens
aaggggtttaaactgacatttattaaaaagaatggttccttggaaaaaacatcagaaccatccctaaagatacagtcactctgataaagtaaacagagtcccagttatgctctgtgtaacaaataacagaacttgaacatgacatttatctgttccttaaacttacagaagctggctctgaagatattgacatacttcccaatggtctggctttttttagtgtgggtgagtgtcttcttccttccccaaattcagcagaggagatacaagggtatttgatgagggctgcagaacacagtaagttgcttttaaaattcattttccaaaatgcattctgaagaaaagagaggtcaaacaagatcttggaaaacttcctccagcttttctaaatgtagagatgaagactctttgcccattgagatagtgttctttatttccccattgcattgcactaaaatattccaatgcaatctgtgttt

SEQ ID NO: 315685 - DNA, 1647 bp, Homo sapiens
agcggagcgcggccggcaccatcgagccgggaagatggcaccgcccacggagctgctggccaggccggagcgaggcagcgcgcccggctcccgcgccatggggcggctggtggctgtgggcttgctggggatcgcgctggcgctcctgggcgagaggcttctggcactcagaaatcgacttaaagcctccagagaagtagaatctgtagaccttccacactgccacctgattaaaggaattgggtgagtgtcttcttccttccccaaattcagcagaggagatacaagggtatttgatgagggctgcagaacaggtctaaaattcccaggactccacagctttgcaccagataagcctggaggaatactaatgatggatctaaaagaagaaaaaccaagggcacgggaattaagaatcagtcgtgggtttgatttggcctcattcaatccacatggcatcagcactttcatagacaacgatgacacagtttatctctttgttgtaaaccacccagaattcaagaatacagtggaaatttttaaatttgaagaagcagaaaattctctgttgcatctgaaaacagtcaaacatgagcttcttccaagtgtgaatgacatcacagctgttggaccggcacatttctatgccacaaatgaccactacttctctgatcctttcttaaagtatttagaaacatacttgaacttacactgggcaaatgttgtttactacagtccaaatgaagttaaagtggtagcagaaggatttgattcagcaaatgggatcaatatttcacctgatgataagtatatctatgttgctgacatattggctcatgaaattcatgttttggaaaaacacactaatatgaatttaactcagttgaaggtacttgagctggatacactggtggataatttatctattgatccttcctcgggggacatctgggtaggctgtcatcctaatggccagaagctcttcgtgtatgacccgaacaatcctccctcgtcagaggttctccgcatccagaacattctatctgagaagcctacagtgactacagtttatgccaacaatgggtctgttctccaaggaagttctgtagcctcagtgtatgatgggaagctgctcataggcactttataccacagagccttgtattgtgaactctaaattgtacttttggcatgaaagtgcgataacttaacaattaattttctatgaattgctaattctgagggaatttaaccagcaacattgacccagaaatgtatggcatgtgtagttaattttattccagtaaggaacggcccttttagttcttagagcacttttaacaaaaaaggaaaatgaacaggttctttaaaatgccaagcaagggacagaaaagaaagctgctttcgaataaagtgaatacattttgcacaaagtaagcctcacctttgccttccaactgccagaacatggattccactgaaatagagtgaattatatttccttaaaatgtgagtgacctcacttctggcactgtgactactatggctgtttagaactactgataataacgtattttgatgttttgtacttacatctttgtttaccattaaaaagttggagttatattaaagactaactaaaatccc

SEQ ID NO: 315686 - DNA, 1979 bp, Homo sapiens
tttttttgtagagacagagtcttgctatgttgcccaggctggtctcaaactgctggcctcaagcagtcctcccacgtcagcctcccaaagtgctggaattataggcatgagccaccaggcctgacctaaagctgtagtaatttaaaaagtgttatattggcacaggaatagacatgagacattaaaataacaaaacagagagtccctaaatagaccaatatgtaaatgtcagagatctagcacatgataaaggtgatattttgaatcagtgggagaaggatggactgtatgccaggcactgttccaggcactgggatctagcagtgaacaaatttccacagtcagtatgtagatgtcacttttctccaccctcagctctccctggaatcacctagtccaccaaccttctgattactctctgaagagaataaatccctgatcttcttttcagttattttcaggctttcagtattccacctccccgttattattttttctgttatcttttctctgttttttgagtttttgtggctttatgccactactttaaccacaatctctatttatccttcatgtacagttcccatgttagtccataaaaatacttaagcttttgtatttaacatttttcaccgttttggaaagggtctaaaattcccaggactccacagctttgcaccagataagcctggaggaatactaatgatggatctaaaagaagaaaaaccaagggcacgggaattaagaatcagtcgtgggtttgatttggcctcattcaatccacatggcatcagcactttcatagacaacgatgacacagtttatctctttgttgtaaaccacccagaattcaagaatacagtggaaatttttaaatttgaagaagcagaaaattctctgttgcatctgaaaacagtcaaacatgagcttcttccaagtgtgaatgacatcacagctgttggaccggcacatttctatgccacaaatgaccactacttctctgatcctttcttaaagtatttagaaacatacttgaacttacactgggcaaatgttgtttactacagtccaaatgaagttaaagtggtagcagaaggatttgattcagcaaatgggatcaatatttcacctgatgataagtatatctatgttgctgacatattggctcatgaaattcatgttttggaaaaacacactaatatgaatttaactcagttgaaggtacttgagctggatacactggtggataatttatctattgatccttcctcgggggacatctgggtaggctgtcatcctaatggccagaagctcttcgtgtatgacccgaacaatcctccctcgtcagaggttctccgcatccagaacattctatctgagaagcctacagtgactacagtttatgccaacaatgggtctgttctccaaggaagttctgtagcctcagtgtatgatgggaagctgctcataggcactttataccacagagccttgtattgtgaactctaaattgtacttttggcatgaaagtgcgataacttaacaattaattttctatgaattgctaattctgagggaatttaaccagcaacattgacccagaaatgtatggcatgtgtagttaattttattccagtaaggaacggcccttttagttcttagagcacttttaacaaaaaaggaaaatgaacaggttctttaaaatgccaagcaagggacagaaaagaaagctgctttcgaataaagtgaatacattttgcacaaagtaagcctcacctttgccttccaactgccagaacatggattccactgaaatagagtgaattatatttccttaaaatgtgagtgacctcacttctggcactgtgactactatggctgtttagaactactgataataacgtattttgatgttttgtacttacatctttgtttaccattaaaaagttggagttatattaaagactaactaaaatccc

SEQ ID NO: 315687 - DNA, 1606 bp, Homo sapiens
agcggagcgcggccggcaccatcgagccgggaagatggcaccgcccacggagctgctggccaggccggagcgaggcagcgcgcccggctcccgcgccatggggcggctggtggctgtgggcttgctggggatcgcgctggcgctcctgggcgagaggcttctggcactcagaaatcgacttaaagcctccagagaagtagaatctgtagaccttccacactgccacctgattaaaggaattgaagctggctctgaagatattgacatacttcccaatggtctggctttttttagtgtgctttgcaccagataagcctggaggaatactaatgatggatctaaaagaagaaaaaccaagggcacgggaattaagaatcagtcgtgggtttgatttggcctcattcaatccacatggcatcagcactttcatagacaacgatgacacagtttatctctttgttgtaaaccacccagaattcaagaatacagtggaaatttttaaatttgaagaagcagaaaattctctgttgcatctgaaaacagtcaaacatgagcttcttccaagtgtgaatgacatcacagctgttggaccggcacatttctatgccacaaatgaccactacttctctgatcctttcttaaagtatttagaaacatacttgaacttacactgggcaaatgttgtttactacagtccaaatgaagttaaagtggtagcagaaggatttgattcagcaaatgggatcaatatttcacctgatgataagtatatctatgttgctgacatattggctcatgaaattcatgttttggaaaaacacactaatatgaatttaactcagttgaaggtacttgagctggatacactggtggataatttatctattgatccttcctcgggggacatctgggtaggctgtcatcctaatggccagaagctcttcgtgtatgacccgaacaatcctccctcgtcagaggttctccgcatccagaacattctatctgagaagcctacagtgactacagtttatgccaacaatgggtctgttctccaaggaagttctgtagcctcagtgtatgatgggaagctgctcataggcactttataccacagagccttgtattgtgaactctaaattgtacttttggcatgaaagtgcgataacttaacaattaattttctatgaattgctaattctgagggaatttaaccagcaacattgacccagaaatgtatggcatgtgtagttaattttattccagtaaggaacggcccttttagttcttagagcacttttaacaaaaaaggaaaatgaacaggttctttaaaatgccaagcaagggacagaaaagaaagctgctttcgaataaagtgaatacattttgcacaaagtaagcctcacctttgccttccaactgccagaacatggattccactgaaatagagtgaattatatttccttaaaatgtgagtgacctcacttctggcactgtgactactatggctgtttagaactactgataataacgtattttgatgttttgtacttacatctttgtttaccattaaaaagttggagttatattaaagactaactaaaatccc

SEQ ID NO: 315688 - DNA, 1703 bp, Homo sapiens
agcggagcgcggccggcaccatcgagccgggaagatggcaccgcccacggagctgctggccaggccggagcgaggcagcgcgcccggctcccgcgccatggggcggctggtggctgtgggcttgctggggatcgcgctggcgctcctgggcgagaggcttctggcactcagaaatcgacttaaagcctccagagaagtagaatctgtagaccttccacactgccacctgattaaaggaattgaagctggctctgaagatattgacatacttcccaatggtctggctttttttagtgtgggtgagtgtcttcttccttccccaaattcagcagaggagatacaagggtatttgatgagggctgcagaacaggtctaaaattcccaggactccacagctttgcaccagataagcctggaggaatactaatgatggatctaaaagaagaaaaaccaagggcacgggaattaagaatcagtcgtgggtttgatttggcctcattcaatccacatggcatcagcactttcatagacaacgatgacacagtttatctctttgttgtaaaccacccagaattcaagaatacagtggaaatttttaaatttgaagaagcagaaaattctctgttgcatctgaaaacagtcaaacatgagcttcttccaagtgtgaatgacatcacagctgttggaccggcacatttctatgccacaaatgaccactacttctctgatcctttcttaaagtatttagaaacatacttgaacttacactgggcaaatgttgtttactacagtccaaatgaagttaaagtggtagcagaaggatttgattcagcaaatgggatcaatatttcacctgatgataagtatatctatgttgctgacatattggctcatgaaattcatgttttggaaaaacacactaatatgaatttaactcagttgaaggtacttgagctggatacactggtggataatttatctattgatccttcctcgggggacatctgggtaggctgtcatcctaatggccagaagctcttcgtgtatgacccgaacaatcctccctcgtcagaggttctccgcatccagaacattctatctgagaagcctacagtgactacagtttatgccaacaatgggtctgttctccaaggaagttctgtagcctcagtgtatgatgggaagctgctcataggcactttataccacagagccttgtattgtgaactctaaattgtacttttggcatgaaagtgcgataacttaacaattaattttctatgaattgctaattctgagggaatttaaccagcaacattgacccagaaatgtatggcatgtgtagttaattttattccagtaaggaacggcccttttagttcttagagcacttttaacaaaaaaggaaaatgaacaggttctttaaaatgccaagcaagggacagaaaagaaagctgctttcgaataaagtgaatacattttgcacaaagtaagcctcacctttgccttccaactgccagaacatggattccactgaaatagagtgaattatatttccttaaaatgtgagtgacctcacttctggcactgtgactactatggctgtttagaactactgataataacgtattttgatgttttgtacttacatctttgtttaccattaaaaagttggagttatattaaagactaactaaaatccc

SEQ ID NO: 315689 - DNA, 1561 bp, Homo sapiens
agcggagcgcggccggcaccatcgagccgggaagatggcaccgcccacggagctgctggccaggccggagcgaggcagcgcgcccggctcccgcgccatggggcggctggtggctgtgggcttgctggggatcgcgctggcgctcctgggcgagaggcttctggcactcagaagctggctctgaagatattgacatacttcccaatggtctggctttttttagtgtgggtctaaaattcccaggactccacagctttgcaccagataagcctggaggaatactaatgatggatctaaaagaagaaaaaccaagggcacgggaattaagaatcagtcgtgggtttgatttggcctcattcaatccacatggcatcagcactttcatagacaacgatgacacagtttatctctttgttgtaaaccacccagaattcaagaatacagtggaaatttttaaatttgaagaagcagaaaattctctgttgcatctgaaaacagtcaaacatgagcttcttccaagtgtgaatgacatcacagctgttggaccggcacatttctatgccacaaatgaccactacttctctgatcctttcttaaagtatttagaaacatacttgaacttacactgggcaaatgttgtttactacagtccaaatgaagttaaagtggtagcagaaggatttgattcagcaaatgggatcaatatttcacctgatgataagtatatctatgttgctgacatattggctcatgaaattcatgttttggaaaaacacactaatatgaatttaactcagttgaaggtacttgagctggatacactggtggataatttatctattgatccttcctcgggggacatctgggtaggctgtcatcctaatggccagaagctcttcgtgtatgacccgaacaatcctccctcgtcagaggttctccgcatccagaacattctatctgagaagcctacagtgactacagtttatgccaacaatgggtctgttctccaaggaagttctgtagcctcagtgtatgatgggaagctgctcataggcactttataccacagagccttgtattgtgaactctaaattgtacttttggcatgaaagtgcgataacttaacaattaattttctatgaattgctaattctgagggaatttaaccagcaacattgacccagaaatgtatggcatgtgtagttaattttattccagtaaggaacggcccttttagttcttagagcacttttaacaaaaaaggaaaatgaacaggttctttaaaatgccaagcaagggacagaaaagaaagctgctttcgaataaagtgaatacattttgcacaaagtaagcctcacctttgccttccaactgccagaacatggattccactgaaatagagtgaattatatttccttaaaatgtgagtgacctcacttctggcactgtgactactatggctgtttagaactactgataataacgtattttgatgttttgtacttacatctttgtttaccattaaaaagttggagttatattaaagactaactaaaatccc

SEQ ID NO: 315690 - DNA, 1447 bp, Homo sapiens
  misc_feature (31)..(31): n is a, c, g, or t
gcggcgccccccccgaccgcctgtcgccccncgcacgtcccctccacccctcccctcccttcccgagcggtcctcatacgcgtctacttagtcctcacgccctcagcagaacaggtctaaaattcccaggactccacagctttgcaccagataagcctggaggaatactaatgatggatctaaaagaagaaaaaccaagggcacgggaattaagaatcagtcgtgggtttgatttggcctcattcaatccacatggcatcagcactttcatagacaacgatgacacagtttatctctttgttgtaaaccacccagaattcaagaatacagtggaaatttttaaatttgaagaagcagaaaattctctgttgcatctgaaaacagtcaaacatgagcttcttccaagtgtgaatgacatcacagctgttggaccggcacatttctatgccacaaatgaccactacttctctgatcctttcttaaagtatttagaaacatacttgaacttacactgggcaaatgttgtttactacagtccaaatgaagttaaagtggtagcagaaggatttgattcagcaaatgggatcaatatttcacctgatgataagtatatctatgttgctgacatattggctcatgaaattcatgttttggaaaaacacactaatatgaatttaactcagttgaaggtacttgagctggatacactggtggataatttatctattgatccttcctcgggggacatctgggtaggctgtcatcctaatggccagaagctcttcgtgtatgacccgaacaatcctccctcgtcagaggttctccgcatccagaacattctatctgagaagcctacagtgactacagtttatgccaacaatgggtctgttctccaaggaagttctgtagcctcagtgtatgatgggaagctgctcataggcactttataccacagagccttgtattgtgaactctaaattgtacttttggcatgaaagtgcgataacttaacaattaattttctatgaattgctaattctgagggaatttaaccagcaacattgacccagaaatgtatggcatgtgtagttaattttattccagtaaggaacggcccttttagttcttagagcacttttaacaaaaaaggaaaatgaacaggttctttaaaatgccaagcaagggacagaaaagaaagctgctttcgaataaagtgaatacattttgcacaaagtaagcctcacctttgccttccaactgccagaacatggattccactgaaatagagtgaattatatttccttaaaatgtgagtgacctcacttctggcactgtgactactatggctgtttagaactactgataataacgtattttgatgttttgtacttacatctttgtttaccattaaaaagttggagttatattaaagactaactaaaatccc

SEQ ID NO: 315691 - DNA, 1596 bp, Homo sapiens
agcggagcgcggccggcaccatcgagccgggaagatggcaccgcccacggagctgctggccaggccggagcgaggcagcgcgcccggctcccgcgccatggggcggctggtggctgtgggcttgctggggatcgcgctggcgctcctgggcgagaggcttctggcactcagaaatcgacttaaagcctccagagaagtagaatctgtagaccttccacactgccacctgattaaaggaattgaagctggctctgaagatattgacatacttcccaatggtctggctttttttagtgtgggtctaaaattcccaggactccacagctttgcaccagataagcctggaggaatactaatgatggatctaaaagaagaaaaaccaagggcacgggaattaagaatcagtcgtgggtttgatttggcctcattcaatccacatggcatcagcactttcatagacaacgaattcaagaatacagtggaaatttttaaatttgaagaagcagaaaattctctgttgcatctgaaaacagtcaaacatgagcttcttccaagtgtgaatgacatcacagctgttggaccggcacatttctatgccacaaatgaccactacttctctgatcctttcttaaagtatttagaaacatacttgaacttacactgggcaaatgttgtttactacagtccaaatgaagttaaagtggtagcagaaggatttgattcagcaaatgggatcaatatttcacctgatgataagtatatctatgttgctgacatattggctcatgaaattcatgttttggaaaaacacactaatatgaatttaactcagttgaaggtacttgagctggatacactggtggataatttatctattgatccttcctcgggggacatctgggtaggctgtcatcctaatggccagaagctcttcgtgtatgacccgaacaatcctccctcgtcagaggttctccgcatccagaacattctatctgagaagcctacagtgactacagtttatgccaacaatgggtctgttctccaaggaagttctgtagcctcagtgtatgatgggaagctgctcataggcactttataccacagagccttgtattgtgaactctaaattgtacttttggcatgaaagtgcgataacttaacaattaattttctatgaattgctaattctgagggaatttaaccagcaacattgacccagaaatgtatggcatgtgtagttaattttattccagtaaggaacggcccttttagttcttagagcacttttaacaaaaaaggaaaatgaacaggttctttaaaatgccaagcaagggacagaaaagaaagctgctttcgaataaagtgaatacattttgcacaaagtaagcctcacctttgccttccaactgccagaacatggattccactgaaatagagtgaattatatttccttaaaatgtgagtgacctcacttctggcactgtgactactatggctgtttagaactactgataataacgtattttgatgttttgtacttacatctttgtttaccattaaaaagttggagttatattaaagactaactaaaatccc

SEQ ID NO: 315692 - DNA, 1578 bp, Homo sapiens
agcggagcgcggccggcaccatcgagccgggaagatggcaccgcccacggagctgctggccaggccggagcgaggcagcgcgcccggctcccgcgccatggggcggctggtggctgtgggcttgctggggatcgcgctggcgctcctgggcgagaggcttctggcactcagaaatcgacttaaagcctccagagaagtagaatctgtagaccttccacactgccacctgattaaaggaattgaagctggctctgaagatattgacatacttcccaatggtctggctttttttagtgtgggtctaaaattcccaggactccacagctttgcaccagataagcctggaggaatactaatgatggatctaaaagaagacaatccacatggcatcagcactttcatagacaacgatgacacagtttatctctttgttgtaaaccacccagaattcaagaatacagtggaaatttttaaatttgaagaagcagaaaattctctgttgcatctgaaaacagtcaaacatgagcttcttccaagtgtgaatgacatcacagctgttggaccggcacatttctatgccacaaatgaccactacttctctgatcctttcttaaagtatttagaaacatacttgaacttacactgggcaaatgttgtttactacagtccaaatgaagttaaagtggtagcagaaggatttgattcagcaaatgggatcaatatttcacctgatgataagtatatctatgttgctgacatattggctcatgaaattcatgttttggaaaaacacactaatatgaatttaactcagttgaaggtacttgagctggatacactggtggataatttatctattgatccttcctcgggggacatctgggtaggctgtcatcctaatggccagaagctcttcgtgtatgacccgaacaatcctccctcgtcagaggttctccgcatccagaacattctatctgagaagcctacagtgactacagtttatgccaacaatgggtctgttctccaaggaagttctgtagcctcagtgtatgatgggaagctgctcataggcactttataccacagagccttgtattgtgaactctaaattgtacttttggcatgaaagtgcgataacttaacaattaattttctatgaattgctaattctgagggaatttaaccagcaacattgacccagaaatgtatggcatgtgtagttaattttattccagtaaggaacggcccttttagttcttagagcacttttaacaaaaaaggaaaatgaacaggttctttaaaatgccaagcaagggacagaaaagaaagctgctttcgaataaagtgaatacattttgcacaaagtaagcctcacctttgccttccaactgccagaacatggattccactgaaatagagtgaattatatttccttaaaatgtgagtgacctcacttctggcactgtgactactatggctgtttagaactactgataataacgtattttgatgttttgtacttacatctttgtttaccattaaaaagttggagttatattaaagactaactaaaatccc

SEQ ID NO: 315693 - DNA, 1657 bp, Homo sapiens
agcggagcgcggccggcaccatcgagccgggaagatggcaccgcccacggagctgctggccaggccggagcgaggcagcgcgcccggctcccgcgccatggggcggctggtggctgtgggcttgctggggatcgcgctggcgctcctgggcgagaggcttctggcactcagaaatcgacttaaagcctccagagaagtagaatctgtagaccttccacactgccacctgattaaaggaattgaagctggctctgaagatattgacatacttcccaatggtctggctttttttagtgtgggtctaaaattcccaggactccacagctttgcaccagataagcctggaggaatactaatgatggatctaaaagaagaaaaaccaagggcacgggaattaagaatcagtcgtgggtttgatttggcctcattcaatccacatggcatcagcactttcatagacaacgatgacacagtttatctctttgttgtaaaccacccagaattcaagaatacagtggaaatttttaaatttgaagaagcagaaaattctctgttgcatctgaaaacagtcaaacatgagcttcttccaagtgtgaatgacatcacagctgttggaccggcacatttctatgccacaaatgaccactacttctctgatcctttcttaaagtatttagaaacatacttgaacttacactgggcaaatgttgtttactacagtccaaatgaagttaaagtggtagcagaaggatttgattcagcaaatgggatcaatatttcacctgatgataagtatatctatgttgctgacatattggctcatgaaattcatgttttggaaaaacacactaatatgaatttaactcagttgaagattttgacaatttctcatttggaaggtacttgagctggatacactggtggataatttatctattgatccttcctcgggggacatctgggtaggctgtcatcctaatggccagaagctcttcgtgtatgacccgaacaatcctccctcgtcagaggttctccgcatccagaacattctatctgagaagcctacagtgactacagtttatgccaacaatgggtctgttctccaaggaagttctgtagcctcagtgtatgatgggaagctgctcataggcactttataccacagagccttgtattgtgaactctaaattgtacttttggcatgaaagtgcgataacttaacaattaattttctatgaattgctaattctgagggaatttaaccagcaacattgacccagaaatgtatggcatgtgtagttaattttattccagtaaggaacggcccttttagttcttagagcacttttaacaaaaaaggaaaatgaacaggttctttaaaatgccaagcaagggacagaaaagaaagctgctttcgaataaagtgaatacattttgcacaaagtaagcctcacctttgccttccaactgccagaacatggattccactgaaatagagtgaattatatttccttaaaatgtgagtgacctcacttctggcactgtgactactatggctgtttagaactactgataataacgtattttgatgttttgtacttacatctttgtttaccattaaaaagttggagttatattaaagactaactaaaatccc

SEQ ID NO: 315694 - DNA, 1473 bp, Homo sapiens
  misc_feature (35)..(35): n is a, c, g, or t
gttaaggatcccctcacgcttatacttctcggagnggcttctggactcaaatcgacttaaagcctccagagaagtagaatctgtagaccttccacactgccacctgattaaaggaattgaagctggctctgaagatattgacatacttcccaatggtctggctttttttagtgtgggtctaaaattcccaggactccacagctttgcaccagataagcctggaggaatactaatgatggatctaaaagaagaaaaaccaagggcacgggaattaagaatcagtcgtgggtttgatttggcctcattcaatccacatggcatcagcactttcatagacaacgaattcaagaatacagtggaaatttttaaatttgaagaagcagaaaattctctgttgcatctgaaaacagtcaaacatgagcttcttccaagtgtgaatgacatcacagctgttggaccggcacatttctatgccacaaatgaccactacttctctgatcctttcttaaagtatttagaaacatacttgaacttacactgggcaaatgttgtttactacagtccaaatgaagttaaagtggtagcagaaggatttgattcagcaaatgggatcaatatttcacctgatgataagtatatctatgttgctgacatattggctcatgaaattcatgttttggaaaaacacactaatatgaatttaactcagttgaaggtacttgagctggatacactggtggataatttatctattgatccttcctcgggggacatctgggtaggctgtcatcctaatggccagaagctcttcgtgtatgacccgaacaatcctccctcgtcagaggttctccgcatccagaacattctatctgagaagcctacagtgactacagtttatgccaacaatgggtctgttctccaaggaagttctgtagcctcagtgtatgatgggaagctgctcataggcactttataccacagagccttgtattgtgaactctaaattgtacttttggcatgaaagtgcgataacttaacaattaattttctatgaattgctaattctgagggaatttaaccagcaacattgacccagaaatgtatggcatgtgtagttaattttattccagtaaggaacggcccttttagttcttagagcacttttaacaaaaaaggaaaatgaacaggttctttaaaatgccaagcaagggacagaaaagaaagctgctttcgaataaagtgaatacattttgcacaaagtaagcctcacctttgccttccaactgccagaacatggattccactgaaatagagtgaattatatttccttaaaatgtgagtgacctcacttctggcactgtgactactatggctgtttagaactactgataataacgtattttgatgttttgtacttacatctttgtttaccattaaaaagttggagttatattaaagactaactaaaatccc

SEQ ID NO: 315695 - DNA, 1578 bp, Homo sapiens
agcggagcgcggccggcaccatcgagccgggaagatggcaccgcccacggagctgctggccaggccggagcgaggcagcgcgcccggctcccgcgccatggggcggctggtggctgtgggcttgctggggatcgcgctggcgctcctgggcgagaggcttctggcactcagaaatcgacttaaagcctccagagaagtagaatctgtagaccttccacactgccacctgattaaaggaattgaagctggctctgaagatattgacatacttcccaatggtctggctttttttagtgtgggtctaaaattcccaggactccacagctttgcaccagataagcctggaggaatactaatgatggatctaaaagaagaaaaaccaagggcacgggaattaagaatcagtcgtgggtttgatttggcctcattcaatccacatggcatcagcactttcatagacaacgatgacacagtttatctctttgttgtaaaccacccagaattcaagaatacagtggaaatttttaaatttgaagaagcagaaaattctctgttgcatctgacggcacatttctatgccacaaatgaccactacttctctgatcctttcttaaagtatttagaaacatacttgaacttacactgggcaaatgttgtttactacagtccaaatgaagttaaagtggtagcagaaggatttgattcagcaaatgggatcaatatttcacctgatgataagtatatctatgttgctgacatattggctcatgaaattcatgttttggaaaaacacactaatatgaatttaactcagttgaaggtacttgagctggatacactggtggataatttatctattgatccttcctcgggggacatctgggtaggctgtcatcctaatggccagaagctcttcgtgtatgacccgaacaatcctccctcgtcagaggttctccgcatccagaacattctatctgagaagcctacagtgactacagtttatgccaacaatgggtctgttctccaaggaagttctgtagcctcagtgtatgatgggaagctgctcataggcactttataccacagagccttgtattgtgaactctaaattgtacttttggcatgaaagtgcgataacttaacaattaattttctatgaattgctaattctgagggaatttaaccagcaacattgacccagaaatgtatggcatgtgtagttaattttattccagtaaggaacggcccttttagttcttagagcacttttaacaaaaaaggaaaatgaacaggttctttaaaatgccaagcaagggacagaaaagaaagctgctttcgaataaagtgaatacattttgcacaaagtaagcctcacctttgccttccaactgccagaacatggattccactgaaatagagtgaattatatttccttaaaatgtgagtgacctcacttctggcactgtgactactatggctgtttagaactactgataataacgtattttgatgttttgtacttacatctttgtttaccattaaaaagttggagttatattaaagactaactaaaatccc

SEQ ID NO: 315696 - DNA, 1579 bp, Homo sapiens
agcggagcgcggccggcaccatcgagccgggaagatggcaccgcccacggagctgctggccaggccggagcgaggcagcgcgcccggctcccgcgccatggggcggctggtggctgtgggcttgctggggatcgcgctggcgctcctgggcgagaggcttctggcactcagaaatcgacttaaagcctccagagaagtagaatctgtagaccttccacactgccacctgattaaaggaattgaagctggctctgaagatattgacatacttcccaatggtctggctttttttagtgtgggtctaaaattcccaggactccacagctttgcaccagataagcctggaggaatactaatgatggatctaaaagaagaaaaaccaagggcacgggaattaagaatcagtcgtgggtttgatttggcctcattcaatccacatggcatcagcactttcatagacaacgatgacacagtttatctctttgttgtaaaccacccagaattcaagaatacagtggaaatttttaaatttgaagaagcagaaaattctctgttgcatctgaaaacagtcaaacatgagcttcttccaagtgtgaatgacatcacagctgttggaccggcacatttctatgccacaaatgaccactacttctctgatcctttcttaaagtatttagaaacatacttgaacttacactgggcaaatgttgtttactacagtccaaatgaagttaaagtggtagcagaaggatttgattcagcaaatgggatcaatatttcacctgatgataagtatatctatgttgctgacatattggctcatgaaattcatgttttggatggtggataatttatctattgatccttcctcgggggacatctgggtaggctgtcatcctaatggccagaagctcttcgtgtatgacccgaacaatcctccctcgtcagaggttctccgcatccagaacattctatctgagaagcctacagtgactacagtttatgccaacaatgggtctgttctccaaggaagttctgtagcctcagtgtatgatgggaagctgctcataggcactttataccacagagccttgtattgtgaactctaaattgtacttttggcatgaaagtgcgataacttaacaattaattttctatgaattgctaattctgagggaatttaaccagcaacattgacccagaaatgtatggcatgtgtagttaattttattccagtaaggaacggcccttttagttcttagagcacttttaacaaaaaaggaaaatgaacaggttctttaaaatgccaagcaagggacagaaaagaaagctgctttcgaataaagtgaatacattttgcacaaagtaagcctcacctttgccttccaactgccagaacatggattccactgaaatagagtgaattatatttccttaaaatgtgagtgacctcacttctggcactgtgactactatggctgtttagaactactgataataacgtattttgatgttttgtacttacatctttgtttaccattaaaaagttggagttatattaaagactaactaaaatccc

SEQ ID NO: 315697 - DNA, 1355 bp, Homo sapiens
accagccaatcaggctctctccagctctgtactgtggacagctctgtccttacgtataattgttaaaccctacatttcttgctgtcaaaaaacatgccctgatggcactaagttctttcttctcttatggtaatcctgccataattgctaaatgacctgtgttcagattacctggtaccatacaaaattgttctctggcaacaatattatagtatattgtatatgactatagtcgtgatttttagctcgtcttttcctcttaccaaaaccaacaggccttttgtttcctctcacatgctatttttctttttcagtgtgaatgacatcacagctgttggaccggcacatttctatgccacaaatgaccactacttctctgatcctttcttaaagtatttagaaacatacttgaacttacactgggcaaatgttgtttactacagtccaaatgaagttaaagtggtagcagaaggatttgattcagcaaatgggatcaatatttcacctgatgataagtatatctatgttgctgacatattggctcatgaaattcatgttttggaaaaacacactaatatgaatttaactcagttgaaggtacttgagctggatacactggtggataatttatctattgatccttcctcgggggacatctgggtaggctgtcatcctaatggccagaagctcttcgtgtatgacccgaacaatcctccctcgtcagaggttctccgcatccagaacattctatctgagaagcctacagtgactacagtttatgccaacaatgggtctgttctccaaggaagttctgtagcctcagtgtatgatgggaagctgctcataggcactttataccacagagccttgtattgtgaactctaaattgtacttttggcatgaaagtgcgataacttaacaattaattttctatgaattgctaattctgagggaatttaaccagcaacattgacccagaaatgtatggcatgtgtagttaattttattccagtaaggaacggcccttttagttcttagagcacttttaacaaaaaaggaaaatgaacaggttctttaaaatgccaagcaagggacagaaaagaaagctgctttcgaataaagtgaatacattttgcacaaagtaagcctcacctttgccttccaactgccagaacatggattccactgaaatagagtgaattatatttccttaaaatgtgagtgacctcacttctggcactgtgactactatggctgtttagaactactgataataacgtattttgatgttttgtacttacatctttgtttaccattaaaaagttggagttatattaaagactaactaaaatccc

SEQ ID NO: 315698 - DNA, 1550 bp, Homo sapiens
agcggagcgcggccggcaccatcgagccgggaagatggcaccgcccacggagctgctggccaggccggagcgaggcagcgcgcccggctcccgcgccatggggcggctggtggctgtgggcttgctggggatcgcgctggcgctcctgggcgagaggcttctggcactcagaaatcgacttaaagcctccagagaagtagaatctgtagaccttccacactgccacctgattaaaggaattgaagctggctctgaagatattgacatacttcccaatggtctggctttttttagtgtgggtctaaaattcccaggactccacagctttgcaccagataagcctggaggaatactaatgatggatctaaaagaagaaaaaccaagggcacgggaattaagaatcagtcgtgggtttgatttggcctcattcaatccacatggcatcagcactttcatagacaacgatgacacagtttatctctttgttgtaaaccacccagaattcaagaatacagtggaaatttttaaatttgaagaagcagaaaattctctgttgcatctgaaaacagtcaaacatgagcttcttccaagtgtgaatgacatcacagctgttggaccggcacatttctatgccacaaatgaccactacttctctgatcctttcttaaagtatttagaaacatacttgaacttacactgggcaaatgttgtttactacagtccaaatgaagttaaagtggtagcagaaggatttgattcagcaaatgggatcaatatttcacctgatgataagtacttgagctggatacactggtggataatttatctattgatccttcctcgggggacatctgggtaggctgtcatcctaatggccagaagctcttcgtgtatgacccgaacaatcctccctcgtcagaggttctccgcatccagaacattctatctgagaagcctacagtgactacagtttatgccaacaatgggtctgttctccaaggaagttctgtagcctcagtgtatgatgggaagctgctcataggcactttataccacagagccttgtattgtgaactctaaattgtacttttggcatgaaagtgcgataacttaacaattaattttctatgaattgctaattctgagggaatttaaccagcaacattgacccagaaatgtatggcatgtgtagttaattttattccagtaaggaacggcccttttagttcttagagcacttttaacaaaaaaggaaaatgaacaggttctttaaaatgccaagcaagggacagaaaagaaagctgctttcgaataaagtgaatacattttgcacaaagtaagcctcacctttgccttccaactgccagaacatggattccactgaaatagagtgaattatatttccttaaaatgtgagtgacctcacttctggcactgtgactactatggctgtttagaactactgataataacgtattttgatgttttgtacttacatctttgtttaccattaaaaagttggagttatattaaagactaactaaaatccc

SEQ ID NO: 315699 - DNA, 1299 bp, Homo sapiens
agcggagcgcggccggcaccatcgagccgggaagatggcaccgcccacggagctgctggccaggccggagcgaggcagcgcgcccggctcccgcgccatggggcggctggtggctgtgggcttgctggggatcgcgctggcgctcctgggcgagaggcttctggcactcagaaatcgacttaaagcctccagagaagtagaatctgtagaccttccacactgccacctgattaaaggaattgaagctggctctgaagatattgacatacttcccaatggtctggctttttttagtgtgggtctaaaattcccaggactccacagctttgcaccagataagcctggaggaatactaatgatggatctaaaagaagaaaaaccaagggcacgggaattaagaatcagtcgtgggtttgatttggcctcattcaatccacatggcatcagcactttcatagacaacgatgacacagtttatctctttgttgtaaaccacccagaattcaagaatacagtggaaatttttaaatttgaagaagcagaaaattctctgttgcatctgaaaacagtcaaacatgagcttcttccaagtgtgaatgacatcacagctgttggaccggcacatttctatgccacaaatgaccactacttctctgatcctttcttaaagtatttagaaacatacttgaacttacactgggcaaatgttgtttactacagtccaaatgaagttaaagtggtagcagaaggatttgattcagcaaatgggatcaatatttcacctgatgataagtatatctatgttgctgacatattggctcatgaaattcatgttttggaaaaacacactaatatgaatttaactcagttgaaggtacttgagctggatacactggtggataatttatctattgatccttcctcgggggacatctgggtaggctgtcatcctaatggccagaagctcttcgtgtatgacccgaacaatcctccctcgtcagaggttctccgcatccagaacattctatctgagaagcctacagtgactacagtttatgccaacaatgggtctgttctccaaggaagttctgtagcctcagtgtatgatgggaagctgctcataggcactttataccacagagccttgtattgtgaactctaaattgtacttttggcatgaaagtgcgataacttaacaattaatccatggatgcacgtgagtagaccatgagtgaccatgacgacgtagcgtagagctcgagtacacgtctctcaaggataatcatattaattctctca

SEQ ID NO: 315700 - DNA, 1050 bp, Homo sapiens
  misc_feature (927)..(927): n is a, c, g, or t
  misc_feature (985)..(985): n is a, c, g, or t
  misc_feature (1042)..(1042): n is a, c, g, or t
agcggagcgcggccggcaccatcgagccgggaagatggcaccgcccacggagctgctggccaggccggagcgaggcagcgcgcccggctcccgcgccatggggcggctggtggctgtgggcttgctggggatcgcgctggcgctcctgggcgagaggcttctggcactcagaaatcgacttaaagcctccagagaagtagaatctgtagaccttccacactgccacctgattaaaggaattgaagctggctctgaagatattgacatacttcccaatggtctggctttttttagtgtgggtctaaaattcccaggactccacagctttgcaccagataagcctggaggaatactaatgatggatctaaaagaagaaaaaccaagggcacgggaattaagaatcagtcgtgggtttgatttggcctcattcaatccacatggcatcagcactttcatagacaacgatgacacagtttatctctttgttgtaaaccacccagaattcaagaatacagtggaaatttttaaatttgaagaagcagaaaattctctgttgcatctgaaaacagtcaaacatgagcttcttccaagtgtgaatgacatcacagctgttggaccggcacatttctatgccacaaatgaccactacttctctgatcctttcttaaagtatttagaaacatacttgaacttacactgggcaaatgttgtttactacagtccaaatgaagttaaagtggtagcagaaggatttgattcagcaaatgggatcaatatttcacctgatgataagtatatctatgttgctgacatattggctcatgaaattcatgttttggaaaaacacactaatatgaatttaactcagttgaaggtacttgaggctgggatacactgggtgggataattttatctattggatccctncctcgggggggacatctgggggtagggcttgtccatccctaatgggcccaggaggctnctttcgtggttattggaccccccgaaccattcccttccccttcgttcaaggggtttncttccccg

SEQ ID NO: 315701 - DNA, 1193 bp, Homo sapiens
agcggagcgcggccggcaccatcgagccgggaagatggcaccgcccacggagctgctggccaggccggagcgaggcagcgcgcccggctcccgcgccatggggcggctggtggctgtgggcttgctggggatcgcgctggcgctcctgggcgagaggcttctggcactcagaaatcgacttaaagcctccagagaagtagaatctgtagaccttccacactgccacctgattaaaggaattgaagctggctctgaagatattgacatacttcccaatggtctggctttttttagtgtgggtctaaaattcccaggactccacagctttgcaccagataagcctggaggaatactaatgatggatctaaaagaagaaaaaccaagggcacgggaattaagaatcagtcgtgggtttgatttggcctcattcaatccacatggcatcagcactttcatagacaacgatgacacagtttatctctttgttgtaaaccacccagaattcaagaatacagtggaaatttttaaatttgaagaagcagaaaattctctgttgcatctgaaaacagtcaaacatgagcttcttccaagtgtgaatgacatcacagctgttggaccggcacatttctatgccacaaatgaccactacttctctgatcctttcttaaagtatttagaaacatacttgaacttacactgggcaaatgttgtttactacagtccaaatgaagttaaagtggtagcagaaggatttgattcagcaaatgggatcaatatttcacctgatgataagtatggccccttatagaatatcttcatttttcttcagttgtggtgctggccaaattctttactttgctttctttgtcaatgtgaaaatagttttcttgacatttatggtatattatacatataatatatagatacactatatatataattatatatgttttgtatatatatttacatatacttagtcacatgtatttatatgcaaatacaataccatatttaagtaaactatataatacagtaatatatatgtatttatatataatatataaagtttggaatacatcattgtcaaatttaattttataaatataaattttaaagtgtgatcatactgatgcatacatattgaagtatcaggtatttccttttaaataaatgtattatttttattggctata

SEQ ID NO: 315702 - DNA, 887 bp, Homo sapiens
agcggagcgcggccggcaccatcgagccgggaagatggcaccgcccacggagctgctggccaggccggagcgaggcagcgcgcccggctcccgcgccatggggcggctggtggctgtgggcttgctggggatcgcgctggcgctcctgggcgagaggcttctggcactcagaaatcgacttaaagcctccagagaagtagaatctgtagaccttccacactgccacctgattaaaggaattgaagctggctctgaagatattgacatacttcccaatggtctggctttttttagtgtgggtctaaaattcccaggactccacagctttgcaccagataagcctggaggaatactaatgatggatctaaaagaagaaaaaccaagggcacgggaattaagaatcagtcgtgggtttgatttggcctcattcaatccacatggcatcagcactttcatagacaacgatgacacagtttatctctttgttgtaaaccacccagaattcaagaatacagtggaaatttttaaatttgaagaagcagaaaattctctgttgcatctgaaaacagtcaaacatgagcttcttccaaggtacttcctcattttgttccttctctaatttatccccagcatttgcaaacaatccctatggtgggttgtcctgtcatcttttataagcgctaatgtatatattagctaatatgtaagagctaaagagcttatatttccttatttataaatgtgtgtgtatagtttccttataaaccagggcaagcatggcatatgaaagttgatgtcactcatactattcactgttctatgcggactcctttgagaaatgatgaagtgcccgactacagggtgatactcttcaggcccatcttgag

SEQ ID NO: 315703 - DNA, 686 bp, Homo sapiens
gaataaaaaaagtaaagatttaataaatttgttttgaaataaaataagttgaaatacgaaaaagacagaaaaggttttgaaagaggttttaaagaaaagtgcaggatattcattggtaaagatgttggtgagaggcttggaagcaaaacttcaggggaaaaagacaacatatggaattgaccacaattgaatttacaagtgaagtggctttacagaggaatcaggggatgtttctgagagaggaaattcattaaattctaacttgaatattttctgtttgcctttaagtcagagcaaaggctttgagtcccagcttcccagtttgtgaccttgagcaattgcttaacttttccaaagcctccaatagtcttcactaagctggctctgaagatattgacatacttcccaatggtctggctttttttagtgtgggtgagtgtcttcttccttccccaaattcagcagaggagatacaagggtatttgatgagggctgcagaacacagtaagttgcttttaaaattcattttccaaaatgcattctgaagaaaagagaggtcaaacaagatcttggaaaacttcctccagcttttctaaatgtagagatgaagactctttgcccattgagatagtgttctttatttccccattgcattgcactaaaatattccaatgcaatctgtgttt

SEQ ID NO: 315704 - DNA, 355 bp, Homo sapiens
gttttatttgttgagttattggctttttttttttaataacccacatcagtatatagaactttgcaataggcatttttgttttaacttcatttctggtgcagttttattttcctacccttgtctttctattttctctttcatctgctttagacttaaactgtgttttatgtattgctgtaagcctctttaaaccctttctaaaacaaagcagggaatacataaacaaatagttttttgttttttgtttttttttctttgtaacaaaatcgacttaaagcctccagagaagtagaatctgtagaccttccacactgccacctgattaaaggaattggtatgtatatgaaaatgcttg

SEQ ID NO: 315705 - DNA, 476 bp, Homo sapiens
gattggagaaagtactttaatttaaacattaaaaagattggtaactgctattttcaacagcatgtccccttaatcagtgtgtcattgtggaaaacagggcttattgatgattgagtgacatgcatgtacggtggtcttatattcatactttgtatcccctgaataggttctccgcatccagaacattctatctgagaagcctacagtgactacagtttatgccaacaatgggtctgttctccaaggaagttctgtagcctcagtgtatgatgggaagctgctcataggcactttataccacagagccttgtattgtgaactctaaattgtacttttggcatgaaagtgcgataacttaacaattaattttctatgaattgctaattctgagggaatttaaccagcaacattgacccagaaatgtatggcatgtgtagttaattttattccagtaaggaacggcccttttagttctt

SEQ ID NO: 315706 - DNA, 761 bp, Homo sapiens
agcggagcgcggccggcaccatcgagccgggaagatggcaccgcccacggagctgctggccaggccggagcgaggcagcgcgcccggctcccgcgccatggggcggctggtggctgtgggcttgctggggatcgcgctggcgctcctgggcgagaggcttctggcactcagaaatcgacttaaagcctccagagaagtagaatctgtagaccttccacactgccacctgattaaaggaattgtcagagcaaaggctttgagtcccagcttcccagtttgtgaccttgagcaattgcttaacttttccaaagcctccaatagtcttcactctaaaataaaagataatcatatgagatattgtatgcagggtatttacaaggagcctggtacttggtgtacctaatgtatgttagttattattattaaattagaggagcaaaaatttctctagcattgactgctcctgacataatcacaccgaagaggggatacacgatgataaaaccttcctgcagtagtggctatagaaatgatgacggggagaagatctggaaaatattccaaagaaggctacagatagatacattttttccattggaattaggcaatggagttaaacagaagttacaatatggttgaaataaatgtatttttttaaaaaaagatttctctttccttaattattaaaaaatatacaattttgtagaaaattttaaacaaagtataaagaaaaaaataaaaatcattcataatcctatcaa

SEQ ID NO: 315707 - DNA, 610 bp, Homo sapiens
taaagtagaaacagattatgcatgaattctgtatatggagtaggaaacactttcttaaaggtcagggagccaatgatcagaaataacaccagacggacagcaataggaaagacagagaatgatctgttaggtcgtctaacagcttatacattcaacctttccttgcctgtggtatttaaatgtcagtgcctgcccagaggtcccgtagttatgtcttgtaaattaactctgttctttcaattctttagtaaatttgaagaagcagaaaattctctgttgcatctgaaaacagtcaaacatgagcttcttccaaggtacttcctcattttgttccttctctaatttatccccagcatttgcaaacaatccctatggtgggttgtcctgtcatcttttataagcgctaatgtatatattagctaatatgtaagagctaaagagcttatatttccttatttataaatgtgtgtgtatagtttccttataaaccagggcaagcatggcatatgaaagttgatgtcactcatactattcactgttctatgcggactcctttgagaaatgatgaagtgcccgactacagggtgatactcttcaggcccatcttgag

SEQ ID NO: 315708 - DNA, 2508 bp, Homo sapiens
agcggagcgcggccggcaccatcgagccgggaagatggcaccgcccacggagctgctggccaggccggagcgaggcagcgcgcccggctcccgcgccatggggcggctggtggctgtgggcttgctggggatcgcgctggcgctcctgggcgagaggcttctggcactcagaaatcgacttaaagcctccagagaagtagaatctgtagaccttccacactgccacctgattaaaggaattgaagctggctctgaagatattgacatacttcccaatggtctggctttttttagtgtgggtctaaaattcccaggactccacagctttgcaccagataagcctggaggaatactaatgatggatctaaaagaagaaaaaccaagggcacgggaattaagaatcagtcgtgggtttgatttggcctcattcaatccacatggcatcagcactttcatagacaacgatgacacagtttatctctttgttgtaaaccacccagaattcaagaatacagtggaaatttttaaatttgaagaagcagaaaattctctgttgcatctgaaaacagtcaaacatgagcttcttccaagtgtgaatgacatcacagctgttggaccggcacatttctatgccacaaatgaccactacttctctgatcctttcttaaagtatttagaaacatacttgaacttacactgggcaaatgttgtttactacagtccaaatgaagttaaagtggtagcagaaggatttgattcagcaaatgggatcaatatttcacctgatgataagtatatctatgttgctgacatattggctcatgaaattcatgttttggaaaaacacactaatatgaatttaactcagttgaaggtacttgagctggatacactggtggataatttatctattgatccttcctcgggggacatctgggtaggctgtcatcctaatggccagaagctcttcgtgtatgacccgaacaatcctccctcgtcagaggttctccgcatccagaacattctatctgagaagcctacagtgactacagtttatgccaacaatgggtctgttctccaaggaagttctgtagcctcagtgtatgatgggaagctgctcataggcactttataccacagagccttgtattgtgaactctaaattgtacttttggcatgaaagtgcgataacttaacaattaattttctatgaattgctaattctgagggaatttaaccagcaacattgacccagaaatgtatggcatgtgtagttaattttattccagtaaggaacggcccttttagttcttagagcacttttaacaaaaaaggaaaatgaacaggttctttaaaatgccaagcaagggacagaaaagaaagctgctttcgaataaagtgaatacattttgcacaaagtaagcctcacctttgccttccaactgccagaacatggattccactgaaatagagtgaattatatttccttaaaatgtgagtgacctcacttctggcactgtgactactatggctgtttagaactactgataataacgtattttgatgttttgtacttacatctttgtttaccattaaaaagttggagttatattaaagactaactaaaatcccagttttgtctgtgtttaattctgaaggcatatggctaggagaaatgggaaagcagctgcttccttatggagtttggataggcaagcatggccatattaatttctcttgtggaaagctgaaagtgaatggactcttaatttgaaacaacaacaacaaaaatcaatgaaatattgcaactcaaattcccagttcctaaggaggtttccatcagctctcttccttaatgggagtccactttagagacaaagaggaaataagggttgggacaggaaggtcttgccacctcctcattgaacagaactgtgaactaaagccaggagaatgaagtcagtcgtccgtgaccacatggttaagcagcagcaatgctaggatcagggccgcgtgcccagctcacagagggagagtttttctgctcactgtacctcctataaaatcatcataagccctagagagagactttcatgtgtttctttccattgtaatttatcaaaccactttacttcacttctcatactttttccctatcatcatcatgaaaatatttgtcagttaattacaatatgccaaacaatgcaatgaaagtattacattcgttatcttatttaatcctaattgcagcctggagtaagtattgatattatatcactgttaacatttcacagatattcagtctatttctgatgccagagcctgtaccgctaaccactacatgatgctactgccatagaacgaactagtattttattactgtttttcctgatgtatacagtttcttcatgttttgtagatatgtttgagttctgcttttagatgaatcatttaatggattttaaatttaaatttcagtagtattcttaaatttggcctgtatccatt

SEQ ID NO: 315709 - DNA, 1890 bp, Homo sapiens
agcggagcgcggccggcaccatcgagccgggaagatggcaccgcccacggagctgctggccaggccggagcgaggcagcgcgcccggctcccgcgccatggggcggctggtggctgtgggcttgctggggatcgcgctggcgctcctgggcgagaggcttctggcactcagaaatcgacttaaagcctccagagaagtagaatctgtagaccttccacactgccacctgattaaaggaattgaagctggctctgaagatattgacatacttcccaatggtctggctttttttagtgtgggtctaaaattcccaggactccacagctttgcaccagataagcctggaggaatactaatgatggatctaaaagaagaaaaaccaagggcacgggaattaagaatcagtcgtgggtttgatttggcctcattcaatccacatggcatcagcactttcatagacaacgatgacacagtttatctctttgttgtaaaccacccagaattcaagaatacagtggaaatttttaaatttgaagaagcagaaaattctctgttgcatctgaaaacagtcaaacatgagcttcttccaagtgtgaatgacatcacagctgttggaccggcacatttctatgccacaaatgaccactacttctctgatcctttcttaaagtatttagaaacatacttgaacttacactgggcaaatgttgtttactacagtccaaatgaagttaaagtggtagcagaaggatttgattcagcaaatgggatcaatatttcacctgatgataagtatatctatgttgctgacatattggctcatgaaattcatgttttggaaaaacacactaatatgaatttaactcagttgaaggtacttgagctggatacactggtggataatttatctattgatccttcctcgggggacatctgggtaggctgtcatcctaatggccagaagctcttcgtgtatgacccgaacaatcctccctcgtcagaggttctccgcatccagaacattctatctgagaagcctacagtgactacagtttatgccaacaatgggtctgttctccaaggaagttctgtagcctcagtgtatgatgggaagctgctcataggcactttataccacagagccttgtattgtgaactctaaattgtacttttggcatgaaagtgcgataacttaacaattaattttctatgaattgctaattctgagggaatttaaccagcaacattgacccagaaatgtatggcatgtgtagttaattttattccagtaaggaacggcccttttagttcttagagcacttttaacaaaaaaggaaaatgaacaggttctttaaaatgccaagcaagggacagaaaagaaagctgctttcgaataaagtgaatacattttgcacaaagtaagcctcacctttgccttccaactgccagaacatggattccactgaaatagagtgaattatatttccttaaaatgtgagtgacctcacttctggcactgtgactactatggctgtttagaactactgataataacgtattttgatgttttgtacttacatctttgtttaccattaaaaagttggagttatattaaagactaactaaaatcccaaaaaaaaaaaaaaaaaaaaaaaaaaaaaaaaaaaaaaaaaaaaaaaaaaacaaaaaacaacaaagaaaaacaacaaagacaaaagaagaaaaaaaaaaaagaaaaagacacaataaaaaaaaagacacacaccacagaacaacgaacaagacaagacaagctagcacgaccgcacagcagcacccacgcgagcaccaagccgccggacccaggccaccaccgcacatccagacaccgccccgccaccgccgaccggg

SEQ ID NO: 315710 - DNA, 1677 bp, Homo sapiens
agcggagcgcggccggcaccatcgagccgggaagatggcaccgcccacggagctgctggccaggccggagcgaggcagcgcgcccggctcccgcgccatggggcggctggtggctgtgggcttgctggggatcgcgctggcgctcctgggcgagaggcttctggcactcagaaatcgacttaaagcctccagagaagtagaatctgtagaccttccacactgccacctgattaaaggaattgaagctggctctgaagatattgacatacttcccaatggtctggctttttttagtgtgggtgagtgtcttcttccttccccaaattcagcagaggagatacaagggtatttgatgagggctgcagaacactttgcaccagataagcctggaggaatactaatgatggatctaaaagaagaaaaaccaagggcacgggaattaagaatcagtcgtgggtttgatttggcctcattcaatccacatggcatcagcactttcatagacaacgatgacacagtttatctctttgttgtaaaccacccagaattcaagaatacagtggaaatttttaaatttgaagaagcagaaaattctctgttgcatctgaaaacagtcaaacatgagcttcttccaagtgtgaatgacatcacagctgttggaccggcacatttctatgccacaaatgaccactacttctctgatcctttcttaaagtatttagaaacatacttgaacttacactgggcaaatgttgtttactacagtccaaatgaagttaaagtggtagcagaaggatttgattcagcaaatgggatcaatatttcacctgatgataagtatatctatgttgctgacatattggctcatgaaattcatgttttggaaaaacacactaatatgaatttaactcagttgaaggtacttgagctggatacactggtggataatttatctattgatccttcctcgggggacatctgggtaggctgtcatcctaatggccagaagctcttcgtgtatgacccgaacaatcctccctcgtcagaggttctccgcatccagaacattctatctgagaagcctacagtgactacagtttatgccaacaatgggtctgttctccaaggaagttctgtagcctcagtgtatgatgggaagctgctcataggcactttataccacagagccttgtattgtgaactctaaattgtacttttggcatgaaagtgcgataacttaacaattaattttctatgaattgctaattctgagggaatttaaccagcaacattgacccagaaatgtatggcatgtgtagttaattttattccagtaaggaacggcccttttagttcttagagcacttttaacaaaaaaggaaaatgaacaggttctttaaaatgccaagcaagggacagaaaagaaagctgctttcgaataaagtgaatacattttgcacaaagtaagcctcacctttgccttccaactgccagaacatggattccactgaaatagagtgaattatatttccttaaaatgtgagtgacctcacttctggcactgtgactactatggctgtttagaactactgataataacgtattttgatgttttgtacttacatctttgtttaccattaaaaagttggagttatattaaagactaactaaaatccc

SEQ ID NO: 315711 - DNA, 1810 bp, Homo sapiens
gaataaaaaaagtaaagatttaataaatttgttttgaaataaaataagttgaaatacgaaaaagacagaaaaggttttgaaagaggttttaaagaaaagtgcaggatattcattggtaaagatgttggtgagaggcttggaagcaaaacttcaggggaaaaagacaacatatggaattgaccacaattgaatttacaagtgaagtggctttacagaggaatcaggggatgtttctgagagaggaaattcattaaattctaacttgaatattttctgtttgcctttaagtcagagcaaaggctttgagtcccagcttcccagtttgtgaccttgagcaattgcttaacttttccaaagcctccaatagtcttcactaagctggctctgaagatattgacatacttcccaatggtctggctttttttagtgtgggtgagtgtcttcttccttccccaaattcagcagaggagatacaagggtatttgatgagggctgcagaacactttgcaccagataagcctggaggaatactaatgatggatctaaaagaagaaaaaccaagggcacgggaattaagaatcagtcgtgggtttgatttggcctcattcaatccacatggcatcagcactttcatagacaacgatgacacagtttatctctttgttgtaaaccacccagaattcaagaatacagtggaaatttttaaatttgaagaagcagaaaattctctgttgcatctgaaaacagtcaaacatgagcttcttccaagtgtgaatgacatcacagctgttggaccggcacatttctatgccacaaatgaccactacttctctgatcctttcttaaagtatttagaaacatacttgaacttacactgggcaaatgttgtttactacagtccaaatgaagttaaagtggtagcagaaggatttgattcagcaaatgggatcaatatttcacctgatgataagtatatctatgttgctgacatattggctcatgaaattcatgttttggaaaaacacactaatatgaatttaactcagttgaaggtacttgagctggatacactggtggataatttatctattgatccttcctcgggggacatctgggtaggctgtcatcctaatggccagaagctcttcgtgtatgacccgaacaatcctccctcgtcagaggttctccgcatccagaacattctatctgagaagcctacagtgactacagtttatgccaacaatgggtctgttctccaaggaagttctgtagcctcagtgtatgatgggaagctgctcataggcactttataccacagagccttgtattgtgaactctaaattgtacttttggcatgaaagtgcgataacttaacaattaattttctatgaattgctaattctgagggaatttaaccagcaacattgacccagaaatgtatggcatgtgtagttaattttattccagtaaggaacggcccttttagttcttagagcacttttaacaaaaaaggaaaatgaacaggttctttaaaatgccaagcaagggacagaaaagaaagctgctttcgaataaagtgaatacattttgcacaaagtaagcctcacctttgccttccaactgccagaacatggattccactgaaatagagtgaattatatttccttaaaatgtgagtgacctcacttctggcactgtgactactatggctgtttagaactactgataataacgtattttgatgttttgtacttacatctttgtttaccattaaaaagttggagttatattaaagactaactaaaatccc

SEQ ID NO: 315712 - DNA, 684 bp, Homo sapiens
cggcgtcgtggggttaccccgcccgcgccagcgctgcatccctggccgctacccggggagagccggaggatgaattgaacctcgcagccgctgctatctccagtgctcatcacagggtgtggtgtctatctgaagaatattttactttcaaaggaaagatgctgtctccaaatgataaaatgttaggaaaactggatccattttatcaaccttcagtgtccaagcagaagaccagtgcagaaatcataagtgaagcaagaaatgcattaagaacagttagaacccaaagaccatttacaccacaggaggctcaaagaaaactattcggacctgcatcctcaagaacatcagaaaatagacctccttcctccttcagaaaccgaaagttccagcatctcccaccagagaggaggattcctgcttttcctttcctaagcccccagtggaccctgcgaagattagaagagtaagcaacgccagggctcgcttattcagggctgcctcccagcgggcccttctgccggacagatcccttcctccctccgactgtaaggccatgtaacatccctgtaatctctggggacaggcatgcttcttgaatttgcacacaaaagctaattttatatgatttttcctaaccctggatgatttttatattaactaagattagttaatattgggcaa

SEQ ID NO: 315713 - DNA, 3058 bp, Homo sapiens
cggcgtcgtggggttaccccgcccgcgccagcgctgcatccctggccgctacccggggagagccggaggatgaattgaacctcgcagccgctgctatctccagtgctcatcacagggtgtggtgtctatctgaagaatattttactttcaaaggaaagatgctgtctccaaatgataaaatgttaggaaaactggatccattttatcaaccttcagtgtccaagcagaagaccagtgcagaaatcataagtgaagcaagaaatgcattaagaacagttagaacccaaagaccatttacaccacaggaggctcaaagaaaactattcggacctgcatcctcaagaacatcagaaaatagacctccttcctccttcagcctccatgcatccagttttgagtcatctgattccaggcctatctctggcacacgtcttagtccactagagctgaaaccgaaagttccagcatctcccaccagagaggaggattcctgcttttcctttcctaagcccccagtggaccctgcgaagattagaagagtaagcaacgccagggctcgcttattcagggctgcctcccagcgggcccttctgccggacagatcccttcctccctccgactcaaagaagacagtggaatccaaagaaacagttatgatgggggactctatggtgaaaataaatgggatttatttaacaaaatcaaatgctatttgccacttaaagagtcacccacttcagctaactgatgatggaggcttcagtgaaataaaggagcaagaaatgttcaaaggaacaacatctttaccatctcatctcaagaatggaggggaccaggggaagagacatgcgagggcctcatcatgccccagtagctcagacctgagcaggctgcaaaccaaagcagtcccaaaagctgacctgcaagaagaggacgcagaaatagaagtagacgaagtcttttggaatacaaggattgtaccgattttgcgtgaattagaaaaggaagaaaacattgaaacggtttgtgctgcttgcacacaacttcatcatgctttagaggaaggaaacatgcttggaaataaatttaagggaagaagtattctcctgaagaccctgtgtaaactagttgatgttggttcagactcgctcagccttaaacttgcaaaaataattctagcacttaaagtgagtagaaagaatcttcttaatgtctgcaaacttatatttaaaattagcaggaatgagaagaatgattctttgattcaaaatgacagcattctggaatcattattggaggtactaagaagtgaagacctgcaaactaacatggaagcttttttatactgtatggggtctataaagttcatttctggaaatctgggatttcttaatgaaatgatcagcaaaggtgctgtggaaatactgataaatttgataaaacaaataaatgagaacatcaagaaatgtggtacatttttgcctaattcgggccacttgctagtccaggtgactgctacattgagaaacttggttgattcatcattagtaagaagtaagttcctaaacatcagtgcccttccccagctctgcacggcaatggaacagtacaagggtgacaaggacgtctgtaccaatattgccagaatattcagcaaacttacttcttaccgtgactgctgcacagccttggccagctattccagatgttatgccttatttctgaatctaattaacaaataccagaagaagcaggatttagtcgtccgtgttgtttttattcttggcaacctgacggcaaaaaataaccaggctcgtgaacaattttccaaagagaaagggagcatccaaactctgctgtcattattccagacgttccatcagctggatctgcattcccagaagccggtgggccaacgaggcgagcagcacagggcgcagaggccgccgtcagaggcagaggacgtgctcatcaagctgactcgtgtgctggccaacattgccatccacccgggcgtgggcccggtgctggccgccaacccggggatagtgggcctgctcctgaccacgctggaatacaagtcacttgatgattgtgaggagctggtgatcaatgctacagcgacaatcaacaatttatcttactaccaagtgaagaattccataattcaagacaaaaagctatatattgctgaattgctcttaaagcttcttgtcagtaacaacatggatggaatcctggaggctgtgcgtgttttcggaaatctctcccaggaccatgatgtctgcgatttcattgtgcagaacaatgtccacaggttcatgatggcgctgctggatgctcagcatcaggatatctgcttttctgcctgtggtgttctcctcaatctcactgtggataaagacaagcgtgtcatcttgaaagaaggaggtggcattaaaaagttagtggactgtttaagagatttgggtcctactgattggcagctggcctgcttggtttgtaaaactttatggaacttcagtgaaaacatcactaatgcttcgtcatgttttggaaatgaagacaccaacacactcttactcttgctctcatcatttttagatgaagaactagcactggatggcagttttgatccagacctaaaaaactatcacaaactccattgggaaacagaattcaaacctgtggcacagcagcttctaaaccgaattcagagacatcacaccttcctggaacccctgcccattccctctttctaacatgatgcagattaacagtagaaacgagaactcacgtctccctcattcttaagaactggtaacaaacgtgaacatttttttcagcattaacaaatgtggaaagtttttcaagaactggttttagtgagtagctgaagtattttttaaaattaagcatttcttcttgttaggtattatggaaaaatgaatatacacattatatttcctgttgagagaaatgtaagatgaaaatatgtgcattttcaagtaaatgactttttcttctattctctattaaacaatttagttctagtctt

SEQ ID NO: 315714 - DNA, 2985 bp, Homo sapiens
cggcgtcgtggggttaccccgcccgcgccagcgctgcatccctggccgctacccggggagagccggaggatgaattgaacctcgcagccgctgctatctccagtgctcatcacagggtgtggtgtctatctgaagaatattttactttcaaaggaaagatgctgtctccaaatgataaaatgttaggaaaactggatccattttatcaaccttcagtgtccaagcagaagaccagtgcagaaatcataagtgaagcaagaaatgcattaagaacagttagaacccaaagaccatttacaccacaggaggctcaaagaaaactattcggacctgcatcctcaagaacatcagaaaatagacctccttcctccttcagaaaccgaaagttccagcatctcccaccagagaggaggattcctgcttttcctttcctaagcccccagtggaccctgcgaagattagaagagtaagcaacgccagggctcgcttattcagggctgcctcccagcgggcccttctgccggacagatcccttcctccctccgactcaaagaagacagtggaatccaaagaaacagttatgatgggggactctatggtgaaaataaatgggatttatttaacaaaatcaaatgctatttgccacttaaagagtcacccacttcagctaactgatgatggaggcttcagtgaaataaaggagcaagaaatgttcaaaggaacaacatctttaccatctcatctcaagaatggaggggaccaggggaagagacatgcgagggcctcatcatgccccagtagctcagacctgagcaggctgcaaaccaaagcagtcccaaaagctgacctgcaagaagaggacgcagaaatagaagtagacgaagtcttttggaatacaaggattgtaccgattttgcgtgaattagaaaaggaagaaaacattgaaacggtttgtgctgcttgcacacaacttcatcatgctttagaggaaggaaacatgcttggaaataaatttaagggaagaagtattctcctgaagaccctgtgtaaactagttgatgttggttcagactcgctcagccttaaacttgcaaaaataattctagcacttaaagtgagtagaaagaatcttcttaatgtctgcaaacttatatttaaaattagcaggaatgagaagaatgattctttgattcaaaatgacagcattctggaatcattattggaggtactaagaagtgaagacctgcaaactaacatggaagcttttttatactgtatggggtctataaagttcatttctggaaatctgggatttcttaatgaaatgatcagcaaaggtgctgtggaaatactgataaatttgataaaacaaataaatgagaacatcaagaaatgtggtacatttttgcctaattcgggccacttgctagtccaggtgactgctacattgagaaacttggttgattcatcattagtaagaagtaagttcctaaacatcagtgcccttccccagctctgcacggcaatggaacagtacaagggtgacaaggacgtctgtaccaatattgccagaatattcagcaaacttacttcttaccgtgactgctgcacagccttggccagctattccagatgttatgccttatttctgaatctaattaacaaataccagaagaagcaggatttagtcgtccgtgttgtttttattcttggcaacctgacggcaaaaaataaccaggctcgtgaacaattttccaaagagaaagggagcatccaaactctgctgtcattattccagacgttccatcagctggatctgcattcccagaagccggtgggccaacgaggcgagcagcacagggcgcagaggccgccgtcagaggcagaggacgtgctcatcaagctgactcgtgtgctggccaacattgccatccacccgggcgtgggcccggtgctggccgccaacccggggatagtgggcctgctcctgaccacgctggaatacaagtcacttgatgattgtgaggagctggtgatcaatgctacagcgacaatcaacaatttatcttactaccaagtgaagaattccataattcaagacaaaaagctatatattgctgaattgctcttaaagcttcttgtcagtaacaacatggatggaatcctggaggctgtgcgtgttttcggaaatctctcccaggaccatgatgtctgcgatttcattgtgcagaacaatgtccacaggttcatgatggcgctgctggatgctcagcatcaggatatctgcttttctgcctgtggtgttctcctcaatctcactgtggataaagacaagcgtgtcatcttgaaagaaggaggtggcattaaaaagttagtggactgtttaagagatttgggtcctactgattggcagctggcctgcttggtttgtaaaactttatggaacttcagtgaaaacatcactaatgcttcgtcatgttttggaaatgaagacaccaacacactcttactcttgctctcatcatttttagatgaagaactagcactggatggcagttttgatccagacctaaaaaactatcacaaactccattgggaaacagaattcaaacctgtggcacagcagcttctaaaccgaattcagagacatcacaccttcctggaacccctgcccattccctctttctaacatgatgcagattaacagtagaaacgagaactcacgtctccctcattcttaagaactggtaacaaacgtgaacatttttttcagcattaacaaatgtggaaagtttttcaagaactggttttagtgagtagctgaagtattttttaaaattaagcatttcttcttgttaggtattatggaaaaatgaatatacacattatatttcctgttgagagaaatgtaagatgaaaatatgtgcattttcaagtaaatgactttttcttctattctctattaaacaatttagttctagtctt

SEQ ID NO: 315715 - DNA, 3559 bp, Homo sapiens
cggcgtcgtggggttaccccgcccgcgccagcgctgcatccctggccgctacccggggagagccggaggatgaattgaacctcgcagccgctgctatctccagtgctcatcacagggtgtggtgtctatctgaagaatattttactttcaaaggaaagatgctgtctccaaatgataaaatgttaggaaaactggatccattttatcaaccttcagtgtccaagcagaagaccagtgcagaaatcataagtgaagcaagaaatgcattaagaacagttagaacccaaagaccatttacaccacaggaggctcaaagaaaactattcggacctgcatcctcaagaacatcagaaaatagacctccttcctccttcagcctccatgcatccagttttgagtcatctgattccaggcctatctctggcacacgtcttagtccactagagctgaaaccgaaagttccagcatctcccaccagagaggaggattcctgcttttcctttcctaagcccccagtggaccctgcgaagattagaagagtaagcaacgccagggctcgcttattcagggctgcctcccagcgggcccttctgccggacagatcccttcctccctccgactcaaagaagacagtggaatccaaagaaacagttatgatgggggactctatggtgaaaataaatgggatttatttaacaaaatcaaatgctatttgccacttaaagagtcacccacttcagctaactgatgatggaggcttcagtgaaataaaggagcaagaaatgttcaaaggaacaacatctttaccatctcatctcaagaatggaggggaccaggggaagagacatgcgagggcctcatcatgccccagtagctcagacctgagcaggctgcaaaccaaagcagtcccaaaagctgacctgcaagaagaggacgcagaaatagaagtagacgaagtcttttggaatacaaggattgtaccgattttgcgtgaattagaaaaggaagaaaacattgaaacggtttgtgctgcttgcacacaacttcatcatgctttagaggaaggaaacatgcttggaaataaatttaagggaagaagtattctcctgaagaccctgtgtaaactagttgatgttggttcagactcgctcagccttaaacttgcaaaaataattctagcacttaaagtgagtagaaagaatcttcttaatgtctgcaaacttatatttaaaattagcaggaatgagaagaatgattctttgattcaaaatgacagcattctggaatcattattggaggtactaagaagtgaagacctgcaaactaacatggaagcttttttatactgtatggggtctataaagttcatttctggaaatctgggatttcttaatgaaatgatcagcaaaggtgctgtggaaatactgataaatttgataaaacaaataaatgagaacatcaagaaatgtggtacatttttgcctaattcgggccacttgctagtccaggtgactgctacattgagaaacttggttgattcatcattagtaagaagtaagttcctaaacatcagtgcccttccccagctctgcacggcaatggaacagtacaagggtgacaaggacgtctgtaccaatattgccagaatattcagcaaacttacttcttaccgtgactgctgcacagccttggccagctattccagatgttatgccttatttctgaatctaattaacaaataccagaagaagcaggatttagtcgtccgtgttgtttttattcttggcaacctgacggcaaaaaataaccaggctcgtgaacaattttccaaagagaaagggagcatccaaactctgctgtcattattccagacgttccatcagctggatctgcattcccagaagccggtgggccaacgaggcgagcagcacagggcgcagaggccgccgtcagaggcagaggacgtgctcatcaagctgactcgtgtgctggccaacattgccatccacccgggcgtgggcccggtgctggccgccaacccggggatagtgggcctgctcctgaccacgctggaatacaagtcacttgatgattgtgaggagctggtgatcaatgctacagcgacaatcaacaatttatcttactaccaagtgaagaattccataattcaagacaaaaagctatatattgctgaattgctcttaaagcttcttgtcagtaacaacatggatggaatcctggaggctgtgcgtgttttcggaaatctctcccaggaccatgatgtctgcgatttcattgtgcagaacaatgtccacaggttcatgatggcgctgctggatgctcagcatcaggatatctgcttttctgcctgtggtgttctcctcaatctcactgtggataaagacaagcgtgtcatcttgaaagaaggaggtggcattaaaaaatgaagaactagcactggatggcagttttgatccagacctaaaaaactatcacaaactccattgggaaacagaattcaaacctgtggcacagcagcttctaaaccgaattcagagacatcacaccttcctggaacccctgcccattccctctttctaacatgatgcagattaacagtagaaacgagaactcacgtctccctcattcttaagaactggtaacaaacgtgaacatttttttcagcattaacaaatgtggaaagtttttcaagaactggttttagtgagtagctgaagtattttttaaaattaagcatttcttcttgttaggtattatggaaaaatgaatatacacattatatttcctgttgagagaaatgtaagatgaaaatatgtgcattttcaagtaaatgactttttcttctattctctattaaacaatttagttctagtcttaaaatcttgatttaacaattttggaattgaagtgttcataagttaaatgaactgtgcaatgaaggctgttagattatatagaaagaagggtaggcaacatgagtggaacacgttacaacataggatctgtactaattcttactatgtcaaataataaatgctctcattaggtaccagtatttttttggtctttatattaagagaaggagtaagcagaaaaacttaaagaaaactgctttgggccatctgttctttattaaataagtaaaatagataaaatgagagtatattttcatttgaaataaaatgactggactaagacagtccttctaattgtaactctctgtgtttgacaggtgaggtaatgtattagaaagaatgcaggcttaggtgaatggtatacctgaatctgaatccatgctctcccctgctagctttgtgggcctggagcaagtaacttaatttcttgagctgcaactgcaaaatgggaatcatatcaattttactgtagtgtagtttggaacaaaccattaaatgggcaaatggcccagtccagtgtatcatgtggagtgggtgttcaagaacattatgatggcaagcactttcttagcttgccatcctttgtaggatgagtttggcctttgaataaatgattaaagagc

SEQ ID NO: 315716 - DNA, 1030 bp, Homo sapiens
cggcgtcgtggggttaccccgcccgcgccagcgctgcatccctggccgctacccggggagagccggaggatgaattgaacctcgcagccgctgctatctccagtgctcatcacagggtgtggtgtctatctgaagaatattttactttcaaaggaaagatgctgtctccaaatgataaaatgttaggaaaactggatccattttatcaaccttcagtgtccaagcagaagaccagtgcagaaatcataagtgaagcaagaaatgcattaagaacagttagaacccaaagaccatttacaccacaggaggctcaaagaaaactattcggacctgcatcctcaagaacatcagaaaatagacctccttcctccttcagcctccatgcatccagttttgagtcatctgattccaggcctatctctggcacacgtcttagtccactagagctgaaaccgaaagttccagcatctcccaccagagaggaggattcctgcttttcctttcctaagcccccagtggaccctgcgaagattagaagagtaagcaacgccagggctcgcttattcagggctgcctcccagcgggcccttctgccggacagatcccttcctccctccgactcaaagaagacagtggaatccaaagaaacagttatgatgggggactctatggtgaaaataaatgggatttatttaacaaaatcaaatgctatttgccacttaaagagtcacccacttcagctaactgatgatggaggcttcagtgaaataaaggagcaagaaatgttcaaaggaacaacatctttaccatctcatctcaagaatggaggggaccaggggaagagacatgcgagggcctcatcatgccccagtagctcagacctgagcaggctgcaaaccaaagcagtcccaaaagctgacctgcaagaagaggacgcagaaatagaagtagacgaagtcttttggaatacaaggattgtaccgattttgcgtgaattagaaaagggtaaaacacaaacaaacaaacaaaa

SEQ ID NO: 315717 - DNA, 1708 bp, Homo sapiens
caagttgtgtgcaggtgctgagtggcctccctcgcaggctgggactgggcctctggagcagaatacaagtcacttgatgattgtgaggagctggtgatcaatgctacagcgacaatcaacaatttatcttactaccaagtgaagaattccataattcaagacaaaaagctatatattgctgaattgctcttaaagcttcttgtcagtaacaacatggatggaatcctggaggctgtgcgtgttttcggaaatctctcccaggaccatgatgtctgcgatttcattgtgcagaacaatgtccacaggttcatgatggcgctgctggatgctcagcatcaggatatctgcttttctgcctgtggtgttctcctcaatctcactgtggataaagacaagcgtgtcatcttgaaagaaggaggtggcattaaaaagttagtggactgtttaagagatttgggtcctactgattggcagctggcctgcttggtttgtaaaactttatggaacttcagtgaaaacatcactaatgcttcgtcatgttttggaaatgaagacaccaacacactcttactcttgctctcatcatttttagatgaagaactagcactggatggcagttttgatccagacctaaaaaactatcacaaactccattgggaaacagaattcaaacctgtggcacagcagcttctaaaccgaattcagagacatcacaccttcctggaacccctgcccattccctctttctaacatgatgcagattaacagtagaaacgagaactcacgtctccctcattcttaagaactggtaacaaacgtgaacatttttttcagcattaacaaatgtggaaagtttttcaagaactggttttagtgagtagctgaagtattttttaaaattaagcatttcttcttgttaggtattatggaaaaatgaatatacacattatatttcctgttgagagaaatgtaagatgaaaatatgtgcattttcaagtaaatgactttttcttctattctctattaaacaatttagttctagtcttaaaatcttgatttaacaattttggaattgaagtgttcataagttaaatgaactgtgcaatgaaggctgttagattatatagaaagaagggtaggcaacatgagtggaacacgttacaacataggatctgtactaattcttactatgtcaaataataaatgctctcattaggtaccagtatttttttggtctttatattaagagaaggagtaagcagaaaaacttaaagaaaactgctttgggccatctgttctttattaaataagtaaaatagataaaatgagagtatattttcatttgaaataaaatgactggactaagacagtccttctaattgtaactctctgtgtttgacaggtgaggtaatgtattagaaagaatgcaggcttaggtgaatggtatacctgaatctgaatccatgctctcccctgctagctttgtgggcctggagcaagtaacttaatttcttgagctgcaactgcaaaatgggaatcatatcaattttactgtagtgtagtttggaacaaaccattaaatgggcaaatggcccagtccagtgtatcatgtggagtgggtgttcaagaacattatgatggcaagcactttcttagcttgccatcctttgtaggatgagtttggcctttgaataaatgattaaagagc

SEQ ID NO: 315718 - DNA, 757 bp, Homo sapiens
cggcgtcgtggggttaccccgcccgcgccagcgctgcatccctggccgctacccggggagagccggaggatgaattgaacctcgcagccgctgctatctccagtgctcatcacagggtgtggtgtctatctgaagaatattttactttcaaaggaaagatgctgtctccaaatgataaaatgttaggaaaactggatccattttatcaaccttcagtgtccaagcagaagaccagtgcagaaatcataagtgaagcaagaaatgcattaagaacagttagaacccaaagaccatttacaccacaggaggctcaaagaaaactattcggacctgcatcctcaagaacatcagaaaatagacctccttcctccttcagcctccatgcatccagttttgagtcatctgattccaggcctatctctggcacacgtcttagtccactagagctgaaaccgaaagttccagcatctcccaccagagaggaggattcctgcttttcctttcctaagcccccagtggaccctgcgaagattagaagagtaagcaacgccagggctcgcttattcagggctgcctcccagcgggcccttctgccggacagatcccttcctccctccgactgtaaggccatgtaacatccctgtaatctctggggacaggcatgcttcttgaatttgcacacaaaagctaattttatatgatttttcctaaccctggatgatttttatattaactaagattagttaatattgggcaa

SEQ ID NO: 315719 - DNA, 801 bp, Homo sapiens
cggcgtcgtggggttaccccgcccgcgccagcgctgcatccctggccgctacccggggagagccggaggatgaattgaacctcgcagccgctgctatctccagtgctcatcacagggtgtggtgtctatctgaagaatattttactttcaaaggaaagatgctgtctccaaatgataaaatgttaggaaaactggatccattttatcaaccttcagtgtccaagcagaagaccagtgcagaaatcataagtgaagcaagaaatgcattaagaacagttagaacccaaagaccatttacaccacaggaggctcaaagaaaactattcggacctgcatcctcaagaacatcagaaaatagacctccttcctccttcagcctccatgcatccagttttgagtcatctgattccaggcctatctctggcacacgtcttagtccactagagctgaaaccgaaagttccagcatctcccaccagagaggaggattcctgcttttcctttcctaagcccccagtggaccctgcgaagattagaagacaaagaagacagtggaatccaaagaaacagttatgatgggggactctatggtgaaaataaatgggatttatttaacaaaatcaaatgctatttgccacttaaagagtcacccacttcagctaactgatgatggaggcttcagtgaaataaaggagcaagaaatgttcaaaggaacaacatctttaccatctcatctcaagaatggagggtcagtattctttttatttaattttctggtcaggataatggtatcatttaccag

SEQ ID NO: 315720 - DNA, 3072 bp, Homo sapiens
agacgctggctgcggggcgaagtgggagggtggccgggcggggtgaggatgctgctgcgccctgccctggccgggaccgtggaggagcgggcactgccgtgggtgggggagccgctgtccgagcgggagggtgtggtgtctatctgaagaatattttactttcaaaggaaagatgctgtctccaaatgataaaatgttaggaaaactggatccattttatcaaccttcagtgtccaagcagaagaccagtgcagaaatcataagtgaagcaagaaatgcattaagaacagttagaacccaaagaccatttacaccacaggaggctcaaagaaaactattcggacctgcatcctcaagaacatcagaaaatagacctccttcctccttcagcctccatgcatccagttttgagtcatctgattccaggcctatctctggcacacgtcttagtccactagagctgaaaccgaaagttccagcatctcccaccagagaggaggattcctgcttttcctttcctaagcccccagtggaccctgcgaagattagaagagtaagcaacgccagggctcgcttattcagggctgcctcccagcgggcccttctgccggacagatcccttcctccctccgactcaaagaagacagtggaatccaaagaaacagttatgatgggggactctatggtgaaaataaatgggatttatttaacaaaatcaaatgctatttgccacttaaagagtcacccacttcagctaactgatgatggaggcttcagtgaaataaaggagcaagaaatgttcaaaggaacaacatctttaccatctcatctcaagaatggaggggaccaggggaagagacatgcgagggcctcatcatgccccagtagctcagacctgagcaggctgcaaaccaaagcagtcccaaaagctgacctgcaagaagaggacgcagaaatagaagtagacgaagtcttttggaatacaaggattgtaccgattttgcgtgaattagaaaaggaagaaaacattgaaacggtttgtgctgcttgcacacaacttcatcatgctttagaggaaggaaacatgcttggaaataaatttaagggaagaagtattctcctgaagaccctgtgtaaactagttgatgttggttcagactcgctcagccttaaacttgcaaaaataattctagcacttaaagtgagtagaaagaatcttcttaatgtctgcaaacttatatttaaaattagcaggaatgagaagaatgattctttgattcaaaatgacagcattctggaatcattattggaggtactaagaagtgaagacctgcaaactaacatggaagcttttttatactgtatggggtctataaagttcatttctggaaatctgggatttcttaatgaaatgatcagcaaaggtgctgtggaaatactgataaatttgataaaacaaataaatgagaacatcaagaaatgtggtacatttttgcctaattcgggccacttgctagtccaggtgactgctacattgagaaacttggttgattcatcattagtaagaagtaagttcctaaacatcagtgcccttccccagctctgcacggcaatggaacagtacaagggtgacaaggacgtctgtaccaatattgccagaatattcagcaaacttacttcttaccgtgactgctgcacagccttggccagctattccagatgttatgccttatttctgaatctaattaacaaataccagaagaagcaggatttagtcgtccgtgttgtttttattcttggcaacctgacggcaaaaaataaccaggctcgtgaacaattttccaaagagaaagggagcatccaaactctgctgtcattattccagacgttccatcagctggatctgcattcccagaagccggtgggccaacgaggcgagcagcacagggcgcagaggccgccgtcagaggcagaggacgtgctcatcaagctgactcgtgtgctggccaacattgccatccacccgggcgtgggcccggtgctggccgccaacccggggatagtgggcctgctcctgaccacgctggaatacaagtcacttgatgattgtgaggagctggtgatcaatgctacagcgacaatcaacaatttatcttactaccaagtgaagaattccataattcaagacaaaaagctatatattgctgaattgctcttaaagcttcttgtcagtaacaacatggatggaatcctggaggctgtgcgtgttttcggaaatctctcccaggaccatgatgtctgcgatttcattgtgcagaacaatgtccacaggttcatgatggcgctgctggatgctcagcatcaggatatctgcttttctgcctgtggtgttctcctcaatctcactgtggataaagacaagcgtgtcatcttgaaagaaggaggtggcattaaaaagttagtggactgtttaagagatttgggtcctactgattggcagctggcctgcttggtttgtaaaactttatggaacttcagtgaaaacatcactaatgcttcgtcatgttttggaaatgaagacaccaacacactcttactcttgctctcatcatttttagatgaagaactagcactggatggcagttttgatccagacctaaaaaactatcacaaactccattgggaaacagaattcaaacctgtggcacagcagcttctaaaccgaattcagagacatcacaccttcctggaacccctgcccattccctctttctaacatgatgcagattaacagtagaaacgagaactcacgtctccctcattcttaagaactggtaacaaacgtgaacatttttttcagcattaacaaatgtggaaagtttttcaagaactggttttagtgagtagctgaagtattttttaaaattaagcatttcttcttgttaggtattatggaaaaatgaatatacacattatatttcctgttgagagaaatgtaagatgaaaatatgtgcattttcaagtaaatgactttttcttctattctctattaaacaatttagttctagtctt

SEQ ID NO: 315721 - DNA, 3026 bp, Homo sapiens
gatcaacgtggcttcagtgaaataaaggagcaagaaatgttcaaaggaacaacatctttaccatctcatctcaagaatggaggggtgtggtgtctatctgaagaatattttactttcaaaggaaagatgctgtctccaaatgataaaatgttaggaaaactggatccattttatcaaccttcagtgtccaagcagaagaccagtgcagaaatcataagtgaagcaagaaatgcattaagaacagttagaacccaaagaccatttacaccacaggaggctcaaagaaaactattcggacctgcatcctcaagaacatcagaaaatagacctccttcctccttcagcctccatgcatccagttttgagtcatctgattccaggcctatctctggcacacgtcttagtccactagagctgaaaccgaaagttccagcatctcccaccagagaggaggattcctgcttttcctttcctaagcccccagtggaccctgcgaagattagaagagtaagcaacgccagggctcgcttattcagggctgcctcccagcgggcccttctgccggacagatcccttcctccctccgactcaaagaagacagtggaatccaaagaaacagttatgatgggggactctatggtgaaaataaatgggatttatttaacaaaatcaaatgctatttgccacttaaagagtcacccacttcagctaactgatgatggaggcttcagtgaaataaaggagcaagaaatgttcaaaggaacaacatctttaccatctcatctcaagaatggaggggaccaggggaagagacatgcgagggcctcatcatgccccagtagctcagacctgagcaggctgcaaaccaaagcagtcccaaaagctgacctgcaagaagaggacgcagaaatagaagtagacgaagtcttttggaatacaaggattgtaccgattttgcgtgaattagaaaaggaagaaaacattgaaacggtttgtgctgcttgcacacaacttcatcatgctttagaggaaggaaacatgcttggaaataaatttaagggaagaagtattctcctgaagaccctgtgtaaactagttgatgttggttcagactcgctcagccttaaacttgcaaaaataattctagcacttaaagtgagtagaaagaatcttcttaatgtctgcaaacttatatttaaaattagcaggaatgagaagaatgattctttgattcaaaatgacagcattctggaatcattattggaggtactaagaagtgaagacctgcaaactaacatggaagcttttttatactgtatggggtctataaagttcatttctggaaatctgggatttcttaatgaaatgatcagcaaaggtgctgtggaaatactgataaatttgataaaacaaataaatgagaacatcaagaaatgtggtacatttttgcctaattcgggccacttgctagtccaggtgactgctacattgagaaacttggttgattcatcattagtaagaagtaagttcctaaacatcagtgcccttccccagctctgcacggcaatggaacagtacaagggtgacaaggacgtctgtaccaatattgccagaatattcagcaaacttacttcttaccgtgactgctgcacagccttggccagctattccagatgttatgccttatttctgaatctaattaacaaataccagaagaagcaggatttagtcgtccgtgttgtttttattcttggcaacctgacggcaaaaaataaccaggctcgtgaacaattttccaaagagaaagggagcatccaaactctgctgtcattattccagacgttccatcagctggatctgcattcccagaagccggtgggccaacgaggcgagcagcacagggcgcagaggccgccgtcagaggcagaggacgtgctcatcaagctgactcgtgtgctggccaacattgccatccacccgggcgtgggcccggtgctggccgccaacccggggatagtgggcctgctcctgaccacgctggaatacaagtcacttgatgattgtgaggagctggtgatcaatgctacagcgacaatcaacaatttatcttactaccaagtgaagaattccataattcaagacaaaaagctatatattgctgaattgctcttaaagcttcttgtcagtaacaacatggatggaatcctggaggctgtgcgtgttttcggaaatctctcccaggaccatgatgtctgcgatttcattgtgcagaacaatgtccacaggttcatgatggcgctgctggatgctcagcatcaggatatctgcttttctgcctgtggtgttctcctcaatctcactgtggataaagacaagcgtgtcatcttgaaagaaggaggtggcattaaaaagttagtggactgtttaagagatttgggtcctactgattggcagctggcctgcttggtttgtaaaactttatggaacttcagtgaaaacatcactaatgcttcgtcatgttttggaaatgaagacaccaacacactcttactcttgctctcatcatttttagatgaagaactagcactggatggcagttttgatccagacctaaaaaactatcacaaactccattgggaaacagaattcaaacctgtggcacagcagcttctaaaccgaattcagagacatcacaccttcctggaacccctgcccattccctctttctaacatgatgcagattaacagtagaaacgagaactcacgtctccctcattcttaagaactggtaacaaacgtgaacatttttttcagcattaacaaatgtggaaagtttttcaagaactggttttagtgagtagctgaagtattttttaaaattaagcatttcttcttgttaggtattatggaaaaatgaatatacacattatatttcctgttgagagaaatgtaagatgaaaatatgtgcattttcaagtaaatgactttttcttctattctctattaaacaatttagttctagtctt

SEQ ID NO: 315722 - DNA, 1162 bp, Homo sapiens
cggcgtcgtggggttaccccgcccgcgccagcgctgcatccctggccgctacccggggagagccggaggatgaattgaacctcgcagccgctgctatctccagtgctcatcacagggtgtggtgtctatctgaagaatattttactttcaaaggaaagatgctgtctccaaatgataaaatgttaggaaaactggatccattttatcaaccttcagtgtccaagcagaagaccagtgcagaaatcataagtgaagcaagaaatgcattaagaacagttagaacccaaagaccatttacaccacaggaggctcaaagaaaactattcggacctgcatcctcaagaacatcagaaaatagacctccttcctccttcagcctccatgcatccagttttgagtcatctgattccaggcctatctctggcacacgtcttagtccactagagctgaaaccgaaagttccagcatctcccaccagagaggaggattcctgcttttcctttcctaagcccccagtggaccctgcgaagattagaagagtaagcaacgccagggctcgcttattcagggctgcctcccagcgggcccttctgccggacagatcccttcctccctccgactcaaagaagacagtggaatccaaagaaacagttatgatgggggactctatggtgaaaataaatgggatttatttaacaaaatcaaatgctatttgccacttaaagagtcacccacttcagctaactgatgatggaggcttcagtgaaataaaggagcaagaaatgttcaaaggaacaacatctttaccatctcatctcaagaatggaggccctcactgtagattgtggaatgatgactaaggcttgaaagccttactaataaactatcgagtgctcttagtattgttggaatcaaaaataagaaaagagggcttctggttaaaggcacaaaggcattctccagtaatccaatgaaagcagcaaagaatgaaaaacagagaagtaaatttcatcaatgaaacaacaacaaaaaaatggctacgaccctgaactacacaacatgaagcaaactttacactgcagtataggcttgatttttgttggtctgtctagcaaacaggccttctcacattgtgtaataaatgctgctcagtccgtaaatg

SEQ ID NO: 315723 - DNA, 4305 bp, Homo sapiens
ctccagccggcccggggcggtggccgcaagttgggcttacagcgcggccgatccggcgtggacccgggatggctggaccgggcagcacgggggggcagatcggggctgcggccctggcaggcggcgcgcggtccaaggtagccccgagcgtggacttcgaccatagctgctcggacagtgtcgagtacctgacgctcaacttcgggcccttcgaaacagtgcatcgctggcggcgcctcccgccctgcgacgagttcgtgggtgcccggcgcagcaagcacacagtggtggcctataaagatgccatttatgtatttggtggagacaatgggaagaccatgctcaatgacctcctgcggttcgatgtgaaagactgctcctggtgcagggcctttaccactgggaccccaccggccccccgttaccaccactcggccgtcgtctatgggagcagcatgtttgtctttgggggttacactggggacatttattccaattctaacttgaagaataaaaacgacctctttgaatacaagtttgcaactggccagtggacggagtggaaaattgaaggacggttgccagtcgctaggtcagcccatggggccacggtgtacagtgacaagctgtggatctttgctggctatgacggcaacgccaggttgaatgacatgtggacaattggcctccaggaccgagagctcacctgctgggaggaggtggcccagagtgggcgagatccccccatcttgctgcaacttccccgtggctgtgtgccgggacaagatgtttgtattctctgggcaaagcggagccaaaataaccaacaacctcttccagtttgaattcaaggacaagacgtggacacgcatcccaactgaacacctgctccggggctccccaccacccccgcagcggcgctacgggcataccatggtggcctttgaccgccacctctatgtgtttgggggtgcggccgacaacacgctgcccaacgagctgcactgctatgacgtggacttccagacctgggaggtcgtccagcccagctccgacagcgaggttggtggggctgaagtgcccgagcgagcctgtgcttccgaggaggtgcccaccctgacctatgaggagcgggttggcttcaagaagtcccgagatgtgtttggcctggactttggcaccacctcagccaagcagcccacccagcctgcctcggagctgcccagtgggaggctcttccacgcggctgctgtcatctcggacgccatgtacatcttcgggggcacggtggacaacaacatccgcagcggggagatgtacaggttccagttctcctgttaccctaaatgcacgctgcacgaggactacgggcggctgtgggagagccgccagttctgcgacgtggagttcgtgctgggtgagaaggaggagtgcgtgcagggccacgtagccattgtcacagcgcggagccgctggcttcgcaggaagatcacgcaggcgcgggagaggctggcccagaagctggagcaggaggccgccccagttcccagggaggcccccggcgtggctgctggtggggcccggccgcccctgctgcacgtggccatccgggaggccgaggcccggcccttcgaggtgctcatgcagttcctctacaccgacaagatcaaatacccacggaaaggccatgtggaggatgtgctgctcatcatggatgtgtacaaactggcactgagcttccagttgtgccgcctggagcagctgtgccgccagtacatcgaggcctccgtggacctgcagaacgtgctggttgtgtgcgagagtgccgcccggctgcagctgagccaactcaaggagcactgcctgaacttcgtggtaaaggagtcccacttcaaccaggtgatcatgatgaaggagttcgagcgcctctcctctccactgatagtggagattgtgcggcggaagcagcagccgccccctcgcactcccttggaccagccagtggacattggcacatctctgatccaggacatgaaggcatacctggagggagcgggcgcggaattctgtgacatcactctgttgcttgacgggcacccacggccagcccacaaggctatcctggccgcccgctccagctactttgaagccatgttccggtccttcatgcccgaagatgggcaggtgaacatctccatcggggagatggtgcccagcaggcaggccttcgagtccatgctgcgctacatctactacggcgaggtcaacatgccgcccgaggactcgctctacttgtttgcggccccctactactacggcttctacaacaaccggctgcaggcgtactgcaagcagaacctggagatgaacgtgacggtgcagaacgtgctgcagatcctggaggcagctgacaaaacgcaggcactggacatgaagcggcactgcctgcacatcattgtgcaccagttcaccaaggtctccaagttgcccaccctgcggtcgctgagccagcagctgctgctggacatcatagactccctggcctcccacatctcagacaagcagtgcgcagagctgggcgccgacatctgaggccctgtggcgcctgcccattgtgaagaatcgccgtgcctgcctgccctgcctactgagaagactaccggctatgcgcatgcctatggcagtgggtgcacctgccaggccaagggtcagggtgcccagagcctccaaagagagctgaggggatgtggggccccaaactcattaattcactgaagacacaggtcccacagggagcggatgatgaagcagaccccctcctgtcatcaccctctcctggtgtagtgtggatgcgaggccacggctcagtgatgggctcaccacccagaagtggggagagactttgggcctcccacccagtggggcttggcctggcttctgtggcctgggcgtgttgtggactcaggcactggggcctgtcaccaaggctcctccaacatgcgggaggaggcttagcagacttgcgctgcaccagcgaatctgcctgggctgctcctgtcccacccaccctcactgagatccatgtaaggggctcctcttcccacctggaacttgtgagtggggacccatgatgtatgggtctcacctgacttgaggtgaattttggagtgaagggccctgaggtcagctcccaggtcggtcgtgctgggccaggcctggttttcacaggggctgaaggatcccagtccacctgtgtgcatgtcagggctcggccgggaagaagccagcaaagtcccccgtgtcccttgctgagtattctgtcacagacaagcctccattaaagccacagcagtgctacccaccacacacaccttgctggcccggccaccactgctggcttcagccccttgagcagcccatggcttagcagacccccagatgtaggtcagtggccttacctgtctctatccatgctgtcaactcctgcctccacctggggtcacccagtcacattgggaagggctgtgaaggcctccaggctggccccttccaggggaatcctggaggcctggggtgggctcctgccccttctgccctgccttgcccctgcactatgctcttggctcctgtggaaggagggctgccctcttgccctagtgagggccccatgtggatccactctagtgctgggagccagcgctcccttactgggaacaggattccaggacccctttcttgttgtggctgccatgaagccacagctccttggggaagtgacctgctctcctttgggtgtatgcaggtgtgtggggggccctgagtggcaagttgcttagctaacaggagatccataggcagcctgcaggctaggaagtggcctagtgcaagatgagctgggaacaagggaggagagagcaggagctggggcagaggctgagccgggaggcccttgaggtgaggacacagcaggcccaggaccatggctggggaggatatgtcagcacctggaagtggagtgcaggctgcagcgcccagccatgtgggccaggtgcattcactcagagtggggccacacacccatctacccagtttccacaagatgtggctcctgccacacccacagggcagcctcctccaaatccctcctggaggggcctacccagaagcctccttgaaccagtctgcaaccctgctctatgctgacccttgtcactgaaccctgatctagacttatatgaataaatgaaattacatgccaagggccctaaaaagcaaattttacaaaattgtgtgccagtttctggg

SEQ ID NO: 315724 - DNA, 636 bp, Homo sapiens
ctccagccggcccggggcggtggccgcaagttgggcttacagcgcggccgatccggcgtggacccgggatggctggaccgggcagcacgggggggcagatcggggctgcggccctggcaggcggcgcgcggtccaaggtagccccgagcgtggacttcgaccatagctgctcggacagtgtcgagtacctgacgctcaacttcgggcccttcgaaacagtgcatcgctggcggcgcctcccgccctgcgacgagttcgtgggtgcccggcgcagcaagcacacagtggtggcctataaagatgccatttatgtatttggtggagacaatgggaagaccatgctcaatgacctcctgcggttcgatgtgaaagactgctcctggtgcagggggttacactggggacatttattccaattctaacttgaagaataaaaacgacctctttgaatacaagtttgcaactggccagtggacggagtggaaaattgaaggacggttgccagtcgctaggtcagcccatggggccacggtgtacagtgacaagctgtggatctttgctggctatgacggcaacgccagtgaattgacatgtggacaattggccacccggacctcaatttgggtaccgagctcg

SEQ ID NO: 315725 - DNA, 4274 bp, Homo sapiens
ctccagccggcccggggcggtggccgcaagttgggcttacagcgcggccgatccggcgtggacccgggatggctggaccgggcagcacgggggggcagatcggggctgcggccctggcaggcggcgcgcggtccaaggtagccccgagcgtggacttcgaccatagctgctcggacagtgtcgagtacctgacgctcaacttcgggcccttcgaaacagtgcatcgctggcggcgcctcccgccctgcgacgagttcgtgggtgcccggcgcagcaagcacacagtggtggcctataaagatgccatttatgtatttggtggagacaatgggaagaccatgctcaatgacctcctgcggttcgatgtgaaagactgctcctggtgcagggcctttaccactgggaccccaccggccccccgttaccaccactcggccgtcgtctatgggagcagcatgtttgtctttgggggttacactggggacatttattccaattctaacttgaagaataaaaacgacctctttgaatacaagtttgcaactggccagtggacggagtggaaaattgaaggacggttgccagtcgctaggtcagcccatggggccacggtgtacagtgacaagctgtggatctttgctggctatgacggcaacgccaggttgaatgacatgtggacaattggcctccaggaccgagagctcacctgctgggaggaggtggcccagagtgggcgagatccccccatcttgctgcaacttccccgtggctgtgtgccgggacaagatgtttgtattctctgggcaaagcggagccaaaataaccaacaacctcttccagtttgaattcaaggacaagacgtggacacgcatcccaactgaacacctgctccggggctccccaccacccccgcagcggcgctacgggcataccatggtggcctttgaccgccacctctatgtgtttgggggtgcggccgacaacacgctgcccaacgagctgcactgctatgacgtggacttccagacctgggaggtcgtccagcccagctccgacagcgaggttggtggggctgaagtgcccgagcgagcctgtgcttccgaggaggtgcccaccctgacctatgaggagcgggttggcttcaagaagtcccgagatgtgtttggcctggactttggcaccacctcagccaagcagcccacccagcctgcctcggagctgcccagtgggaggctcttccacgcggctgctgtcatctcggacgccatgtacatcttcgggggcacggtggacaacaacatccgcagcggggagatgtacaggttccagttctcctgttaccctaaatgcacgctgcacgaggactacgggcggctgtgggagagccgccagttctgcgacgtggagttcgtgctgggtgagaaggaggagtgcgtgcagggccacgtagccattgtcacagcgcggagccgctggcttcgcaggaagatcacgcaggcgcgggagaggctggcccagaagctggagcaggaggccgccccagttcccagggaggcccccggcgtggctgctggtggggcccggccgcccctgctgcacgtggccatccgggaggccgaggcccggcccttcgaggtgctcatgcagttcctctacaccgacaagatcaaatacccacggaaaggccatgtggaggatgtgctgctcatcatggatgtgtacaaactggcactgagcttccagttgtgccgcctggagcagctgtgccgccagtacatcgaggcctccgtggacctgcagaacgtgctggttgtgtgcgagagtgccgcccggctgcagctgagccaactcaaggagcactgcctgaacttcgtggtaaaggagtcccacttcaaccaggtgatcatgatgaaggagttcgagcgcctctcctctccactgatagtggagattgtgcggcggaagcagcagccgccccctcgcactcccttggaccagccagtggacattggcacatctctgatccaggacatgaaggcatacctggagggagcgggcgcggaattctgtgacatcactctgttgcttgacgggcacccacggccagcccacaaggctatcctggccgcccgctccagctactttgaagccatgttccggtccttcatgcccgaagatgggcaggtgaacatctccatcggggagatggtgcccagcaggcaggccttcgagtccatgctgcgctacatctactacggcgaggtcaacatgccgcccgaggactcgctctacttgtttgcggccccctactactacggcttctacaacaaccggctgcaggcgtactgcaagcagaacctggagatgaacgtgacggtgcagaacgtgctgcagatcctggaggcagctgacaaaacgcaggcactggacatgaagcggcactgcctgcacatcattgtgcaccagttcaccaaggtctccaagttgcccaccctgcggtcgctgagccagcagctgctgctggacatcatagactccctggcctcccacatctcagacaagcagtgcgcagagctgggcgccgacatctgaggccctgtggcgcctgcccattgtgaagaatcgccgtgcctgcctgccctgcctactgagaagactaccggctatgcgcatgcctatggcagtgggtgcacctgccaggccaagggtcagggtgcccagagcctccaaagagagctgaggggatgtggggccccaaactcattaattcactgaagacacaggtcccacagggagcggatgatgaagcagaccccctcctgtcatcaccctctcctggtgtagtgtggatgcgaggccacggctcagtgatgggctcaccacccagaagtggggagagactttgggcctcccacccagtggggcttggcctggcttctgtggcctgggcgtgttgtggactcaggcactggggcctgtcaccaaggctcctccaacatgcgggaggaggcttagcagacttgcgctgcaccagcgaatctgcctgggctgctcctgtcccacccaccctcactgagatccatgtaaggggctcctcttcccacctggaacttgtgagtggggacccatgatgtatgggtctcacctgacttgaggtgaattttggagtgaagggccctgaggtcagctcccaggtcggtcgtgctgggccaggcctggttttcacaggggctgaaggatcccagtccacctgtgtgcatgtcagggctcggccgggaagaagccagcaaagtcccccgtgtcccttgctgagtattctgtcacagacaagcctccattaaagccacagcagtgctacccaccacacacaccttgctggcccggccaccactgctggcttcagccccttgagcagcccatggcttagcagacccccagatgtaggtcagtggccttacctgtctctatccatgctgtcaactcctgcctccacctggggtcacccagtcacattgggaagggctgtgaaggcctccaggctggccccttccaggggaatcctggaggcctggggtgggctcctgccccttctgccctgccttgcccctgcactatgctcttggctcctgtggaaggagggctgccctcttgccctagtgagggccccatgtggatccactctagtgctgggagccagcgctcccttactgggaacaggattccaggacccctttcttgttgtggctgccatgaagccacagctccttggggaagtgacctgctctcctttgggtgtatgcaggtgtgtggggggccctgagtggcaagttgcttagctaacaggagatccataggcagcctgcaggctaggaagtggcctagtgcaagatgagctgggaacaagggaggagagagcaggagctggggcagaggctgagccgggaggcccttgaggtgaggacacagcaggcccaggaccatggctggggaggatatgtcagcacctggaagtggagtgcaggctgcagcgcccagccatgtgggccaggtgcattcactcagagtggggccacacacccatctacccagtttccacaagatgtggctcctgccacacccacagggcagcctcctccaaatccctcctggaggggcctacccagaagcctccttgaaccagtctgcaaccctgctctatgctgacccttgtcactgaaccctgatctagacttatatgaataaatgaaattacatgccaagggccctaaaaagca

SEQ ID NO: 315726 - DNA, 4391 bp, Homo sapiens
ctccagccggcccggggcggtggccgcaagttgggcttacagcgcggccgatccggcgtggacccgggatggctggaccgggcagcacgggggggcagatcggggctgcggccctggcaggcggcgcgcggtccaaggtagccccgagcgtggacttcgaccatagctgctcggacagtgtcgagtacctgacgctcaacttcgggcccttcgaaacagtgcatcgctggcggcgcctcccgccctgcgacgagttcgtgggtgcccggcgcagcaagcacacagtggtggcctataaagatgccatttatgtatttggtggagacaatgggaagaccatgctcaatgacctcctgcggttcgatgtgaaagactgctcctggtgcagggcctttaccactgggaccccaccggccccccgttaccaccactcggccgtcgtctatgggagcagcatgtttgtctttgggggttacactggggacatttattccaattctaacttgaagaataaaaacgacctctttgaatacaagtttgcaactggccagtggacggagtggaaaattgaaggacggttgccagtcgctaggtcagcccatggggccacggtgtacagtgacaagctgtggatctttgctggctatgacggcaacgccaggttgaatgacatgtggacaattggcctccaggaccgagagctcacctgctgggaggaggtggcccagagtgggcgagatccccccatcttgctgcaacttccccgtggctgtgtgccgggacaagatgtttgtattctctgggcaaagcggagccaaaataaccaacaacctcttccagtttgaattcaaggacaagacgtggacacgcatcccaactgaacacctgctccggggctccccaccacccccgcagcggcgctacgggcataccatggtggcctttgaccgccacctctatgtgtttgggggtgcggccgacaacacgctgcccaacgagctgcactgctatgacgtggacttccagacctgggaggtcgtccagcccagctccgacagcgaggttggtggggctgaagtgcccgagcgagcctgtgcttccgaggaggtgcccaccctgacctatgaggagcgggttggcttcaagaagtcccgagatgtgtttggcctggactttggcaccacctcagccaagcagcccacccagcctgcctcggagctgcccagtgggaggctcttccacgcggctgctgtcatctcggacgccatgtacatcttcgggggcacggtggacaacaacatccgcagcggggagatgtacaggttccagttctcctgttaccctaaatgcacgctgcacgaggactacgggcggctgtgggagagccgccagttctgcgacgtggagttcgtgctgggtgagaaggaggagtgcgtgcagggccacgtagccattgtcacagcgcggagccgctggcttcgcaggaagatcacgcaggcgcgggagaggctggcccagaagctggagcaggaggccgccccagttcccagggaggcccccggcgtggctgctggtggggcccggccgcccctgctgcacgtggccatccgggaggccgaggcccggcccttcgaggtgctcatgcagttcctctacaccgacaagatcaaatacccacggaaaggccatgtggaggatgtgctgctcatcatggatgtgtacaaactggcactgagcttccagttgtgccgcctggagcagctgtgccgccagtacatcgaggcctccgtggacctgcagaacgtgctggttgtgtgcgagagtgccgcccggctgcagctgagccaactcaaggagcactgcctgaacttcgtggtaaaggagtcccacttcaaccaggtgatcatgatgaaggagttcgagcgcctctcctctccactgatagtggagattgtgcggcggaagcagcagccgccccctcgcactcccttggaccagccagtggacattggccccttcattcccccagcattccctggggcttgtgctgaccccggttgctggctcttggtgatgtctgcaggcaccagaggccatgcagtgggcctggagggggcttgatcatgaggcacatctctgatccaggacatgaaggcatacctggagggagcgggcgcggaattctgtgacatcactctgttgcttgacgggcacccacggccagcccacaaggctatcctggccgcccgctccagctactttgaagccatgttccggtccttcatgcccgaagatgggcaggtgaacatctccatcggggagatggtgcccagcaggcaggccttcgagtccatgctgcgctacatctactacggcgaggtcaacatgccgcccgaggactcgctctacttgtttgcggccccctactactacggcttctacaacaaccggctgcaggcgtactgcaagcagaacctggagatgaacgtgacggtgcagaacgtgctgcagatcctggaggcagctgacaaaacgcaggcactggacatgaagcggcactgcctgcacatcattgtgcaccagttcaccaaggtctccaagttgcccaccctgcggtcgctgagccagcagctgctgctggacatcatagactccctggcctcccacatctcagacaagcagtgcgcagagctgggcgccgacatctgaggccctgtggcgcctgcccattgtgaagaatcgccgtgcctgcctgccctgcctactgagaagactaccggctatgcgcatgcctatggcagtgggtgcacctgccaggccaagggtcagggtgcccagagcctccaaagagagctgaggggatgtggggccccaaactcattaattcactgaagacacaggtcccacagggagcggatgatgaagcagaccccctcctgtcatcaccctctcctggtgtagtgtggatgcgaggccacggctcagtgatgggctcaccacccagaagtggggagagactttgggcctcccacccagtggggcttggcctggcttctgtggcctgggcgtgttgtggactcaggcactggggcctgtcaccaaggctcctccaacatgcgggaggaggcttagcagacttgcgctgcaccagcgaatctgcctgggctgctcctgtcccacccaccctcactgagatccatgtaaggggctcctcttcccacctggaacttgtgagtggggacccatgatgtatgggtctcacctgacttgaggtgaattttggagtgaagggccctgaggtcagctcccaggtcggtcgtgctgggccaggcctggttttcacaggggctgaaggatcccagtccacctgtgtgcatgtcagggctcggccgggaagaagccagcaaagtcccccgtgtcccttgctgagtattctgtcacagacaagcctccattaaagccacagcagtgctacccaccacacacaccttgctggcccggccaccactgctggcttcagccccttgagcagcccatggcttagcagacccccagatgtaggtcagtggccttacctgtctctatccatgctgtcaactcctgcctccacctggggtcacccagtcacattgggaagggctgtgaaggcctccaggctggccccttccaggggaatcctggaggcctggggtgggctcctgccccttctgccctgccttgcccctgcactatgctcttggctcctgtggaaggagggctgccctcttgccctagtgagggccccatgtggatccactctagtgctgggagccagcgctcccttactgggaacaggattccaggacccctttcttgttgtggctgccatgaagccacagctccttggggaagtgacctgctctcctttgggtgtatgcaggtgtgtggggggccctgagtggcaagttgcttagctaacaggagatccataggcagcctgcaggctaggaagtggcctagtgcaagatgagctgggaacaagggaggagagagcaggagctggggcagaggctgagccgggaggcccttgaggtgaggacacagcaggcccaggaccatggctggggaggatatgtcagcacctggaagtggagtgcaggctgcagcgcccagccatgtgggccaggtgcattcactcagagtggggccacacacccatctacccagtttccacaagatgtggctcctgccacacccacagggcagcctcctccaaatccctcctggaggggcctacccagaagcctccttgaaccagtctgcaaccctgctctatgctgacccttgtcactgaaccctgatctagacttatatgaataaatgaaattacatgccaagggccctaaaaagca

SEQ ID NO: 315727 - DNA, 4358 bp, Homo sapiens
ctccagccggcccggggcggtggccgcaagttgggcttacagcgcggccgatccggcgtggacccgggatggctggaccgggcagcacgggggggcagatcggggctgcggccctggcaggcggcgcgcggtccaaggtagccccgagcgtggacttcgaccatagctgctcggacagtgtcgagtacctgacgctcaacttcgggcccttcgaaacagtgcatcgctggcggcgcctcccgccctgcgacgagttcgtgggtgcccggcgcagcaagcacacagtggtggcctataaagatgccatttatgtatttggtggagacaatgggaagaccatgctcaatgacctcctgcggttcgatgtgaaagactgctcctggtgcagggcctttaccactgggaccccaccggccccccgttaccaccactcggccgtcgtctatgggagcagcatgtttgtctttgggggttacactggggacatttattccaattctaacttgaagaataaaaacgacctctttgaatacaagtttgcaactggccagtggacggagtggaaaattgaaggacggttgccagtcgctaggtcagcccatggggccacggtgtacagtgacaagctgtggatctttgctggctatgacggcaacgccaggttgaatgacatgtggacaattggcctccaggaccgagagctcacctgctgggaggaggtggcccagagtgggcgagatccccccatcttgctgcaacttccccgtggctgtgtgccgggacaagatgtttgtattctctgggcaaagcggagccaaaataaccaacaacctcttccagtttgaattcaaggacaagacgtggacacgcatcccaactgaacacctgctccggggctccccaccacccccgcagcggcgctacgggcataccatggtggcctttgaccgccacctctatgtgtttgggggtgcggccgacaacacgctgcccaacgagctgcactgctatgacgtggacttccagacctgggaggtcgtccagcccagctccgacagcgaggttggtggggctgaagtgcccgagcgagcctgtgcttccgaggaggtgcccaccctgacctatgaggagcgggttggcttcaagaagtcccgagatgtgtttggcctggactttggcaccacctcagccaagcagcccacccagcctgcctcggagctgcccagtgggaggctcttccacgcggctgctgtcatctcggacgccatgtacatcttcgggggcacggtggacaacaacatccgcagcggggagatgtacaggttccagttctcctgttaccctaaatgcacgctgcacgaggactacgggcggctgtgggagagccgccagttctgcgacgtggagttcgtgctgggtgagaaggaggagtgcgtgcagggccacgtagccattgtcacagcgcggagccgctggcttcgcaggaagatcacgcaggcgcgggagaggctggcccagaagctggagcaggaggccgccccagttcccagggaggcccccggcgtggctgctggtggggcccggccgcccctgctgcacgtggccatccgggaggccgaggcccggcccttcgaggtgctcatgcagttcctctacaccgacaagatcaaatacccacggaaaggccatgtggaggatgtgctgctcatcatggatgtgtacaaactggcactgagcttccagttgtgccgcctggagcagctgtgccgccagtacatcgaggcctccgtggacctgcagaacgtgctggttgtgtgcgagagtgccgcccggctgcagctgagccaactcaaggagcactgcctgaacttcgtggtaaaggagtcccacttcaaccaggtgatcatgatgaaggagttcgagcgcctctcctctccactgatagtggagattgtgcggcggaagcagcagccgccccctcgcactcccttggaccagccagtggacattggcacatctctgatccaggacatgaaggcatacctggagggagcgggcgcggaattctgtgacatcactctgttgcttgacgggcacccacggccagcccacaaggctatcctggccgcccgctccagctactttgaagccatgttccggtccttcatgcccgaagatgggcaggtgaacatctccatcggggagatggtgcccagcaggcaggccttcgagtccatgctgcgctacatctactacggcgaggtcaacatgccgcccgaggactcgctctacttgtttgcggccccctactactacggcttctacaacaaccggctgcaggcgtactgcaagcagaacctggagatgaacgtgacggtgcagaacgtgctgcaggtagccccccagccccgtgcacatggctgcagctcccactgagtgggtgaaaggggcagcgcctcaaggtccctgccattgcagatcctggaggcagctgacaaaacgcaggcactggacatgaagcggcactgcctgcacatcattgtgcaccagttcaccaaggtctccaagttgcccaccctgcggtcgctgagccagcagctgctgctggacatcatagactccctggcctcccacatctcagacaagcagtgcgcagagctgggcgccgacatctgaggccctgtggcgcctgcccattgtgaagaatcgccgtgcctgcctgccctgcctactgagaagactaccggctatgcgcatgcctatggcagtgggtgcacctgccaggccaagggtcagggtgcccagagcctccaaagagagctgaggggatgtggggccccaaactcattaattcactgaagacacaggtcccacagggagcggatgatgaagcagaccccctcctgtcatcaccctctcctggtgtagtgtggatgcgaggccacggctcagtgatgggctcaccacccagaagtggggagagactttgggcctcccacccagtggggcttggcctggcttctgtggcctgggcgtgttgtggactcaggcactggggcctgtcaccaaggctcctccaacatgcgggaggaggcttagcagacttgcgctgcaccagcgaatctgcctgggctgctcctgtcccacccaccctcactgagatccatgtaaggggctcctcttcccacctggaacttgtgagtggggacccatgatgtatgggtctcacctgacttgaggtgaattttggagtgaagggccctgaggtcagctcccaggtcggtcgtgctgggccaggcctggttttcacaggggctgaaggatcccagtccacctgtgtgcatgtcagggctcggccgggaagaagccagcaaagtcccccgtgtcccttgctgagtattctgtcacagacaagcctccattaaagccacagcagtgctacccaccacacacaccttgctggcccggccaccactgctggcttcagccccttgagcagcccatggcttagcagacccccagatgtaggtcagtggccttacctgtctctatccatgctgtcaactcctgcctccacctggggtcacccagtcacattgggaagggctgtgaaggcctccaggctggccccttccaggggaatcctggaggcctggggtgggctcctgccccttctgccctgccttgcccctgcactatgctcttggctcctgtggaaggagggctgccctcttgccctagtgagggccccatgtggatccactctagtgctgggagccagcgctcccttactgggaacaggattccaggacccctttcttgttgtggctgccatgaagccacagctccttggggaagtgacctgctctcctttgggtgtatgcaggtgtgtggggggccctgagtggcaagttgcttagctaacaggagatccataggcagcctgcaggctaggaagtggcctagtgcaagatgagctgggaacaagggaggagagagcaggagctggggcagaggctgagccgggaggcccttgaggtgaggacacagcaggcccaggaccatggctggggaggatatgtcagcacctggaagtggagtgcaggctgcagcgcccagccatgtgggccaggtgcattcactcagagtggggccacacacccatctacccagtttccacaagatgtggctcctgccacacccacagggcagcctcctccaaatccctcctggaggggcctacccagaagcctccttgaaccagtctgcaaccctgctctatgctgacccttgtcactgaaccctgatctagacttatatgaataaatgaaattacatgccaagggccctaaaaagca

SEQ ID NO: 315728 - DNA, 3672 bp, Homo sapiens
ctccagccggcccggggcggtggccgcaagttgggcttacagcgcggccgatccggcgtggacccgggatggctggaccgggcagcacgggggggcagatcggggctgcggccctggcaggcggcgcgcggtccaaggtagccccgagcgtggacttcgaccatagctgctcggacagtgtcgagtacctgacgctcaacttcgggcccttcgaaacagtgcatcgctggcggcgcctcccgccctgcgacgagttcgtgggtgcccggcgcagcaagcacacagtggtggcctataaagatgccatttatgtatttggtggagacaatgggaagaccatgctcaatgacctcctgcggttcgatgtgaaagactgctcctggtgcagggcctttaccactgggaccccaccggccccccgttaccaccactcggccgtcgtctatgggagcagcatgtttgtctttgggggttacactggggacatttattccaattctaacttgaagaataaaaacgacctctttgaatacaagtttgcaactggccagtggacggagtggaaaattgaaggacggttgccagtcgctaggtcagcccatggggccacggtgtacagtgacaagctgtggatctttgctggctatgacggcaacgccaggttgaatgacatgtggacaattggcctccaggaccgagagctcacctgctgggaggaggtggcccagagtgggcgagatccccccatcttgctgcaacttccccgtggctgtgtgccgggacaagatgtttgtattctctgggcaaagcggagccaaaataaccaacaacctcttccagtttgaattcaaggacaagacgtggacacgcatcccaactgaacacctgctccggggctccccaccacccccgcagcggcgctacgggcataccatggtggcctttgaccgccacctctatgtgtttgggggtgcggccgacaacacgctgcccaacgagctgcactgctatgacgtggacttccagacctgggaggtcgtccagcccagctccgacagcgaggttggtggggctgaagtgcccgagcgagcctgtgcttccgaggaggtgcccaccctgacctatgaggagcgggttggcttcaagaagtcccgagatgtgtttggcctggactttggcaccacctcagccaagcagcccacccagcctgcctcggagctgcccagtgggaggctcttccacgcggctgctgtcatctcggacgccatgtacatcttcgggggcacggtggacaacaacatccgcagcggggagatgtacaggttccagttctcctgttaccctaaatgcacgctgcacgaggactacgggcggctgtgggagagccgccagttctgcgacgtggagttcgtgctgggtgagaaggaggagtgcgtgcagggccacgtagccattgtcacagcgcggagccgctggcttcgcaggaagatcacgcaggcgcgggagaggctggcccagaagctggagcaggaggccgccccagttcccagggaggcccccggcgtggctgctggtggggcccggccgcccctgctgcacgtggccatccgggaggccgaggcccggcccttcgaggtgctcatgcagttcctctacaccgacaagatcaaatacccacggaaaggccatgtggaggatgtgctgctcatcatggatgtgtacaaactggcactgagcttccagttgtgccgcctggagcagctgtgccgccagtacatcgaggcctccgtggacctgcagaacgtgctggttgtgtgcgagagtgccgcccggctgcagctgagccaactcaaggagcactgcctgaacttcgtggtaaaggagtcccacttcaaccaggtgatcatgatgaaggagttcgagcgcctctcctctccactgatagtggagattgtgcggcggaagcagcagccgccccctcgcactcccttggaccagccagtggacattggcacatctctgatccaggacatgaaggcatacctggagggagcgggcgcggaattctgtgacatcactctgttgcttgacgggcacccacggccagcccacaaggctatcctggccgcccgctccagctactttgaagccatgttccggtccttcatgcccgaagatgggcaggtgaacatctccatcggggagatggtgcccagcaggcaggccttcgagtccatgctgcgctacatctactacggcgaggtcaacatgccgcccgaggactcgctctacttgtttgcggccccctactactacggcttctacaacaaccggctgcaggcgtactgcaagcagaacctggagatgaacgtgacggtgcagaacgtgctgcagatcctggaggcagctgacaaaacgcaggcactggacatgaagcggcactgcctgcacatcattgtgcaccagttcaccaaggtctccaagttgcccaccctgcggtcgctgagccagcagctgctgctggacatcatagactccctggcctcccacatctcagacaagcagtgcgcagagctgggcgccgacatctgaggccctgtggcgcctgcccattgtgaagaatcgccgtgcctgcctgccctgcctactgagaagactaccggctatgcgcatgcctatggcagtgggtgcacctgccaggccaagggtcagggtgcccagagcctccaaagagagctgaggggatgtggggccccaaactcattaattcactgaagacacaggtcccacagggagcggatgatgaagcagaccccctcctgtcatcaccctctcctggtgtagtgtggatgcgaggccacggctcagtgatgggctcaccacccagaagtggggagagactttgggcctcccacccagtggggcttggcctggcttctgtggcctgggcgtgttgtggactcaggcactggggcctgtcaccaaggctcctccaacatgcgggaggaggcttagcagacttgcgctgcaccagcgaatctgcctgggctgctcctgtcccacccaccctcactgagatccatgtaaggggctcctcttcccacctggaacttgtgagtggggacccatgatgtatgggtctcacctgacttgaggtgaattttggagtgaagggccctgaggtcagctcccaggtcggtcgtgctgggccaggcctggttttcacaggggctgaaggatcccagtccacctgtgtgcatgtcagggctcggccgggaagaagccagcaaagtcccccgtgtcccttgctgagtattctgtcacagacaagcctccattaaagccacagcagtgctacccaccacacacaccttgctggcccggccaccactgctggcttcagccccttgagcagcccatggcttagcagacccccagatgtaggtcagtggccttacctgtctctatccatctggggcagaggctgagccgggaggcccttgaggtgaggacacagcaggcccaggaccatggctggggaggatatgtcagcaccctgctctatgctgacccttgtcactgaaccctgatctagacttatatgaataaatgaaattacatgccaagggccctaaaaagcaaattttacaaaattgtgtgccagtttctggg

SEQ ID NO: 315729 - DNA, 3361 bp, Homo sapiens
ctccagccggcccggggcggtggccgcaagttgggcttacagcgcggccgatccggcgtggacccgggatggctggaccgggcagcacgggggggcagatcggggctgcggccctggcaggcggcgcgcggtccaaggtagccccgagcgtggacttcgaccatagctgctcggacagtgtcgagtacctgacgctcaacttcgggcccttcgaaacagtgcatcgctggcggcgcctcccgccctgcgacgagttcgtgggtgcccggcgcagcaagcacacagtggtggcctataaagatgccatttatgtatttggtggagacaatgggaagaccatgctcaatgacctcctgcggttcgatgtgaaagactgctcctggtgcagggcctttaccactgggaccccaccggccccccgttaccaccactcggccgtcgtctatgggagcagcatgtttgtctttgggggttacactggggacatttattccaattctaacttgaagaataaaaacgacctctttgaatacaagtttgcaactggccagtggacggagtggaaaattgaaggacggttgccagtcgctaggtcagcccatggggccacggtgtacagtgacaagctgtggatctttgctggctatgacggcaacgccaggttgaatgacatgtggacaattggcctccaggaccgagagctcacctgctgggaggaggtggcccagagtgggcgagatccccccatcttgctgcaacttccccgtggctgtgtgccgggacaagatgtttgtattctctgggcaaagcggagccaaaataaccaacaacctcttccagtttgaattcaaggacaagacgtggacacgcatcccaactgaacacctgctccggggctccccaccacccccgcagcggcgctacgggcataccatggtggcctttgaccgccacctctatgtgtttgggggtgcggccgacaacacgctgcccaacgagctgcactgctatgacgtggacttccagacctgggaggtcgtccagcccagctccgacagcgaggttggtggggctgaagtgcccgagcgagcctgtgcttccgaggaggtgcccaccctgacctatgaggagcgggttggcttcaagaagtcccgagatgtgtttggcctggactttggcaccacctcagccaagcagcccacccagcctgcctcggagctgcccagtgggaggctcttccacgcggctgctgtcatctcggacgccatgtacatcttcgggggcacggtggacaacaacatccgcagcggggagatgtacaggttccagttctcctgttaccctaaatgcacgctgcacgaggactacgggcggctgtgggagagccgccagttctgcgacgtggagttcgtgctgggtgagaaggaggagtgcgtgcagggccacgtagccattgtcacagcgcggagccgctggcttcgcaggaagatcacgcaggcgcgggagaggctggcccagaagctggagcaggaggccgccccagttcccagggaggcccccggcgtggctgctggtggggcccggccgcccctgctgcacgtggccatccgggaggccgaggcccggcccttcgaggtgctcatgcagttcctctacaccgacaagatcaaatacccacggaaaggccatgtggaggatgtgctgctcatcatggatgtgtacaaactggcactgagcttccagttgtgccgcctggagcagctgtgccgccagtacatcgaggcctccgtggacctgcagaacgtgctggttgtgtgcgagagtgccgcccggctgcagctgagccaactcaaggagcactgcctgaacttcgtggtaaaggagtcccacttcaaccaggtgatcatgatgaaggagttcgagcgcctctcctctccactgatagtggagattgtgcggcggaagcagcagccgccccctcgcactcccttggaccagccagtggacattggcacatctctgatccaggacatgaaggcatacctggagggagcgggcgcggaattctgtgacatcactctgttgcttgacgggcacccacggccagcccacaaggctatcctggccgcccgctccagctactttgaagccatgttccggtccttcatgcccgaagatgggcaggtgaacatctccatcggggagatggtgcccagcaggcaggccttcgagtccatgctgcgctacatctactacggcgaggtcaacatgccgcccgaggactcgctctacttgtttgcggccccctactactacggcttctacaacaaccggctgcaggcgtactgcaagcagaacctggagatgaacgtgacggtgcagaacgtgctgcagatcctggaggcagctgacaaaacgcaggcactggacatgaagcggcactgcctgcacatcattgtgcaccagttcaccaaggtctccaagttgcccaccctgcggtcgctgagccagcagctgctgctggacatcatagactccctggcctcccacatctcagacaagcagtgcgcagagctgggcgccgacatctgaggccctgtggcgcctgcccattgtgaagaatcgccgtgcctgcctgccctgcctactgagaagactaccggctatgcgcatgcctatggcagtgggtgcacctgccaggccaagggtcagggtgcccagagcctccaaagagagctgaggggatgtggggccccaaactcattaattcactgaagacacaggtcccacagggagcggatgatgaagcagaccccctcctgtcatcaccctctcctggtgtagtgtggatgcgaggccacggctcagtgatgggctcaccacccagaagtggggagagactttgggcctcccacccagtggggcttggcctggcttctgtggcctgggcgtgttgtggactcaggcactggggcctgtcaccaaggctcctccaacatgcgggaggaggcttagcagacttgcgctgcaccagcgaatctgcctgggctgctcctgtcccacccaccctcactgagatccatgtaaggggctcctcttcccacctggaacttgtgagtggggacccatgatgtatgggtctcacctgacttgaggtgaattttggagtgaagggccctgaggtcagctcccaggtcggtcgtgctgggccaggcctggttttcacaggggctgaaggatcccagtccacctgtgtgcatgtcagggctcggccgggaagaagccagcaaagtcccccgtgtcccttgctgagtattctgtcacagacaagcctccattaaagccacagcagtgctaccca

SEQ ID NO: 315730 - DNA, 1381 bp, Homo sapiens
ctccagccggcccggggcggtggccgcaagttgggcttacagcgcggccgatccggcgtggacccgggatggctggaccgggcagcacgggggggcagatcggggctgcggccctggcaggcggcgcgcggtccaaggtagccccgagcgtggacttcgaccatagctgctcggacagtgtcgagtacctgacgctcaacttcgggcccttcgaaacagtgcatcgctggcggcgcctcccgccctgcgacgagttcgtgggtgcccggcgcagcaagcacacagtggtggcctataaagatgccatttatgtatttggtggagacaatgggaagaccatgctcaatgacctcctgcggttcgatgtgaaagactgctcctggtgcagggcctttaccactgggaccccaccggccccccgttaccaccactcggccgtcgtctatgggagcagcatgtttgtctttgggggttacactggggacatttattccaattctaacttgaagaataaaaacgacctctttgaatacaagtttgcaactggccagtggacggagtggaaaattgaaggacggttgccagtcgctaggtcagcccatggggccacggtgtacagtgacaagctgtggatctttgctggctatgacggcaacgccaggttgaatgacatgtggacaattggcctccaggaccgagagctcacctgctgggaggaggtggcccagagtgggcgagatccccccatcttgctgcaacttccccgtggctgtgtgccgggacaagatgtttgtattctctgggcaaagcggagccaaaataaccaacaacctcttccagtttgaattcaaggacaagacgtggacacgcatcccaactgaacacctgctccggggctccccaccacccccgcagcggcgctacgggcataccatggtggcctttgaccgccacctctatgtgtttgggggtgcggccgacaacacgctgcccaacgagctgcactgctatgacgtggacttccagacctgggaggtcgtccagcccagctccgacagcgaggttggtggggctgaagtgcccgagcgagcctgtgcttccgaggaggtgcccaccctgacctatgaggagcgggttggcttcaagaagtcccgagatgtgtttggcctggactttggcaccacctcagccaagcagcccacccagcctgcctcggaggtacaggctgggatcctcattaagactccatcaccccctgaaacaggtcctgtgatcaacccctctcacacatggggagactgaggccccgagaaatacttgcttggggtcacaccacaaagggggtacagggccaagggccctcaccctgctggccaggctg

SEQ ID NO: 315731 - DNA, 900 bp, Homo sapiens
ctccagccggcccggggcggtggccgcaagttgggcttacagcgcggccgatccggcgtggacccgggatggctggaccgggcagcacgggggggcagatcggggctgcggccctggcaggcggcgcgcggtccaaggtagccccgagcgtggacttcgaccatagctgctcggacagtgtcgagtacctgacgctcaacttcgggcccttcgaaacagtgcatcgctggcggcgcctcccgccctgcgacgagttcgtgggtgcccggcgcagcaagcacacagtggtggcctataaagatgccatttatgtatttggtggagacaatgggaagaccatgctcaatgacctcctgcggttcgatgtgaaagactgctcctggtgcagggcctttaccactgggaccccaccggccccccgttaccaccactcggccgtcgtctatgggagcagcatgtttgtctttgggggttacactggggacatttattccaattctaacttgaagaataaaaacgacctctttgaatacaagtttgcaactggccagtggacggagtggaaaattgaaggacggttgccagtcgctaggtcagcccatggggccacggtgtacagtgacaagctgtggatctttgctggctatgacggcaacgccagccatgtgggccaggtgcattcactcagagtggggccacacacccatctacccagtttccacaagatgtggctcctgccacacccacagggcagcctcctccaaatccctcctggaggggcctacccagaagcctccttgaaccagtctgcaaccctgctctatgctgacccttgtcactgaaccctgatctagacttatatgaataaatgaaattacatgccaagggccctaaaaagca

SEQ ID NO: 315732 - DNA, 404 bp, Homo sapiens
gaacatctccatcggggagatggtgcccagcaggcaggccttcgagtccatgctgcgctacatctactacggcgaggtcaacatgccgcccgaggactcgctgcatcctcactccccagtgaactcccaggtccccaccaaggggtcctggcacccacctcgggtggctttgaggcccgctctcctgccccagctaggtgatctgggcccagcgcctccctccagagggtttgctggtgcctggggctgggcctggtgctctctgaagcagttggcagctggcaaggaggggtttgcagccaggaggaaccagtgggttcctgaccctcacaactgcccagaggacggggtgggtcattgctttgtgtgacagttgagcacagacatggaggtactccttatgt

SEQ ID NO: 315733 - DNA, 883 bp, Homo sapiens
  misc_feature (509)..(509): n is a, c, g, or t
tgggggaggctccaaggacctgtgtgggtccaagctgggctctgctgcctcgtggaggtttgtgccatgccatcagctctttccacaggcccctggctgtgcctgcctggggcgctgggcccctggctctgtcctcacactggtttctcttcatggggttgatgatcaccttcaggaagcaaagctgatgaaggacaagggctcctcaccaaatagacactagtggtgcctgtttctgacttcttgctttgatgttctcttttagggtccagataatttttttttttagaaaagaaatgtagagtgaaggtgacagcctttgattatagtagtaaagatgatccaaatagtttgtataataaatacttggacacatgaatctgtatttgaaatttgaaaccatcctaataatatagccaaaaaaaaaaaaaaaaaaagagctctccgagggttccttcttccttccacgctttctccttggggctttgtgaagcagggaagaaagaagncctgtgcttgaagttcgcagtgaaggccgggttctctcctgtgcgaggaaggggaagttcacagcccgagaaggaagtttggggggcccatcggcggactacgccgtgccaccgaattgagaacccgagctcagtttttggagaaggcagaaaaaatttcttatccgtgagaacaaaccacgtgtcaaattgggtgtggctggggttgagcgttgcgggcctgcctggtgggttacatttccggcaaaccattgttggggaaagccacgttggattgagttacgaaccccgaggaaccacgttggcaggaatgcaaagcagtcacttcgcgcagctactggaactcctgaaacctccacttggacacatgttgg

SEQ ID NO: 315734 - DNA, 1884 bp, Homo sapiens
gcaccatagtatgctctgagtagctttacactgcctggtactgatagtagtggctcgatttttaagagccttcaattgtagatgaacatctctgttatttatccctcattcatccatccgttcattcattcagccttcaatcaacatctcttgagtgtctattatgtacaggacatgtactgagacaaaaaggaaacataagagctttttcactctaaaaatcttggcaataatgtcaacaccagaaagcctcctctggagaatcttacagagtgattgtagtttaatacaggaacacacagggctgtgtagcatgataccaggcccaggagatcagtaattacaaattaagggttaaatcagagattattcaacagagagggagaaaggaggagacagagggaggacctgttgtgttccagccattctggtattcctttatgtatctaatttcattcaaacctcacaacagtcttgtgaggcccttatataattactcccattttgcagatgaagtaactgaggcttagaaaggttaatagcaccggggaacaatttctctgggtgagaattgggactctgttgctggtcttctcagttcatttcctgaggtggatttactgagagaaggtgaaataaagccatatttagtataccagagaaggtagattttaagaatggtctcagtgttaatactgagaaaaagtcctgtcagttcagaaaaaatgtgaagtctactttagtattcctgtaatactaaaccgttgagtttctaaatatttatttattctaacaaaaagcaattactacaaatggatgacacatttaatgaacacaattttattttttttctgtaactgtgcttgttgaatgtcaatcatatttaaagggaatgactttgaagtaaaaccttttttcttgctactgaaaaaaatggagttgttttgggtggtaaagtgttaaggaatagggacagctggtcacacaaggaactcttgaaggccacatgtgaaaacctgtcacttgcacagaggccagtcccactaaggtgaccagagtgggctccaagcacaaactgccattggctatagatgggactgtgtccccccaaaattcatgtgttggagccttaaccctcaatgtgatggtatttgagatggggcctttggtaagggaagtttagatgaggtcacgagggtaggaccctcatgatgggatgagtccccttacaagacctctggcttgggccgggcgtggtggctcacacctgtaatcccaacactttgggaggccaaggcaggtagatcacttgatgccaggagttccagaccaggctggccgacatggtgaaaccccatctctactaaaaaatataaaaattagccgggctttgtggcatgtgcctgtaatcccagctattggcaggctgaggcatgagaatcgcttgaacccaggaggtggaggttacagtgagctgagagtgccccactgcactccagcctgggtgacagagcgagactttgtcccaaaacaaaataggtgaggggatagcgaatgcactcagggtcagcagtggagtttaaaaattgtctcttttcaacttatttaaatgacagcacctgagaagaggaaccgttttacactggatgtttctcatgtagaacaagaaatctttctggaattgatgtttacatgtctgttgttggtcatctctcctgtgtcttaaatactttaatgttggaagagcatagtgtttgggctagtgggtttctgacagcccatgggaatgccctgaaactactgtatctgatgtttgttttcgatgaggttccatgttttgttttcttgggaataaattaatatattgttttccaaaaaaaaata

SEQ ID NO: 315735 - DNA, 469 bp, Homo sapiens
gaacagaccacattttgcttatccattcatccattgatggacatttgggttgacattagcatacaaaaatctgttttcttattttttttgagacagagcgagactttgtcccaaaacaaaataggtgaggggatagcgaatgcactcagggtcagcagtggagtttaaaaattgtctcttttcaacttatttaaatgacagcacctgagaagaggaaccgttttacactggatgtttctcatgtagaacaagaaatctttctggaattgatgtttacatgtctgttgttggtcatctctcctgtgtcttaaatactttaatgttggaagagcatagtgtttgggctagtgggtttctgacagcccatgggaatgccctgaaactactgtatctgatgtttgttttcgatgaggttccatgttttgttttcttgggaataaattaatatattgttttccaaaaaaaaata

SEQ ID NO: 315736 - DNA, 540 bp, Homo sapiens
aggtgttcctggctctatgccaaatgcatcctggactggaaacctcagagctataaagtggagtgacatggaagacagacacggaggctgccacggccactatgtacatggtatttgtatctatggaaacggagacttaaagtggctggttaattcaccaagcctgtttgctaacaagtttgagcttaatacctacccccttactgtggaatgcactcagggtcagcagtggagtttaaaaattgtctcttttcaacttatttaaatgacagcacctgagaagaggaaccgttttacactggatgtttctcatgtagaacaagaaatctttctggaattgatgtttacatgtctgttgttggtcatctctcctgtgtcttaaatactttaatgttggaagagcatagtgtttgggctagtgggtttctgacagcccatgggaatgccctgaaactactgtatctgatgtttgttttcgatgaggttccatgttttgttttcttgggaataaattaatatattgttttccaaaaaaaaata

SEQ ID NO: 315737 - DNA, 302 bp, Homo sapiens
attgcaggtgttcctggctctatgccaaatgcatcctggactggaaacctcagagctataaagtggagtgacatggaagacagacacggaggctgccacggtgaggctctcgttccatgcttctaggccactgcctgttggtgttagcaggaaggtagctgtggaatccagggttctcatggagagagaattgctgctatatttagaccaatctgttagttattggagaagccagaggcttcaagacacagtccttcaaaaataagtttaaacatctcattgatgttctctaacttataatt

SEQ ID NO: 315738 - DNA, 119 bp, Homo sapiens
ggctgctgtaaaatattacaggcatactttggagatgttatgggtttggttccacatcactgcaataaaatggagcctcgctctgtcgccaagactggagttcagcggcacgatctcgg

SEQ ID NO: 315739 - DNA, 517 bp, Homo sapiens
gcagaaaagaaatgcaagttaaagatgagccaaatactaactgtgagggcactaagcagcggaatacacgcgcctgctggcctctgaagaatatcaaattatcccttctgtgtatgtttaaggtcaaatatctttattaaattgcagatgtctataagtagatatagattcttaaagctgtattgcaagagctattagtggtagtttattataattataataaatgtctcctgctgaagttcagagattaggactgtatctatcacttttgggtataatgatttaatcttgttcctacagtacttcgggatgacttcagacaaaacccttcggatgtcatggttgcagtaggagagcctgcagtaatggaatgccaacctccacgaggccatcctgagcccaccatttcatggaagaaagatggctctccactggatgataaagatgaaagaataactgtgagtatttaattcaacagcagaggacatttgttggtctaactgtgtgtatctttacc

SEQ ID NO: 315740 - DNA, 455 bp, Homo sapiens
acggagcctttagattgctgaaaacagtcttatggaaggataacccattgtctgtcactggctggttgtaatgcaaggaagggacaaagatgaaatggaaacatgttccttttttggtcatgatatcactcctcagcttatccccaaatcacctgtttctggcccagcttattccagaccctgaagatgtagagagggggaacgaccacgggacgccaatccccacctctgataacgatgacaattcgctgggctatacaggtagagtgtctctttcccaaatactaacttcctcctgaaatgcctccacctccatcaaccatcaaccacctgtataaaattaatcgaatcatccctgcttccagctaacaaccacaatttctcatttttcaaacttcattctgttcatatcagatcatattgctaaagtaaacacttttaagaacagaaatgta

SEQ ID NO: 315741 - DNA, 6717 bp, Homo sapiens
acggagcctttagattgctgaaaacagtcttatggaaggataacccattgtctgtcactggctggttgtaatgcaaggaagggacaaagatgaaatggaaacatgttccttttttggtcatgatatcactcctcagcttatccccaaatcacctgtttctggcccagcttattccagaccctgaagatgtagagagggggaacgaccacgggacgccaatccccacctctgataacgatgacaattcgctgggctatacaggctcccgtcttcgtcaggaagattttccacctcgcattgttgaacacccttcagacctgattgtctcaaaaggagaacctgcaactttgaactgcaaagctgaaggccgccccacacccactattgaatggtacaaagggggagagagagtggagacagacaaagatgaccctcgctcacaccgaatgttgctgccgagtggatctttatttttcttacgtatagtacatggacggaaaagtagacctgatgaaggagtctatgtctgtgtagcaaggaattaccttggagaggctgtgagccacaatgcatcgctggaagtagccatacttcgggatgacttcagacaaaacccttcggatgtcatggttgcagtaggagagcctgcagtaatggaatgccaacctccacgaggccatcctgagcccaccatttcatggaagaaagatggctctccactggatgataaagatgaaagaataactatacgaggaggaaagctcatgatcacttacacccgtaaaagtgacgctggcaaatatgtttgtgttggtaccaatatggttggggaacgtgagagtgaagtagccgagctgactgtcttagagagaccatcatttgtgaagagacccagtaacttggcagtaactgtggatgacagtgcagaatttaaatgtgaggcccgaggtgaccctgtacctacagtacgatggaggaaagatgatggagagctgcccaaatccagatatgaaatccgagatgatcataccttgaaaattaggaaggtgacagctggtgacatgggttcatacacttgtgttgcagaaaatatggtgggcaaagctgaagcatctgctactctgactgttcaagaacctccacattttgttgtgaaaccccgtgaccaggttgttgctttgggacggactgtaacttttcagtgtgaagcaaccggaaatcctcaaccagctattttctggaggagagaagggagtcagaatctacttttctcatatcaaccaccacagtcatccagccgattttcagtctcccagactggcgacctcacaattactaatgtccagcgatctgatgttggttattacatctgccagactttaaatgttgctggaagcatcatcacaaaggcatatttggaagttacagatgtgattgcagatcggcctcccccagttattcgacaaggtcctgtgaatcagactgtagccgtggatggcactttcgtcctcagctgtgtggccacaggcagtccagtgcccaccattctgtggagaaaggatggagtcctcgtttcaacccaagactctcgaatcaaacagttggagaatggagtactgcagatccgatatgctaagctgggtgatactggtcggtacacctgcattgcatcaacccccagtggtgaagcaacatggagtgcttacattgaagttcaagaatttggagttccagttcagcctccaagacctactgacccaaatttaatccctagtgccccatcaaaacctgaagtgacagatgtcagcagaaatacagtcacattatcgtggcaaccaaatttgaattcaggagcaactccaacatcttatattatagaagccttcagccatgcatctggtagcagctggcagaccgtagcagagaatgtgaaaacagaaacatctgccattaaaggactcaaacctaatgcaatttaccttttccttgtgagggcagctaatgcatatggaattagtgatccaagccaaatatcagatccagtgaaaacacaagatgtcctaccaacaagtcagggggtggaccacaagcaggtccagagagagctgggaaatgctgttctgcacctccacaaccccaccgtcctttcttcctcttccatcgaagtgcactggacagtagatcaacagtctcagtatatacaaggatataaaattctctatcggccatctggagccaaccacggagaatcagactggttagtttttgaagtgaggacgccagccaaaaacagtgtggtaatccctgatctcagaaagggagtcaactatgaaattaaggctcgccctttttttaatgaatttcaaggagcagatagtgaaatcaagtttgccaaaaccctggaagaagcacccagtgccccaccccaaggtgtaactgtatccaagaatgatggaaacggaactgcaattctagttagttggcagccacctccagaagacactcaaaatggaatggtccaagagtataaggtttggtgtctgggcaatgaaactcgataccacatcaacaaaacagtggatggttccaccttttccgtggtcattccctttcttgttcctggaatccgatacagtgtggaagtggcagccagcactggggctgggtctggggtaaagagtgagcctcagttcatccagctggatgcccatggaaaccctgtgtcacctgaggaccaagtcagcctcgctcagcagatttcagatgtggtgaagcagccggccttcatagcaggtattggagcagcctgttggatcatcctcatggtcttcagcatctggctttatcgacaccgcaagaagagaaacggacttactagtacctacgcgggtatcagaaaagtcccgtcttttaccttcacaccaacagtaacttaccagagaggaggcgaagctgtcagcagtggagggaggcctggacttctcaacatcagtgaacctgccgcgcagccatggctggcagacacgtggcctaatactggcaacaaccacaatgactgctccatcagctgctgcacggcaggcaatggaaacagcgacagcaacctcactacctacagtcgcccagctgattgtatagcaaattataacaaccaactggataacaaacaaacaaatctgatgctccctgagtcaactgtttatggtgatgtggaccttagtaacaaaatcaatgagatgaaaaccttcaatagcccaaatctgaaggatgggcgttttgtcaatccatcagggcagcctactccttacgccaccactcagctcatccagtcaaacctcagcaacaacatgaacaatggcagcggggactctggcgagaagcactggaaaccactgggacagcagaaacaagaagtggcaccagttcagtacaacatcgtggagcaaaacaagctgaacaaagattatcgagcaaatgacacagttcctccaactatcccatacaaccaatcatacgaccagaacacaggaggatcctacaacagctcagaccggggcagtagtacatctgggagtcaggggcacaagaaaggggcaagaacacccaaggtaccaaaacagggtggcatgaactgggcagacctgcttcctcctcccccagcacatcctcctccacacagcaatagcgaagagtacaacatttctgtagatgaaagctatgaccaagaaatgccatgtcccgtgccaccagcaaggatgtatttgcaacaagatgaattagaagaggaggaagatgaacgaggccccactccccctgttcggggagcagcttcttctccagctgccgtgtcctatagccatcagtccactgccactctgactccctccccacaggaagaactccagcccatgttacaggattgtccagaggagactggccacatgcagcaccagcccgacaggagacggcagcctgtgagtcctcctccaccaccacggccgatctcccctccacatacctatggctacatttcaggacccctggtctcagatatggatacggatgcgccagaagaggaagaagacgaagccgacatggaggtagccaagatgcaaaccagaaggcttttgttacgtgggcttgagcagacacctgcctccagtgttggggacctggagagctctgtcacggggtccatgatcaacggctggggctcagcctcagaggaggacaacatttccagcggacgctccagtgttagttcttcggacggctcctttttcactgatgctgactttgcccaggcagtcgcagcagcggcagagtatgctggtctgaaagtagcacgacggcaaatgcaggatgctgctggccgtcgacattttcatgcgtctcagtgccctaggcccacaagtcccgtgtctacagacagcaacatgagtgccgccgtaatgcagaaaaccagaccagccaagaaactgaaacaccagccaggacatctgcgcagagaaacctacacagatgatcttccaccacctcctgtgccgccacctgctataaagtcacctactgcccaatccaagacacagctggaagtacgacctgtagtggtgccaaaactcccttctatggatgcaagaacagacagatcatcagacagaaaaggaagcagttacaaggggagagaagtgttggatggaagacaggttgttgacatgcgaacaaatccaggtgatcccagagaagcacaggaacagcaaaatgacgggaaaggacgtggaaacaaggcagcaaaacgagaccttccaccagcaaagactcatctcatccaagaggatattctaccttattgtagacctacttttccaacatcaaataatcccagagatcccagttcctcaagctcaatgtcatcaagaggatcaggaagcagacaaagagaacaagcaaatgtaggtcgaagaaatattgcagaaatgcaggtacttggaggatatgaaagaggagaagataataatgaagaattagaggaaactgaaagctgaagacaaccaagaggcttatgagatctaatgtgaaaatcatcactcaagatgcctcctgtcagatgacacatgacgccagataaaatgttcagtgcaatcagagtgtacaaattgtcgtttttattcctcttattgggatatcattttaaaaactttattgggtttttattgttgttgtttgatccctaaccctacaaagagccttcctattcccctcgctgttggagcaaaccattataccttacttccagcaagcaaagtgctttgacttcttgcttcagtcatcagccagcaagagggaacaaaactgttcttttgcattttgccgctgagatatggcattgcactgcttatatgccaagctaatttatagcaagatattgatcaaatatagaaagttgatattcaacctcacaagggctctcaaagtataatctttctatagccaactgctaatgcaaattaaaacatatttcattttaacatgatttcaaaatcagtttttcatactaccctttgctggaagaaactaaaaatatagcaaatgcagaaccacaaacaattcgaatggggtagaaacattgtaaatatttactctttgcaaaccctggtggtattttattttggcttcatttcaatcattgaagtatattcttattggaaatgtacttttggataagtagggctaagccagttggatctctggttgtctagtcattgtcataagtaaacctagtaaaaccttgttctatttttcaatcatcaaaaagtaattataaatacgtattacaaacaagtggatgtttttaatgaccaattgagtaagaacatccctgtcttaactggccctaaatttcttctggtagtgtcagttcaactttcagaagtgccacttaaggaagtttgatttttgtttttgtaatgcactgtttttaatctctctctcttttttttttttttttggttttaaaagcacaatcactaaactttatttgtaaaccattgtaactattaaccttttttgtcttattgaaaaaaaaaatgttgagaagcgtttttaacctgttttgttaatgctctatgtttgtatttggaatatttgaataatgacagatggtgaagtaacatgcatactttattgtgggccatgaaccaaatggttcttacttttcctggacttaaagaaaaaaagaggtttaagtttgttgtggccaatgtcgaaacctacaagatttccttaaaatctctaatagaggcattacttgctttcaattgacaaatgatgccctctgactagtagatttctatgatccttttttgtcattttatgaatatcattgattttataattggtgctatttgaagaaaaaaatgtacatttattcatagatagataagtatcaggtctgaccccagtggaaaacaaagccaaacaaaactgaaccacaaaaaaaaaggctggtgttcaccaaaaccaaacttgttcatttagataatttgaaaaagttccatagaaaaggcgtgcagtactaagggaacaatccatgtgattaatgttttcattatgttcatgtaagaagccccttatttttagccataattttgcatactgaaaatccaataatcagaaaagtaattttgtcacattatttattaaaaatgttctcaaata

SEQ ID NO: 315742 - DNA, 6742 bp, Homo sapiens
acggagcctttagattgctgaaaacagtcttatggaaggataacccattgtctgtcactggctggttgtaatgcaaggaagggacaaagatgaaatggaaacatgttccttttttggtcatgatatcactcctcagcttatccccaaatcacctgtttctggcccagcttattccagaccctgaagatgtagagagggggaacgaccacgggacgccaatccccacctctgataacgatgacaattcgctgggctatacaggctcccgtcttcgtcaggaagattttccacctcgcattgttgaacacccttcagacctgattgtctcaaaaggagaacctgcaactttgaactgcaaagctgaaggccgccccacacccactattgaatggtacaaagggggagagagagtggagacagacaaagatgaccctcgctcacaccgaatgttgctgccgagtggatctttatttttcttacgtatagtacatggacggaaaagtagacctgatgaaggagtctatgtctgtgtagcaaggaattaccttggagaggctgtgagccacaatgcatcgctggaagtagccatacttcgggatgacttcagacaaaacccttcggatgtcatggttgcagtaggagagcctgcagtaatggaatgccaacctccacgaggccatcctgagcccaccatttcatggaagaaagatggctctccactggatgataaagatgaaagaataactatacgaggaggaaagctcatgatcacttacacccgtaaaagtgacgctggcaaatatgtttgtgttggtaccaatatggttggggaacgtgagagtgaagtagccgagctgactgtcttagagagaccatcatttgtgaagagacccagtaacttggcagtaactgtggatgacagtgcagaatttaaatgtgaggcccgaggtgaccctgtacctacagtacgatggaggaaagatgatggagagctgcccaaatccagatatgaaatccgagatgatcataccttgaaaattaggaaggtgacagctggtgacatgggttcatacacttgtgttgcagaaaatatggtgggcaaagctgaagcatctgctactctgactgttcaagaacctccacattttgttgtgaaaccccgtgaccaggttgttgctttgggacggactgtaacttttcagtgtgaagcaaccggaaatcctcaaccagctattttctggaggagagaagggagtcagaatctacttttctcatatcaaccaccacagtcatccagccgattttcagtctcccagactggcgacctcacaattactaatgtccagcgatctgatgttggttattacatctgccagactttaaatgttgctggaagcatcatcacaaaggcatatttggaagttacagatgtgattgcagatcggcctcccccagttattcgacaaggtcctgtgaatcagactgtagccgtggatggcactttcgtcctcagctgtgtggccacaggcagtccagtgcccaccattctgtggagaaaggatggagtcctcgtttcaacccaagactctcgaatcaaacagttggagaatggagtactgcagatccgatatgctaagctgggtgatactggtcggtacacctgcattgcatcaacccccagtggtgaagcaacatggagtgcttacattgaagttcaagaatttggagttccagttcagcctccaagacctactgacccaaatttaatccctagtgccccatcaaaacctgaagtgacagatgtcagcagaaatacagtcacattatcgtggcaaccaaatttgaattcaggagcaactccaacatcttatattatagaagccttcagccatgcatctggtagcagctggcagaccgtagcagagaatgtgaaaacagaaacatctgccattaaaggactcaaacctaatgcaatttaccttttccttgtgagggcagctaatgcatatggaattagtgatccaagccaaatatcagatccagtgaaaacacaagatgtcctaccaacaagtcagggggtggaccacaagcaggtccagagagagctgggaaatgctgttctgcacctccacaaccccaccgtcctttcttcctcttccatcgaagtgcactggacagtagatcaacagtctcagtatatacaaggatataaaattctctatcggccatctggagccaaccacggagaatcagactggttagtttttgaagtgaggacgccagccaaaaacagtgtggtaatccctgatctcagaaagggagtcaactatgaaattaaggctcgccctttttttaatgaatttcaaggagcagatagtgaaatcaagtttgccaaaaccctggaagaagcacccagtgccccaccccaaggtgtaactgtatccaagaatgatggaaacggaactgcaattctagttagttggcagccacctccagaagacactcaaaatggaatggtccaagagtataaggtttggtgtctgggcaatgaaactcgataccacatcaacaaaacagtggatggttccaccttttccgtggtcattccctttcttgttcctggaatccgatacagtgtggaagtggcagccagcactggggctgggtctggggtaaagagtgagcctcagttcatccagctggatgcccatggaaaccctgtgtcacctgaggaccaagtcagcctcgctcagcagatttcagatgtggtgaagcagccggccttcatagcaggtattggagcagcctgttggatcatcctcatggtcttcagcatctggctttatcgacaccgcaagaagagaaacggacttactagtacctacgcgggtatcagaaaagtcccgtcttttaccttcacaccaacagtaacttaccagagaggaggcgaagctgtcagcagtggagggaggcctggacttctcaacatcagtgaacctgccgcgcagccatggctggcagacacgtggcctaatactggcaacaaccacaatgactgctccatcagctgctgcacggcaggcaatggaaacagcgacagcaacctcactacctacagtcgcccagctgattgtatagcaaattataacaaccaactggataacaaacaaacaaatctgatgctccctgagtcaactgtttatggtgatgtggaccttagtaacaaaatcaatgagatgaaaaccttcaatagcccaaatctgaaggatgggcgttttgtcaatccatcagggcagcctactccttacgccaccactcagctcatccagtcaaacctcagcaacaacatgaacaatggcagcggggactctggcgagaagcactggaaaccactgggacagcagaaacaagaagtggcaccagttcagtacaacatcgtggagcaaaacaagctgaacaaagattatcgagcaaatgacacagttcctccaactatcccatacaaccaatcatacgaccagaacacaggaggatcctacaacagctcagaccggggcagtagtacatctgggagtcaggggcacaagaaaggggcaagaacacccaaggtaccaaaacagggtggcatgaactgggcagacctgcttcctcctcccccagcacatcctcctccacacagcaatagcgaagagtacaacatttctgtagatgaaagctatgaccaagaaatgccatgtcccgtgccaccagcaaggatgtatttgcaacaagatgaattagaagaggaggaagatgaacgaggccccactccccctgttcggggagcagcttcttctccagctgccgtgtcctatagccatcagtccactgccactctgactccctccccacaggaagaactccagcccatgttacaggattgtccagaggagactggccacatgcagcaccagcccgacaggagacggcagcctgtgagtcctcctccaccaccacggccgatctcccctccacatacctatggctacatttcaggacccctggtctcagatatggatacggatgcgccagaagaggaagaagacgaagccgacatggaggtagccaagatgcaaaccagaaggcttttgttacgtgggcttgagcagacacctgcctccagtgttggggacctggagagctctgtcacggggtccatgatcaacggctggggctcagcctcagaggaggacaacatttccagcggacgctccagtgttagttcttcggacggctcctttttcactgatgctgactttgcccaggcagtcgcagcagcggcagagtatgctggtctgaaagtagcacgacggcaaatgcaggatgctgctggccgtcgacattttcatgcgtctcagtgccctaggcccacaagtcccgtgtctacagacagcaacatgagtgccgccgtaatgcagaaaaccagaccagccaagaaactgaaacaccagccaggacatctgcgcagagaaacctacacagatgatcttccaccacctcctgtgccgccacctgctataaagtcacctactgcccaatccaagacacagctggaagtacgacctgtagtggtgccaaaactcccttctatggatgcaagaacagacagatcatcagacagaaaaggaagcagttacaaggggagagaagtgttggatggaagacaggttgttgacatgcgaacaaatccaggtgatcccagagaagcacaggaacagcaaaatgacgggaaaggacgtggaaacaaggcagcaaaacgagaccttccaccagcaaagactcatctcatccaagaggatattctaccttattgtagacctacttttccaacatcaaataatcccagagatcccagttcctcaagctcaatgtcatcaagaggatcaggaagcagacaaagagaacaagcaaatgtaggtcgaagaaatattgcagaaatgcaggtacttggaggatatgaaagaggagaagataataatgaagaattagaggaaactgaaagctgaagacaaccaagaggcttatgagatctaatgtgaaaatcatcactcaagatgcctcctgtcagatgacacatgacgccagataaaatgttcagtgcaatcagagtgtacaaattgtcgtttttattcctcttattgggatatcattttaaaaactttattgggtttttattgttgttgtttgatccctaaccctacaaagagccttcctattcccctcgctgttggagcaaaccattataccttacttccagcaagcaaagtgctttgacttcttgcttcagtcatcagccagcaagagggaacaaaactgttcttttgcattttgccgctgagatatggcattgcactgcttatatgccaagctaatttatagcaagatattgatcaaatatagaaagttgatattcaacctcacaagggctctcaaagtataatctttctatagccaactgctaatgcaaattaaaacatatttcattttaacatgatttcaaaatcagtttttcatactaccctttgctggaagaaactaaaaatatagcaaatgcagaaccacaaacaattcgaatggggtagaaacattgtaaatatttactctttgcaaaccctggtggtattttattttggcttcatttcaatcattgaagtatattcttattggaaatgtacttttggataagtagggctaagccagttggatctctggttgtctagtcattgtcataagtaaacctagtaaaaccttgttctatttttcaatcatcaaaaagtaattataaatacgtattacaaacaagtggatgtttttaatgaccaattgagtaagaacatccctgtcttaactggccctaaatttcttctggtagtgtcagttcaactttcagaagtgccacttaaggaagtttgatttttgtttttgtaatgcactgtttttaatctctctctcttttttttttttttttggttttaaaagcacaatcactaaactttatttgtaaaccattgtaactattaaccttttttgtcttattgaaaaaaaaaatgttgagaagcgtttttaacctgttttgttaatgctctatgtttgtatttggaatatttgaataatgacagatggtgaagtaacatgcatactttattgtgggccatgaaccaaatggttcttacttttcctggacttaaagaaaaaaagaggtttaagtttgttgtggccaatgtcgaaacctacaagatttccttaaaatctctaatagaggcattacttgctttcaattgacaaatgatgccctctgactagtagatttctatgatccttttttgtcattttatgaatatcattgattttataattggtgctatttgaagaaaaaaatgtacatttattcatagatagataagtatcaggtctgaccccagtggaaaacaaagccaaacaaaactgaaccacaaaaaaaaaggctggtgttcaccaaaaccaaacttgttcatttagataatttgaaaaagttccatagaaaaggcgtgcagtactaagggaacaatccatgtgattaatgttttcattatgttcatgtaagaagccccttatttttagccataattttgcatactgaaaatccaataatcagaaaagtaattttgtcacattatttattaaaaatgttctcaaataaaaaaaagtcgacgcggccgcgaat

SEQ ID NO: 315743 - DNA, 6183 bp, Homo sapiens
acggagcctttagattgctgaaaacagtcttatggaaggataacccattgtctgtcactggctggttgtaatgcaaggaagggacaaagatgaaatggaaacatgttccttttttggtcatgatatcactcctcagcttatccccaaatcacctgtttctggcccagcttattccagaccctgaagatgtagagagggggaacgaccacgggacgccaatccccacctctgataacgatgacaattcgctgggctatacaggctcccgtcttcgtcaggaagattttccacctcgcattgttgaacacccttcagacctgattgtctcaaaaggagaacctgcaactttgaactgcaaagctgaaggccgccccacacccactattgaatggtacaaagggggagagagagtggagacagacaaagatgaccctcgctcacaccgaatgttgctgccgagtggatctttatttttcttacgtatagtacatggacggaaaagtagacctgatgaaggagtctatgtctgtgtagcaaggaattaccttggagaggctgtgagccacaatgcatcgctggaagtagccatacttcgggatgacttcagacaaaacccttcggatgtcatggttgcagtaggagagcctgcagtaatggaatgccaacctccacgaggccatcctgagcccaccatttcatggaagaaagatggctctccactggatgataaagatgaaagaataactatacgaggaggaaagctcatgatcacttacacccgtaaaagtgacgctggcaaatatgtttgtgttggtaccaatatggttggggaacgtgagagtgaagtagccgagctgactgtcttagagagaccatcatttgtgaagagacccagtaacttggcagtaactgtggatgacagtgcagaatttaaatgtgaggcccgaggtgaccctgtacctacagtacgatggaggaaagatgatggagagctgcccaaatccagatatgaaatccgagatgatcataccttgaaaattaggaaggtgacagctggtgacatgggttcatacacttgtgttgcagaaaatatggtgggcaaagctgaagcatctgctactctgactgttcaagaacctccacattttgttgtgaaaccccgtgaccaggttgttgctttgggacggactgtaacttttcagtgtgaagcaaccggaaatcctcaaccagctattttctggaggagagaagggagtcagaatctacttttctcatatcaaccaccacagtcatccagccgattttcagtctcccagactggcgacctcacaattactaatgtccagcgatctgatgttggttattacatctgccagactttaaatgttgctggaagcatcatcacaaaggcatatttggaagttacagatgtgattgcagatcggcctcccccagttattcgacaaggtcctgtgaatcagactgtagccgtggatggcactttcgtcctcagctgtgtggccacaggcagtccagtgcccaccattctgtggagaaaggatggagtcctcgtttcaacccaagactctcgaatcaaacagttggagaatggagtactgcagatccgatatgctaagctgggtgatactggtcggtacacctgcattgcatcaacccccagtggtgaagcaacatggagtgcttacattgaagttcaagaatttggagttccagttcagcctccaagacctactgacccaaatttaatccctagtgccccatcaaaacctgaagtgacagatgtcagcagaaatacagtcacattatcgtggcaaccaaatttgaattcaggagcaactccaacatcttatattatagaagccttcagccatgcatctggtagcagctggcagaccgtagcagagaatgtgaaaacagaaacatctgccattaaaggactcaaacctaatgcaatttaccttttccttgtgagggcagctaatgcatatggaattagtgatccaagccaaatatcagatccagtgaaaacacaagatgtcctaccaacaagtcagggggtggaccacaagcaggtccagagagagctgggaaatgctgttctgcacctccacaaccccaccgtcctttcttcctcttccatcgaagtgcactggacagtagatcaacagtctcagtatatacaaggatataaaattctctatcggccatctggagccaaccacggagaatcagactggttagtttttgaagtgaggacgccagccaaaaacagtgtggtaatccctgatctcagaaagggagtcaactatgaaattaaggctcgccctttttttaatgaatttcaaggagcagatagtgaaatcaagtttgccaaaaccctggaagaagcacccagtgccccaccccaaggtgtaactgtatccaagaatgatggaaacggaactgcaattctagttagttggcagccacctccagaagacactcaaaatggaatggtccaagagtataaggtttggtgtctgggcaatgaaactcgataccacatcaacaaaacagtggatggttccaccttttccgtggtcattccctttcttgttcctggaatccgatacagtgtggaagtggcagccagcactggggctgggtctggggtaaagagtgagcctcagttcatccagctggatgcccatggaaaccctgtgtcacctgaggaccaagtcagcctcgctcagcagatttcagatgtggtgaagcagccggccttcatagcaggtattggagcagcctgttggatcatcctcatggtcttcagcatctggctttatcgacaccgcaagaagagaaacggacttactagtacctacgcgggtatcagaaaagtcccgtcttttaccttcacaccaacagtaacttaccagagaggaggcgaagctgtcagcagtggagggaggcctggacttctcaacatcagtgaacctgccgcgcagccatggctggcagacacgtggcctaatactggcaacaaccacaatgactgctccatcagctgctgcacggcaggcaatggaaacagcgacagcaacctcactacctacagtcgcccagctgattgtatagcaaattataacaaccaactggataacaaacaaacaaatctgatgctccctgagtcaactgtttatggtgatgtggaccttagtaacaaaatcaatgagatgaaaaccttcaatagcccaaatctgaaggatgggcgttttgtcaatccatcagggcagcctactccttacgccaccactcagctcatccagtcaaacctcagcaacaacatgaacaatggcagcggggactctggcgagaagcactggaaaccactgggacagcagaaacaagaagtggcaccagttcagtacaacatcgtggagcaaaacaagctgaacaaagattatcgagcaaatgacacagttcctccaactatcccatacaaccaatcatacgaccagaacacaggaggatcctacaacagctcagaccggggcagtagtacatctgggagtcaggggcacaagaaaggggcaagaacacccaaggtaccaaaacagggtggcatgaactgggcagacctgcttcctcctcccccagcacatcctcctccacacagcaatagcgaagagtacaacatttctgtagatgaaagctatgaccaagaaatgccatgtcccgtgccaccagcaaggatgtatttgcaacaagatgaattagaagaggaggaagatgaacgaggccccactccccctgttcggggagcagcttcttctccagctgccgtgtcctatagccatcagtccactgccactctgactccctccccacaggaagaactccagcccatgttacaggattgtccagaggagactggccacatgcagcaccagcccgacaggagacggcagcctgtgagtcctcctccaccaccacggccgatctcccctccacatacctatggctacatttcaggacccctggtctcagatatggatacggatgcgccagaagaggaagaagacgaagccgacatggaggtagccaagatgcaaaccagaaggcttttgttacgtgggcttgagcagacacctgcctccagtgttggggacctggagagctctgtcacggggtccatgatcaacggctggggctcagcctcagaggaggacaacatttccagcggacgctccagtgttagttcttcggacggctcctttttcactgatgctgactttgcccaggcagtcgcagcagcggcagagtatgctggtctgaaagtagcacgacggcaaatgcaggatgctgctggccgtcgacattttcatgcgtctcagtgccctaggcccacaagtcccgtgtctacagacagcaacatgagtgccgccgtaatgcagaaaaccagaccagccaagaaactgaaacaccagccaggacatctgcgcagagaaacctacacagatgatcttccaccacctcctgtgccgccacctgctataaagtcacctactgcccaatccaagacacagctggaagtacgacctgtagtggtgccaaaactcccttctatggatgcaagaacagacagatcatcagacagaaaaggaagcagttacaaggggagagaagtgttggatggaagacaggttgttgacatgcgaacaaatccaggtgatcccagagaagcacaggaacagcaaaatgacgggaaaggacgtggaaacaaggcagcaaaacgagaccttccaccagcaaagactcatctcatccaagaggatattctaccttattgtagacctacttttccaacatcaaataatcccagagatcccagttcctcaagctcaatgtcatcaagaggatcaggaagcagacaaagagaacaagcaaatgtaggtcgaagaaatattgcagaaatgcaggtacttggaggatatgaaagaggagaagataataatgaagaattagaggaaactgaaagctgaagacaaccaagaggcttatgagatctaatgtgaaaatcatcactcaagatgcctcctgtcagatgacacatgacgccagataaaatgttcagtgcaatcagagtgtacaaattgtcgtttttattcctcttattgggatatcattttaaaaactttattgggtttttattgttgttgtttgatccctaaccctacaaagagccttcctattcccctcgctgttggagcaaaccattataccttacttccagcaagcaaagtgctttgacttcttgcttcagtcatcagccagcaagagggaacaaaactgttcttttgcattttgccgctgagatatggcattgcactgcttatatgccaagctaatttatagcaagatattgatcaaatatagaaagttgatattcaacctcacaagggctctcaaagtataatctttctatagccaactgctaatgcaaattaaaacatatttcattttaacatgatttcaaaatcagtttttcatactaccctttgctggaagaaactaaaaatatagcaaatgcagaaccacaaacaattcgaatggggtagaaacattgtaaatatttatgaagtatattcttattggaaatgtacttttggataagtagggctaagccagttggatctctggttgtctagtcattgtcataagtaaacctagtaaaaccttgttctatttttcaatcatcaaaaagtaattataaatacgtattacaaacaagtggatgtttttaatgaccaattgagtaagaacatccctgtcttaactggccctaaatttcttctggtagtgtcagttcaactttcagaagtgccacttaaggaagtttgatttttgtttttgtaatgcactgtttttaatctctctctcttttttttttttttttggttttaaaagcacaatcactaaactttatttgtaaaccattgtaactattaaccttttttgtcttattgaaaaaaaaaatgttgagaagcgtttttaacctgttttgttaatgctctatgtttgtatttggaatatttgaataatgacagatggtgaagtaacatgcatactttattgtgggccatgaacgggtcttatttttctgacttgagcatcttgttt

SEQ ID NO: 315744 - DNA, 6818 bp, Homo sapiens
cactactgcgcttctgcctcggctctttgttgttcgctttggatggttcttgaaagtgtctgagcctcctcggaaatcctggggccggagaagacaaaccttggaattcttcctctgcaaaagtctctgagatactgacaagcgtccggaaaggtcgacgagtaattgccctgaaaactcttggctaattgacccacgttgcttatattaagcctttgtgtgtggtgtgtggcttcatacatttggggaccctatttccactccctcctcttggcatgagactgtatacaggatccacccgaggacaatgattgcggagcccgctcacttttacctgtttggattaatatgtctctgttcaggctcccgtcttcgtcaggaagattttccacctcgcattgttgaacacccttcagacctgattgtctcaaaaggagaacctgcaactttgaactgcaaagctgaaggccgccccacacccactattgaatggtacaaagggggagagagagtggagacagacaaagatgaccctcgctcacaccgaatgttgctgccgagtggatctttatttttcttacgtatagtacatggacggaaaagtagacctgatgaaggagtctatgtctgtgtagcaaggaattaccttggagaggctgtgagccacaatgcatcgctggaagtagccatacttcgggatgacttcagacaaaacccttcggatgtcatggttgcagtaggagagcctgcagtaatggaatgccaacctccacgaggccatcctgagcccaccatttcatggaagaaagatggctctccactggatgataaagatgaaagaataactatacgaggaggaaagctcatgatcacttacacccgtaaaagtgacgctggcaaatatgtttgtgttggtaccaatatggttggggaacgtgagagtgaagtagccgagctgactgtcttagagagaccatcatttgtgaagagacccagtaacttggcagtaactgtggatgacagtgcagaatttaaatgtgaggcccgaggtgaccctgtacctacagtacgatggaggaaagatgatggagagctgcccaaatccagatatgaaatccgagatgatcataccttgaaaattaggaaggtgacagctggtgacatgggttcatacacttgtgttgcagaaaatatggtgggcaaagctgaagcatctgctactctgactgttcaagaacctccacattttgttgtgaaaccccgtgaccaggttgttgctttgggacggactgtaacttttcagtgtgaagcaaccggaaatcctcaaccagctattttctggaggagagaagggagtcagaatctacttttctcatatcaaccaccacagtcatccagccgattttcagtctcccagactggcgacctcacaattactaatgtccagcgatctgatgttggttattacatctgccagactttaaatgttgctggaagcatcatcacaaaggcatatttggaagttacagatgtgattgcagatcggcctcccccagttattcgacaaggtcctgtgaatcagactgtagccgtggatggcactttcgtcctcagctgtgtggccacaggcagtccagtgcccaccattctgtggagaaaggatggagtcctcgtttcaacccaagactctcgaatcaaacagttggagaatggagtactgcagatccgatatgctaagctgggtgatactggtcggtacacctgcattgcatcaacccccagtggtgaagcaacatggagtgcttacattgaagttcaagaatttggagttccagttcagcctccaagacctactgacccaaatttaatccctagtgccccatcaaaacctgaagtgacagatgtcagcagaaatacagtcacattatcgtggcaaccaaatttgaattcaggagcaactccaacatcttatattatagaagccttcagccatgcatctggtagcagctggcagaccgtagcagagaatgtgaaaacagaaacatctgccattaaaggactcaaacctaatgcaatttaccttttccttgtgagggcagctaatgcatatggaattagtgatccaagccaaatatcagatccagtgaaaacacaagatgtcctaccaacaagtcagggggtggaccacaagcaggtccagagagagctgggaaatgctgttctgcacctccacaaccccaccgtcctttcttcctcttccatcgaagtgcactggacagtagatcaacagtctcagtatatacaaggatataaaattctctatcggccatctggagccaaccacggagaatcagactggttagtttttgaagtgaggacgccagccaaaaacagtgtggtaatccctgatctcagaaagggagtcaactatgaaattaaggctcgccctttttttaatgaatttcaaggagcagatagtgaaatcaagtttgccaaaaccctggaagaagcacccagtgccccaccccaaggtgtaactgtatccaagaatgatggaaacggaactgcaattctagttagttggcagccacctccagaagacactcaaaatggaatggtccaagagtataaggtttggtgtctgggcaatgaaactcgataccacatcaacaaaacagtggatggttccaccttttccgtggtcattccctttcttgttcctggaatccgatacagtgtggaagtggcagccagcactggggctgggtctggggtaaagagtgagcctcagttcatccagctggatgcccatggaaaccctgtgtcacctgaggaccaagtcagcctcgctcagcagatttcagatgtggtgaagcagccggccttcatagcaggtattggagcagcctgttggatcatcctcatggtcttcagcatctggctttatcgacaccgcaagaagagaaacggacttactagtacctacgcgggtatcagaaaagtcccgtcttttaccttcacaccaacagtaacttaccagagaggaggcgaagctgtcagcagtggagggaggcctggacttctcaacatcagtgaacctgccgcgcagccatggctggcagacacgtggcctaatactggcaacaaccacaatgactgctccatcagctgctgcacggcaggcaatggaaacagcgacagcaacctcactacctacagtcgcccagctgattgtatagcaaattataacaaccaactggataacaaacaaacaaatctgatgctccctgagtcaactgtttatggtgatgtggaccttagtaacaaaatcaatgagatgaaaaccttcaatagcccaaatctgaaggatgggcgttttgtcaatccatcagggcagcctactccttacgccaccactcagctcatccagtcaaacctcagcaacaacatgaacaatggcagcggggactctggcgagaagcactggaaaccactgggacagcagaaacaagaagtggcaccagttcagtacaacatcgtggagcaaaacaagctgaacaaagattatcgagcaaatgacacagttcctccaactatcccatacaaccaatcatacgaccagaacacaggaggatcctacaacagctcagaccggggcagtagtacatctgggagtcaggggcacaagaaaggggcaagaacacccaaggtaccaaaacagggtggcatgaactgggcagacctgcttcctcctcccccagcacatcctcctccacacagcaatagcgaagagtacaacatttctgtagatgaaagctatgaccaagaaatgccatgtcccgtgccaccagcaaggatgtatttgcaacaagatgaattagaagaggaggaagatgaacgaggccccactccccctgttcggggagcagcttcttctccagctgccgtgtcctatagccatcagtccactgccactctgactccctccccacaggaagaactccagcccatgttacaggattgtccagaggagactggccacatgcagcaccagcccgacaggagacggcagcctgtgagtcctcctccaccaccacggccgatctcccctccacatacctatggctacatttcaggacccctggtctcagatatggatacggatgcgccagaagaggaagaagacgaagccgacatggaggtagccaagatgcaaaccagaaggcttttgttacgtgggcttgagcagacacctgcctccagtgttggggacctggagagctctgtcacggggtccatgatcaacggctggggctcagcctcagaggaggacaacatttccagcggacgctccagtgttagttcttcggacggctcctttttcactgatgctgactttgcccaggcagtcgcagcagcggcagagtatgctggtctgaaagtagcacgacggcaaatgcaggatgctgctggccgtcgacattttcatgcgtctcagtgccctaggcccacaagtcccgtgtctacagacagcaacatgagtgccgccgtaatgcagaaaaccagaccagccaagaaactgaaacaccagccaggacatctgcgcagagaaacctacacagatgatcttccaccacctcctgtgccgccacctgctataaagtcacctactgcccaatccaagacacagctggaagtacgacctgtagtggtgccaaaactcccttctatggatgcaagaacagacagatcatcagacagaaaaggaagcagttacaaggggagagaagtgttggatggaagacaggttgttgacatgcgaacaaatccaggtgatcccagagaagcacaggaacagcaaaatgacgggaaaggacgtggaaacaaggcagcaaaacgagaccttccaccagcaaagactcatctcatccaagaggatattctaccttattgtagacctacttttccaacatcaaataatcccagagatcccagttcctcaagctcaatgtcatcaagaggatcaggaagcagacaaagagaacaagcaaatgtaggtcgaagaaatattgcagaaatgcaggtacttggaggatatgaaagaggagaagataataatgaagaattagaggaaactgaaagctgaagacaaccaagaggcttatgagatctaatgtgaaaatcatcactcaagatgcctcctgtcagatgacacatgacgccagataaaatgttcagtgcaatcagagtgtacaaattgtcgtttttattcctcttattgggatatcattttaaaaactttattgggtttttattgttgttgtttgatccctaaccctacaaagagccttcctattcccctcgctgttggagcaaaccattataccttacttccagcaagcaaagtgctttgacttcttgcttcagtcatcagccagcaagagggaacaaaactgttcttttgcattttgccgctgagatatggcattgcactgcttatatgccaagctaatttatagcaagatattgatcaaatatagaaagttgatattcaacctcacaagggctctcaaagtataatctttctatagccaactgctaatgcaaattaaaacatatttcattttaacatgatttcaaaatcagtttttcatactaccctttgctggaagaaactaaaaatatagcaaatgcagaaccacaaacaattcgaatggggtagaaacattgtaaatatttactctttgcaaaccctggtggtattttattttggcttcatttcaatcattgaagtatattcttattggaaatgtacttttggataagtagggctaagccagttggatctctggttgtctagtcattgtcataagtaaacctagtaaaaccttgttctatttttcaatcatcaaaaagtaattataaatacgtattacaaacaagtggatgtttttaatgaccaattgagtaagaacatccctgtcttaactggccctaaatttcttctggtagtgtcagttcaactttcagaagtgccacttaaggaagtttgatttttgtttttgtaatgcactgtttttaatctctctctcttttttttttttttttggttttaaaagcacaatcactaaactttatttgtaaaccattgtaactattaaccttttttgtcttattgaaaaaaaaaatgttgagaagcgtttttaacctgttttgttaatgctctatgtttgtatttggaatatttgaataatgacagatggtgaagtaacatgcatactttattgtgggccatgaaccaaatggttcttacttttcctggacttaaagaaaaaaagaggtttaagtttgttgtggccaatgtcgaaacctacaagatttccttaaaatctctaatagaggcattacttgctttcaattgacaaatgatgccctctgactagtagatttctatgatccttttttgtcattttatgaatatcattgattttataattggtgctatttgaagaaaaaaatgtacatttattcatagatagataagtatcaggtctgaccccagtggaaaacaaagccaaacaaaactgaaccacaaaaaaaaaggctggtgttcaccaaaaccaaacttgttcatttagataatttgaaaaagttccatagaaaaggcgtgcagtactaagggaacaatccatgtgattaatgttttcattatgttcatgtaagaagccccttatttttagccataattttgcatactgaaaatccaataatcagaaaagtaattttgtcacattatttattaaaaatgttctcaaata

SEQ ID NO: 315745 - DNA, 6614 bp, Homo sapiens
  misc_feature (1)..(1): n is a, c, g, or t
  misc_feature (24)..(24): n is a, c, g, or t
nggaatctccaggttcccccgcanatttccttccactcgggtggaccctatttccactccctcctcttggcatgagactgtatacaggatccacccgaggacaatgattgcggagcccgctcacttttacctgtttggattaatatgtctctgttcaggctcccgtcttcgtcaggaagattttccacctcgcattgttgaacacccttcagacctgattgtctcaaaaggagaacctgcaactttgaactgcaaagctgaaggccgccccacacccactattgaatggtacaaagggggagagagagtggagacagacaaagatgaccctcgctcacaccgaatgttgctgccgagtggatctttatttttcttacgtatagtacatggacggaaaagtagacctgatgaaggagtctatgtctgtgtagcaaggaattaccttggagaggctgtgagccacaatgcatcgctggaagtagccatacttcgggatgacttcagacaaaacccttcggatgtcatggttgcagtaggagagcctgcagtaatggaatgccaacctccacgaggccatcctgagcccaccatttcatggaagaaagatggctctccactggatgataaagatgaaagaataactatacgaggaggaaagctcatgatcacttacacccgtaaaagtgacgctggcaaatatgtttgtgttggtaccaatatggttggggaacgtgagagtgaagtagccgagctgactgtcttagagagaccatcatttgtgaagagacccagtaacttggcagtaactgtggatgacagtgcagaatttaaatgtgaggcccgaggtgaccctgtacctacagtacgatggaggaaagatgatggagagctgcccaaatccagatatgaaatccgagatgatcataccttgaaaattaggaaggtgacagctggtgacatgggttcatacacttgtgttgcagaaaatatggtgggcaaagctgaagcatctgctactctgactgttcaagaacctccacattttgttgtgaaaccccgtgaccaggttgttgctttgggacggactgtaacttttcagtgtgaagcaaccggaaatcctcaaccagctattttctggaggagagaagggagtcagaatctacttttctcatatcaaccaccacagtcatccagccgattttcagtctcccagactggcgacctcacaattactaatgtccagcgatctgatgttggttattacatctgccagactttaaatgttgctggaagcatcatcacaaaggcatatttggaagttacagatgtgattgcagatcggcctcccccagttattcgacaaggtcctgtgaatcagactgtagccgtggatggcactttcgtcctcagctgtgtggccacaggcagtccagtgcccaccattctgtggagaaaggatggagtcctcgtttcaacccaagactctcgaatcaaacagttggagaatggagtactgcagatccgatatgctaagctgggtgatactggtcggtacacctgcattgcatcaacccccagtggtgaagcaacatggagtgcttacattgaagttcaagaatttggagttccagttcagcctccaagacctactgacccaaatttaatccctagtgccccatcaaaacctgaagtgacagatgtcagcagaaatacagtcacattatcgtggcaaccaaatttgaattcaggagcaactccaacatcttatattatagaagccttcagccatgcatctggtagcagctggcagaccgtagcagagaatgtgaaaacagaaacatctgccattaaaggactcaaacctaatgcaatttaccttttccttgtgagggcagctaatgcatatggaattagtgatccaagccaaatatcagatccagtgaaaacacaagatgtcctaccaacaagtcagggggtggaccacaagcaggtccagagagagctgggaaatgctgttctgcacctccacaaccccaccgtcctttcttcctcttccatcgaagtgcactggacagtagatcaacagtctcagtatatacaaggatataaaattctctatcggccatctggagccaaccacggagaatcagactggttagtttttgaagtgaggacgccagccaaaaacagtgtggtaatccctgatctcagaaagggagtcaactatgaaattaaggctcgccctttttttaatgaatttcaaggagcagatagtgaaatcaagtttgccaaaaccctggaagaagcacccagtgccccaccccaaggtgtaactgtatccaagaatgatggaaacggaactgcaattctagttagttggcagccacctccagaagacactcaaaatggaatggtccaagagtataaggtttggtgtctgggcaatgaaactcgataccacatcaacaaaacagtggatggttccaccttttccgtggtcattccctttcttgttcctggaatccgatacagtgtggaagtggcagccagcactggggctgggtctggggtaaagagtgagcctcagttcatccagctggatgcccatggaaaccctgtgtcacctgaggaccaagtcagcctcgctcagcagatttcagatgtggtgaagcagccggccttcatagcaggtattggagcagcctgttggatcatcctcatggtcttcagcatctggctttatcgacaccgcaagaagagaaacggacttactagtacctacgcgggtatcagaaaagtcccgtcttttaccttcacaccaacagtaacttaccagagaggaggcgaagctgtcagcagtggagggaggcctggacttctcaacatcagtgaacctgccgcgcagccatggctggcagacacgtggcctaatactggcaacaaccacaatgactgctccatcagctgctgcacggcaggcaatggaaacagcgacagcaacctcactacctacagtcgcccagctgattgtatagcaaattataacaaccaactggataacaaacaaacaaatctgatgctccctgagtcaactgtttatggtgatgtggaccttagtaacaaaatcaatgagatgaaaaccttcaatagcccaaatctgaaggatgggcgttttgtcaatccatcagggcagcctactccttacgccaccactcagctcatccagtcaaacctcagcaacaacatgaacaatggcagcggggactctggcgagaagcactggaaaccactgggacagcagaaacaagaagtggcaccagttcagtacaacatcgtggagcaaaacaagctgaacaaagattatcgagcaaatgacacagttcctccaactatcccatacaaccaatcatacgaccagaacacaggaggatcctacaacagctcagaccggggcagtagtacatctgggagtcaggggcacaagaaaggggcaagaacacccaaggtaccaaaacagggtggcatgaactgggcagacctgcttcctcctcccccagcacatcctcctccacacagcaatagcgaagagtacaacatttctgtagatgaaagctatgaccaagaaatgccatgtcccgtgccaccagcaaggatgtatttgcaacaagatgaattagaagaggaggaagatgaacgaggccccactccccctgttcggggagcagcttcttctccagctgccgtgtcctatagccatcagtccactgccactctgactccctccccacaggaagaactccagcccatgttacaggattgtccagaggagactggccacatgcagcaccagcccgacaggagacggcagcctgtgagtcctcctccaccaccacggccgatctcccctccacatacctatggctacatttcaggacccctggtctcagatatggatacggatgcgccagaagaggaagaagacgaagccgacatggaggtagccaagatgcaaaccagaaggcttttgttacgtgggcttgagcagacacctgcctccagtgttggggacctggagagctctgtcacggggtccatgatcaacggctggggctcagcctcagaggaggacaacatttccagcggacgctccagtgttagttcttcggacggctcctttttcactgatgctgactttgcccaggcagtcgcagcagcggcagagtatgctggtctgaaagtagcacgacggcaaatgcaggatgctgctggccgtcgacattttcatgcgtctcagtgccctaggcccacaagtcccgtgtctacagacagcaacatgagtgccgccgtaatgcagaaaaccagaccagccaagaaactgaaacaccagccaggacatctgcgcagagaaacctacacagatgatcttccaccacctcctgtgccgccacctgctataaagtcacctactgcccaatccaagacacagctggaagtacgacctgtagtggtgccaaaactcccttctatggatgcaagaacagacagatcatcagacagaaaaggaagcagttacaaggggagagaagtgttggatggaagacaggttgttgacatgcgaacaaatccaggtgatcccagagaagcacaggaacagcaaaatgacgggaaaggacgtggaaacaaggcagcaaaacgagaccttccaccagcaaagactcatctcatccaagaggatattctaccttattgtagacctacttttccaacatcaaataatcccagagatcccagttcctcaagctcaatgtcatcaagaggatcaggaagcagacaaagagaacaagcaaatgtaggtcgaagaaatattgcagaaatgcaggtacttggaggatatgaaagaggagaagataataatgaagaattagaggaaactgaaagctgaagacaaccaagaggcttatgagatctaatgtgaaaatcatcactcaagatgcctcctgtcagatgacacatgacgccagataaaatgttcagtgcaatcagagtgtacaaattgtcgtttttattcctcttattgggatatcattttaaaaactttattgggtttttattgttgttgtttgatccctaaccctacaaagagccttcctattcccctcgctgttggagcaaaccattataccttacttccagcaagcaaagtgctttgacttcttgcttcagtcatcagccagcaagagggaacaaaactgttcttttgcattttgccgctgagatatggcattgcactgcttatatgccaagctaatttatagcaagatattgatcaaatatagaaagttgatattcaacctcacaagggctctcaaagtataatctttctatagccaactgctaatgcaaattaaaacatatttcattttaacatgatttcaaaatcagtttttcatactaccctttgctggaagaaactaaaaatatagcaaatgcagaaccacaaacaattcgaatggggtagaaacattgtaaatatttactctttgcaaaccctggtggtattttattttggcttcatttcaatcattgaagtatattcttattggaaatgtacttttggataagtagggctaagccagttggatctctggttgtctagtcattgtcataagtaaacctagtaaaaccttgttctatttttcaatcatcaaaaagtaattataaatacgtattacaaacaagtggatgtttttaatgaccaattgagtaagaacatccctgtcttaactggccctaaatttcttctggtagtgtcagttcaactttcagaagtgccacttaaggaagtttgatttttgtttttgtaatgcactgtttttaatctctctctcttttttttttttttttggttttaaaagcacaatcactaaactttatttgtaaaccattgtaactattaaccttttttgtcttattgaaaaaaaaaatgttgagaagcgtttttaacctgttttgttaatgctctatgtttgtatttggaatatttgaataatgacagatggtgaagtaacatgcatactttattgtgggccatgaaccaaatggttcttacttttcctggacttaaagaaaaaaagaggtttaagtttgttgtggccaatgtcgaaacctacaagatttccttaaaatctctaatagaggcattacttgctttcaattgacaaatgatgccctctgactagtagatttctatgatccttttttgtcattttatgaatatcattgattttataattggtgctatttgaagaaaaaaatgtacatttattcatagatagataagtatcaggtctgaccccagtggaaaacaaagccaaacaaaactgaaccacaaaaaaaaaggctggtgttcaccaaaaccaaacttgttcatttagataatttgaaaaagttccatagaaaaggcgtgcagtactaagggaacaatccatgtgattaatgttttcattatgttcatgtaagaagccccttatttttagccataattttgcatactgaaaatccaataatcagaaaagtaattttgtcacattatttattaaaaatgttctcaaata

SEQ ID NO: 315746 - DNA, 6621 bp, Homo sapiens
cactactgcgcttctgcctcggctctttgttgttcgctttggatggttcttgaaagtgtctgagcctcctcggaaatcctggggccggagaagacaaaccttggaattcttcctctgcaaaagtctctgagatactgacaagcgtccggaaaggtcgacgagtaattgccctgaaaactcttggctaattgacccacgttgcttatattaagcctttgtgtgtggtgtgtggcttcatacatttggggaccctatttccactccctcctcttggcatgagactgtatacaggatccacccgaggacaatgattgcggagcccgctcacttttacctgtttggattaatatgtctctgttcaggctcccgtcttcgtcaggaagattttccacctcgcattgttgaacacccttcagacctgattgtctcaaaaggagaacctgcaactttgaactgcaaagctgaaggccgccccacacccactattgaatggtacaaagggggagagagagtggagacagacaaagatgaccctcgctcacaccgaatgttgctgccgagtggatctttatttttcttacgtatagtacatggacggaaaagtagacctgatgaaggagtctatgtctgtgtagcaaggaattaccttggagaggctgtgagccacaatgcatcgctggaagtagccatacttcgggatgacttcagacaaaacccttcggatgtcatggttgcagtaggagagcctgcagtaatggaatgccaacctccacgaggccatcctgagcccaccatttcatggaagaaagatggctctccactggatgataaagatgaaagaataactatacgaggaggaaagctcatgatcacttacacccgtaaaagtgacgctggcaaatatgtttgtgttggtaccaatatggttggggaacgtgagagtgaagtagccgagctgactgtcttagagagaccatcatttgtgaagagacccagtaacttggcagtaactgtggatgacagtgcagaatttaaatgtgaggcccgaggtgaccctgtacctacagtacgatggaggaaagatgatggagagctgcccaaatccagatatgaaatccgagatgatcataccttgaaaattaggaaggtgacagctggtgacatgggttcatacacttgtgttgcagaaaatatggtgggcaaagctgaagcatctgctactctgactgttcaagaacctccacattttgttgtgaaaccccgtgaccaggttgttgctttgggacggactgtaacttttcagtgtgaagcaaccggaaatcctcaaccagctattttctggaggagagaagggagtcagaatctacttttctcatatcaaccaccacagtcatccagccgattttcagtctcccagactggcgacctcacaattactaatgtccagcgatctgatgttggttattacatctgccagactttaaatgttgctggaagcatcatcacaaaggcatatttggaagttacagatgtgattgcagatcggcctcccccagttattcgacaaggtcctgtgaatcagactgtagccgtggatggcactttcgtcctcagctgtgtggccacaggcagtccagtgcccaccattctgtggagaaaggatggagtcctcgtttcaacccaagactctcgaatcaaacagttggagaatggagtactgcagatccgatatgctaagctgggtgatactggtcggtacacctgcattgcatcaacccccagtggtgaagcaacatggagtgcttacattgaagttcaagaatttggagttccagttcagcctccaagacctactgacccaaatttaatccctagtgccccatcaaaacctgaagtgacagatgtcagcagaaatacagtcacattatcgtggcaaccaaatttgaattcaggagcaactccaacatcttatattatagaagccttcagccatgcatctggtagcagctggcagaccgtagcagagaatgtgaaaacagaaacatctgccattaaaggactcaaacctaatgcaatttaccttttccttgtgagggcagctaatgcatatggaattagtgatccaagccaaatatcagatccagtgaaaacacaagatgtcctaccaacaagtcagggggtggaccacaagcaggtccagagagagctgggaaatgctgttctgcacctccacaaccccaccgtcctttcttcctcttccatcgaagtgcactggacagtagatcaacagtctcagtatatacaaggatataaaattctctatcggccatctggagccaaccacggagaatcagactggttagtttttgaagtgaggacgccagccaaaaacagtgtggtaatccctgatctcagaaagggagtcaactatgaaattaaggctcgccctttttttaatgaatttcaaggagcagatagtgaaatcaagtttgccaaaaccctggaagaagcacccagtgccccaccccaaggtgtaactgtatccaagaatgatggaaacggaactgcaattctagttagttggcagccacctccagaagacactcaaaatggaatggtccaagagtataaggtttggtgtctgggcaatgaaactcgataccacatcaacaaaacagtggatggttccaccttttccgtggtcattccctttcttgttcctggaatccgatacagtgtggaagtggcagccagcactggggctgggtctggggtaaagagtgagcctcagttcatccagctggatgcccatggaaaccctgtgtcacctgaggaccaagtcagcctcgctcagcagatttcagatgtggtgaagcagccggccttcatagcaggtattggagcagcctgttggatcatcctcatggtcttcagcatctggctttatcgacaccgcaagaagagaaacggacttactagtacctacgcgggtatcagaaaagtcccgtcttttaccttcacaccaacagtaacttaccagagaggaggcgaagctgtcagcagtggagggaggcctggacttctcaacatcagtgaacctgccgcgcagccatggctggcagacacgtggcctaatactggcaacaaccacaatgactgctccatcagctgctgcacggcaggcaatggaaacagcgacagcaacctcactacctacagtcgcccagctgattgtatagcaaattataacaaccaactggataacaaacaaacaaatctgatgctccctgagtcaactgtttatggtgatgtggaccttagtaacaaaatcaatgagatgaaaaccttcaatagcccaaatctgaaggatgggcgttttgtcaatccatcagggcagcctactccttacgccaccactcagctcatccagtcaaacctcagcaacaacatgaacaatggcagcggggactctggcgagaagcactggaaaccactgggacagcagaaacaagaagtggcaccagttcagtacaacatcgtggagcaaaacaagctgaacaaagattatcgagcaaatgacacagttcctccaactatcccatacaaccaatcatacgaccagaacacaggaggatcctacaacagctcagaccggggcagtagtacatctgggagtcaggggcacaagaaaggggcaagaacacccaaggtaccaaaacagggtggcatgaactgggcagacctgcttcctcctcccccagcacatcctcctccacacagcaatagcgaagagtacaacatttctgtagatgaaagctatgaccaagaaatgccatgtcccgtgccaccagcaaggatgtatttgcaacaagatgaattagaagaggaggaagatgaacgaggccccactccccctgttcggggagcagcttcttctccagctgccgtgtcctatagccatcagtccactgccactctgactccctccccacaggaagaactccagcccatgttacaggattgtccagaggagactggccacatgcagcaccagcccgacaggagacggcagcctgtgagtcctcctccaccaccacggccgatctcccctccacatacctatggctacatttcaggacccctggtctcagatatggatacggatgcgccagaagaggaagaagacgaagccgacatggaggtagccaagatgcaaaccagaaggcttttgttacgtgggcttgagcagacacctgcctccagtgttggggacctggagagctctgtcacggggtccatgatcaacggctggggctcagcctcagaggaggacaacatttccagcggacgctccagtgttagttcttcggacggctcctttttcactgatgctgactttgcccaggcagtcgcagcagcggcagagtatgctggtctgaaagtagcacgacggcaaatgcaggatgctgctggccgtcgacattttcatgcgtctcagtgccctaggcccacaagtcccgtgtctacagacagcaacatgagtgccgccgtaatgcagaaaaccagaccagccaagaaactgaaacaccagccaggacatctgcgcagagaaacctacacagatgatcttccaccacctcctgtgccgccacctgctataaagtcacctactgcccaatccaagacacagctggaagtacgacctgtagtggtgccaaaactcccttctatggatgcaagaacagacagatcatcagacagaaaaggaagcagttacaaggggagagaagtgttggatggaagacaggttgttgacatgcgaacaaatccaggtgatcccagagaagcacaggaacagcaaaatgacgggaaaggacgtggaaacaaggcagcaaaacgagaccttccaccagcaaagactcatctcatccaaggaaactgaaagctgaagacaaccaagaggcttatgagatctaatgtgaaaatcatcactcaagatgcctcctgtcagatgacacatgacgccagataaaatgttcagtgcaatcagagtgtacaaattgtcgtttttattcctcttattgggatatcattttaaaaactttattgggtttttattgttgttgtttgatccctaaccctacaaagagccttcctattcccctcgctgttggagcaaaccattataccttacttccagcaagcaaagtgctttgacttcttgcttcagtcatcagccagcaagagggaacaaaactgttcttttgcattttgccgctgagatatggcattgcactgcttatatgccaagctaatttatagcaagatattgatcaaatatagaaagttgatattcaacctcacaagggctctcaaagtataatctttctatagccaactgctaatgcaaattaaaacatatttcattttaacatgatttcaaaatcagtttttcatactaccctttgctggaagaaactaaaaatatagcaaatgcagaaccacaaacaattcgaatggggtagaaacattgtaaatatttactctttgcaaaccctggtggtattttattttggcttcatttcaatcattgaagtatattcttattggaaatgtacttttggataagtagggctaagccagttggatctctggttgtctagtcattgtcataagtaaacctagtaaaaccttgttctatttttcaatcatcaaaaagtaattataaatacgtattacaaacaagtggatgtttttaatgaccaattgagtaagaacatccctgtcttaactggccctaaatttcttctggtagtgtcagttcaactttcagaagtgccacttaaggaagtttgatttttgtttttgtaatgcactgtttttaatctctctctcttttttttttttttttggttttaaaagcacaatcactaaactttatttgtaaaccattgtaactattaaccttttttgtcttattgaaaaaaaaaatgttgagaagcgtttttaacctgttttgttaatgctctatgtttgtatttggaatatttgaataatgacagatggtgaagtaacatgcatactttattgtgggccatgaaccaaatggttcttacttttcctggacttaaagaaaaaaagaggtttaagtttgttgtggccaatgtcgaaacctacaagatttccttaaaatctctaatagaggcattacttgctttcaattgacaaatgatgccctctgactagtagatttctatgatccttttttgtcattttatgaatatcattgattttataattggtgctatttgaagaaaaaaatgtacatttattcatagatagataagtatcaggtctgaccccagtggaaaacaaagccaaacaaaactgaaccacaaaaaaaaaggctggtgttcaccaaaaccaaacttgttcatttagataatttgaaaaagttccatagaaaaggcgtgcagtactaagggaacaatccatgtgattaatgttttcattatgttcatgtaagaagccccttatttttagccataattttgcatactgaaaatccaataatcagaaaagtaattttgtcacattatttattaaaaatgttctcaaata

SEQ ID NO: 315747 - DNA, 1740 bp, Homo sapiens
gaatatcagaagcagtacttgagatatgaagagagagataaaatgagaattaggaaactgaaagctgaagacaaccaagaggcttatgagatctaatgtgaaaatcatcactcaagatgcctcctgtcagatgacacatgacgccagataaaatgttcagtgcaatcagagtgtacaaattgtcgtttttattcctcttattgggatatcattttaaaaactttattgggtttttattgttgttgtttgatccctaaccctacaaagagccttcctattcccctcgctgttggagcaaaccattataccttacttccagcaagcaaagtgctttgacttcttgcttcagtcatcagccagcaagagggaacaaaactgttcttttgcattttgccgctgagatatggcattgcactgcttatatgccaagctaatttatagcaagatattgatcaaatatagaaagttgatattcaacctcacaagggctctcaaagtataatctttctatagccaactgctaatgcaaattaaaacatatttcattttaacatgatttcaaaatcagtttttcatactaccctttgctggaagaaactaaaaatatagcaaatgcagaaccacaaacaattcgaatggggtagaaacattgtaaatatttactctttgcaaaccctggtggtattttattttggcttcatttcaatcattgaagtatattcttattggaaatgtacttttggataagtagggctaagccagttggatctctggttgtctagtcattgtcataagtaaacctagtaaaaccttgttctatttttcaatcatcaaaaagtaattataaatacgtattacaaacaagtggatgtttttaatgaccaattgagtaagaacatccctgtcttaactggccctaaatttcttctggtagtgtcagttcaactttcagaagtgccacttaaggaagtttgatttttgtttttgtaatgcactgtttttaatctctctctcttttttttttttttttggttttaaaagcacaatcactaaactttatttgtaaaccattgtaactattaaccttttttgtcttattgaaaaaaaaaatgttgagaagcgtttttaacctgttttgttaatgctctatgtttgtatttggaatatttgaataatgacagatggtgaagtaacatgcatactttattgtgggccatgaaccaaatggttcttacttttcctggacttaaagaaaaaaagaggtttaagtttgttgtggccaatgtcgaaacctacaagatttccttaaaatctctaatagaggcattacttgctttcaattgacaaatgatgccctctgactagtagatttctatgatccttttttgtcattttatgaatatcattgattttataattggtgctatttgaagaaaaaaatgtacatttattcatagatagataagtatcaggtctgaccccagtggaaaacaaagccaaacaaaactgaaccacaaaaaaaaaggctggtgttcaccaaaaccaaacttgttcatttagataatttgaaaaagttccatagaaaaggcgtgcagtactaagggaacaatccatgtgattaatgttttcattatgttcatgtaagaagccccttatttttagccataattttgcatactgaaaatccaataatcagaaaagtaattttgtcacattatttattaaaaatgttctcaaata

SEQ ID NO: 315748 - DNA, 2005 bp, Homo sapiens
cactactgcgcttctgcctcggctctttgttgttcgctttggatggttcttgaaagtgtctgagcctcctcggaaatcctggggccggagaagacaaaccttggaattcttcctctgcaaaagtctctgagatactgacaagcgtccggaaaggtcgacgagtaattgccctgaaaactcttggctaattgacccacgttgcttatattaagcctttgtgtgtggtgtgtggcttcatacatttggggaccctatttccactccctcctcttggcatgagactgtatacaggatccacccgaggacaatgattgcggagcccgctcacttttacctgtttggattaatatgtctctgttcaggctcccgtcttcgtcaggaagattttccacctcgcattgttgaacacccttcagacctgattgtctcaaaaggagaacctgcaactttgaactgcaaagctgaaggccgccccacacccactattgaatggtacaaagggggagagagagtggagacagacaaagatgaccctcgctcacaccgaatgttgctgccgagtggatctttatttttcttacgtatagtacatggacggaaaagtagacctgatgaaggagtctatgtctgtgtagcaaggaattaccttggagaggctgtgagccacaatgcatcgctggaagtagccagtaagtaaactgggcgctctgtgtttggcagagggagtggcagagtggcgtcatttgtttgatcatggcaatgaaaagtcgaatttgtatctcaggccttacctgaggataaactctagctttgtatgtgaatacaatctactatttcggttttctgtatttctcatcctaacttgttattcaagctaaattggtatttacacacagttggttaacaatttgacttttgattgggagtgattttctgttggaaagttttattaaaattgttccatcccctcctttgttacctttaaagatattgaatagggaaccatgtgctgcctatagttcagctacttgagacactgaggcaagagaattgcttgagcccaggggttctgggctgtactgcaccatgtccattgggtgtccaaactaagtttggtgtcagtacggtgacctcctgagaatggggaaccaccaggttggcctaaggaggagtgaacaggatcaggtcagaaatggagcagatcaaaactcccatgctgatcagtagtgggatcatgccggtgaatagccaaaaaatacacacacacacacacacacacacacacacacacacacacactcactctctctcttatccatagctacatatgagaatttgtctataaataagatagtgtgggatttaaaaatttgtcttcattaagaaaaataccttcaactggcagtttaagttagggttttaaaccatttctaattcttagaaatatatttctattaaagctatatcaaaaaagtatatgtatatgccttatattttattttcttggctactgtggggtgcctttggaagaaaacaggtgtatgttatcctcaagtagttttatggttcagtttatttacactagcaccaaatacagctcatttgaaattaccctcaagaaggatttattgactaaccattaaactgttgtatctataggctagatttatattgcagttgaataagaattgggcttcttttattttctatctacattcaaggagtagccaaaatgattcatccccttgaaaggatcctgctgtatataatatgacaaaaattgagaattgcatagggattggagagacaaatgaaatttagataaaattcactttatatataattctctataaaactatataaataaccatgtatatatttatatatgatgtttttccaagataattgatatgttaatatatgttcaaaattttaattatataattagttttcatagtctccaaaattgtcttcaaaattcaactataacttaaataagcataaa

SEQ ID NO: 315749 - DNA, 606 bp, Homo sapiens
ggtatggtaccttgtttctttttttctgttgtacaagttatgaaatgtcaatttggctttgcttcatttattaaaatttatctcatatgtttccttgagaggaatggtctttttgttatgttgtgttttttcatgtttttgagtttaaaaagtacagtattccatgatcacgtctctgtatctacttcaccatccacaatcctaattcccgaactctttaaataggcctcttgacgatgcagccagctcagtgagtggctggtcatttgaaagtagcacattgtgtctcattttagtattctgaatcagtgcatcatataaatgcattttgaataatgcatgtctgctactttaattacttgtttaattatctttagtttgtttcaaagcctacaacaactgctgttgcttggatgattagaaaattgcttccagttgcagaaatctatttcctgttgtttcttctggcagtgattgcagatcggcctcccccagttattcgacaaggtcctgtgaatcagactgtagccgtggatggcactttcgtcctcagctgtgtggccacaggcagtccagtgcccaccattctgtggagaaaggatggag

SEQ ID NO: 315750 - DNA, 456 bp, Homo sapiens
ggttagtttttgaagtgaggacgccagccaaaaacagtgtggtaatccctgatctcagaaagggagtcaactatgaaattaaggctcgccctttttttaatgaatttcaaggagcagatagtgaaatcaagtttgccaaaaccctggaagaaggcaagtatgatgaagcgtttgatttccatgcattgcagtatatttgttagaattttattagcttaatttaaattgttataatgttaatagtggcattaattactaactttcttgatattgaacatacattttgctaacagtatttgtttatttagaaaactagaaaagcaaaatgctataatagttgacttgcttcaatagtggcctacctcaaatgtgtaaatgtgaacattatattacttaatggcatatagaaatttaattattcagaactaaaattcacatttaaaaatgaaattgttt

SEQ ID NO: 315751 - DNA, 760 bp, Homo sapiens
tttattcttactctaaaattattctggctttacattcagtttaagtggttaagtgaaacagtttttagggtgcaaaaattattttcccactgtttttctcatgataatttgagtctcctgagctataatttctgaaggatttttactactttggcattatgtaatctgatctctgtcacaatgatattaaataagaactatctcactttcatatgtttgcttcataaaaggatatggaatgtacacatcagctctttttttttttttaaactagcatcaacctataacttggtataaacttcccaagtatttagagaatagtgctggtgaaaatttaaataggataggcatatagaaattatgacttgtattgagtgatgtcctttcaacctaggactagtgacaaccttcattttttcagagctgaagaaaaaaccgtgaatttaagatcatatttattggtgcatgtaagccattatcctgtcttaatgaaccgattaatgctgttgattgttgaaatgtgaaatgtagtcactgttgaccttgtaaatatctgccagagatgaaaaaatattttaagttattgtaaataaagatgtataaaattcagtatcagtctgcaatgcagaaacatatcttagatgttaaaatactgtgtttgagagatgtgtaatttacccttagatgtatctagttacattaagagtgtaaatttttttgtacagtataaaaatacagctctatttggcttttaactgga

SEQ ID NO: 315752 - DNA, 2790 bp, Homo sapiens
atgcgtaggcgacgcgctggtagagctgtggacctgccagcctgcgaggcggaggacgggctccatctcttagaaacgcctacggcgcatgctctatggggtcaactggggggctggcaagcggcagcgctggtctagggcggagtctccgaggcacttcccggtggctggctgctctgattggctgaacaaatagtccgagggtggtgggcatccgccctcccgacaaggcagaccaggccccctgcaggtcccctatccgcaccccggcccctgagagctggcactgcgactcgagacagcggcccggcaggacagctccagaatgaaaatgcggttcttggggttggtggtctgtttggttctctggaccctgcattctgaggggtctggagggaaactgacagctgtggatcctgaaacaaacatgaatgtgagtgaaattatctcttactggggattccctagtgaggaatacctagttgagacagaagatggatatattctgtgccttaaccgaattcctcatgggaggaagaaccattctgacaaaggtcccaaaccagttgtcttcctgcaacatggcttgctggcagattctagtaactgggtcacaaaccttgccaacagcagcctgggcttcattcttgctgatgctggttttgacgtgtggatgggcaacagcagaggaaatacctggtctcggaaacataagacactctcagtttctcaggatgaattctgggctttcagttatgatgagatggcaaaatatgacctaccagcttccattaacttcattctgaataaaactggccaagaacaagtgtattatgtgggtcattctcaaggcaccactataggttttatagcattttcacagatccctgagctggctaaaaggattaaaatgttttttgccctgggtcctgtggcttccgtcgccttctgtactagccctatggccaaattaggacgattaccagatcatctcattaaggacttatttggagacaaagaatttcttccccagagtgcgtttttgaagtggctgggtacccacgtttgcactcatgtcatactgaaggagctctgtggaaatctctgttttcttctgtgtggatttaatgagagaaatttaaatatgtctagagtggatgtatatacaacacattctcctgctggaacttctgtgcaaaacatgttacactggagccaggctgttaaattccaaaagtttcaagcctttgactggggaagcagtgccaagaattattttcattacaaccagagttatcctcccacatacaatgtgaaggacatgcttgtgccgactgcagtctggagcgggggtcacgactggcttgcagatgtctacgacgtcaatatcttactgactcagatcaccaacttggtgttccatgagagcattccggaatgggagcatcttgacttcatttggggcctggatgccccttggaggctttataataaaattattaatctaatgaggaaatatcagtgaaagctggacttgagctgtgtaccaccaagtcaatgattatgtcatgtgaaaatgtgtttgcttcatttctgtaaaacacttgtttttctttcccaggtcttttgtttttttatatccaagaaaatgataactttgaagatgcccagttcactctagtttcaattagaaacatactagctattttttctttaattagggctggaataggaagccagtgtctcaaccatagtattgtctctttaagtcttttaaatatcactgatgtgtaaaaaggtcattatatccattctgtttttaaaatttaaaatatattgactttttgcccttcataggacaaagtaatatatgtgttggaattttaaaattgtgttgtcattggtaaatctgtcactgacttaagcgaggtataaaagtacgcagttttcatgtccttgccttaaagagctctctagtctaacggtcttgtagttagagatctaaatgacattttatcatgttttcctgcagcaggtgcatagtcaaatccagaaatatcacagctgtgccagtaataaggatgctaacaattaattttatcaaacctaactgtgacagctgtgatttgacacgttttaattgctcaggttaaatgaaatagttttccggcgtcttcaaaaacaaattgcactgataaaacaaaaacaaaagtatgttttaaatgctttgaagactgatacactcaaccatctatattcatgagctctcaatttcatggcaggccatagttctacttatctgagaagcaaatccctgtggagactataccactattttttctgagattaatgtactcttggagcccgctactgtcgttattgatcacatctgtgtgaagccaaagccccgtggttgcccatgagaagtgtccttgttcattttcacccaaatgaagtgtgaacgtgatgttttcggatgcaaactcagctcagggattcattttgtgtcttagttttatatgcatccttatttttaatacacctgcttcacgtccctatgttgggaagtccatatttgtctgcttttcttgcagcatcatttccttacaatactgtccggtggacaaaatgacaattgatatgtttttctgatataattactttagctgcactaacagtacaatgcttgttaatggttaatataggcagggcgaatactactttgtaacttttaaagtcttaaacttttcaataaaattgagtgagacttataggcccaaaaaaaaaaaa

SEQ ID NO: 315753 - DNA, 1334 bp, Homo sapiens
attgtcagctcctgattctgcagaaaacacgaaactgagctgtacaaagatgctgatgaggggctgcagcatgcaattcacttcaccagcagtcactaaggtctgatctcttttctaaccatacctggaagatggaatgctggacccagggtatgcatagaaaatgggagttattagaaaagcagctttgcttgctttaacccaggaattgtatttctgacttttagacttggactgggactacaccatcaactttccttggtctccagcttgcagacaacagattatgggacttgccagtctccataatcagaaggctttgacatatcaatgcaccagggatcttaccaaactaaattttaagcacttatagctcaagattctccctctgagatgaaacatacttccaccctgtcatgtgtcagcttcagaagatatcaattgctcaagaaagtgttggacaagcagaaaagcacactgaacatttctggacttgtgaaagagctctgaatatggatctctcagggatattccatccccaccaatgctttaccaatgcgagagctggccaggctgagacatttaatgataacatggaacaatttattcaggaagatagtcaactactcatgtggctttatgattataaaacccactgaaaattgggtcccttgattctcttgatttttcctaagccttactccctaaagtctccaatttgatgaggtatttgatacttgatctctccttgaagtaaaatttggagcaaaatatattggactggaaggcctgagacctcgataagaagaaacatgaaccccagagccacaggtcaggaggttttcattataatactattgccctcttaaaacaaatactccaattgccaaggtttcctcacttaataatttatctcatatgtgtttttgaaagttactctgaatacttcttatatgtataaataagttagttaacagtaattaatgcagatatttaaataaatacaagcaggcaggtgggatgatgactacagtcacttgataaagaacagctaggtggccgggcgcggtggctcacacctgtaatcccagcattttgggaggctgaggcgggtggatcatgaggtcaagagttcgagactagcctggccaacatgatgaaaccccgcctgtactaaaaacacaaaaattagccgggcgtggtggcaggcgcctgtaatcccagctactcgggaagccgaggcagaattgcttgaaaccggaaggcggaggttgcagtgagccaagatcgggccactacactccagcctgggcgaaagagcaaaactccgtctc

SEQ ID NO: 315754 - DNA, 991 bp, Homo sapiens
attgtcagctcctgattctgcagaaaacacgaaactgagctgtacaaagatgctgatgaggggctgcagcatgcaattcacttcaccagcagtcactaagagtctcgctctgtagccaggctggagtgcagtggcacaatctcggctcactgcaaccttcacctcctgggttcaagaaattcacctgcctcagcctcccgaatagttgggactgcagaggaaaggccatgtgaagataaagaaaaggctgccatctccaggtcaggaagagaggtctcaccagaaaccaacttggacttctagcatctagaactatgtttattgtaaggattaaatcagctaaaccaagaaaagcctcagggatggtgcctggcaaactgcacgctgttaatacatgttagtggacccttctccacaccttcctgctacactaaagcagagagaattacctcctgaatcatgtttgcagaacttctgggcacagtgactcaactcccagctattcttgtcatggattttttctcttggagccaatccagccatggagatcactggtcttgtgacttattttttctctttcagtatgaaatcattagaactgagaaaatgaaaacattcctgttattacttcctgagagaaagaaacttagtaacatgctttggtaggaattgttcttctttttcctgctgtgtccctcttgctggtcccaccagggctcttggtcctgagcctgatttacaccaggagcataatctgatcaaaaagagggaaactaaagaaaaaaggcaggattgtatgaggggttctcacaatggcagtacataatcccttatacctcgtattatgtagacccctgtgtttccaagttacctttgtaatttaggtaagtgagcacgaaacacttaaaaaaacacaaatgaaaacaagagaaaggaaagagtggggaggggtttgtttatttttgaaaacaacgacaacaacatagagtaa

SEQ ID NO: 315755 - DNA, 2736 bp, Homo sapiens
atgcgtaggcgacgcgctggtagagctgtggacctgccagcctgcgaggcggaggacgggctccatctcttagaaacgcctacggcgcatgctctatggggtcaactggggggctggcaagcggcagcgctggtctagggcggagtctccgaggcacttcccggtggctggctgctctgattggctgaacaaatagtccgagggtggtgggcatccgccctcccgacaaggcagaccaggccccctgcaggtcccctatccgcaccccggcccctgagagctggcactgcgactcgagacagcggcccggcaggacagctccagaatgaaaatgcggttcttggggttggtggtctgtttggttctctggaccctgcattctgaggggtctggagggaaactgacagctgtggatcctgaaacaaacatgaatgtgagtgaaattatctcttactggggattccctagtgaggaatacctagttgagacagaagatggatatattctgtgccttaaccgaattcctcatgggaggaagaaccattctgacaaaggtcccaaaccagttgtcttcctgcaacatggcttgctggcagattctagtaactgggtcacaaaccttgccaacagcagcctgggcttcattcttgctgatgctggttttgacgtgtggatgggcaacagcagaggaaatacctggtctcggaaacataagacactctcagtttctcaggatgaattctgggctttcagttatgatgagatggcaaaatatgacctaccagcttccattaacttcattctgaataaaactggccaagaacaagtgtattatgtgggtcattctcaaggcaccactataggttttatagcattttcacagatccctgagctggctaaaaggattaaaatgttttttgccctgggtcctgtggcttccgtcgccttctgtactagccctatggccaaattaggacgattaccagatcatctcattaaggacttatttggagacaaagaatttcttccccagagtgcgtttttgaagtggctgggtacccacgtttgcactcatgtcatactgaaggagctctgtggaaatctctgttttcttctgtgtggatttaatgagagaaatttaaatatgtctagagtggatgtatatacaacacattctcctgctggaacttctgtgcaaaacatgttacactggagccaggctgttaaattccaaaagtttcaagcctttgactggggaagcagtgccaagaattattttcattacaaccagagttatcctcccacatacaatgtgaaggacatgcttgtgccgactgcagtctggagcgggggtcacgactggcttgcagatgtctacgacgtcaatatcttactgactcagatcaccaacttggtgttccatgagagcattccggaatgggagcatcttgacttcatttggggcctggatgccccttggaggctttataataaaattattaatctaatgaggaaatatcagtgaaagctggacttgagctgtgtaccaccaagtcaatgattatgtcatgtgaaaatgtgtttgcttcatttctgtaaaacacttgtttttctttcccaggtcttttgtttttttatatccaagtagctattttttctttaattagggctggaataggaagccagtgtctcaaccatagtattgtctctttaagtcttttaaatatcactgatgtgtaaaaaggtcattatatccattctgtttttaaaatttaaaatatattgactttttgcccttcataggacaaagtaatatatgtgttggaattttaaaattgtgttgtcattggtaaatctgtcactgacttaagcgaggtataaaagtacgcagttttcatgtccttgccttaaagagctctctagtctaacggtcttgtagttagagatctaaatgacattttatcatgttttcctgcagcaggtgcatagtcaaatccagaaatatcacagctgtgccagtaataaggatgctaacaattaattttatcaaacctaactgtgacagctgtgatttgacacgttttaattgctcaggttaaatgaaatagttttccggcgtcttcaaaaacaaattgcactgataaaacaaaaacaaaagtatgttttaaatgctttgaagactgatacactcaaccatctatattcatgagctctcaatttcatggcaggccatagttctacttatctgagaagcaaatccctgtggagactataccactattttttctgagattaatgtactcttggagcccgctactgtcgttattgatcacatctgtgtgaagccaaagccccgtggttgcccatgagaagtgtccttgttcattttcacccaaatgaagtgtgaacgtgatgttttcggatgcaaactcagctcagggattcattttgtgtcttagttttatatgcatccttatttttaatacacctgcttcacgtccctatgttgggaagtccatatttgtctgcttttcttgcagcatcatttccttacaatactgtccggtggacaaaatgacaattgatatgtttttctgatataattactttagctgcactaacagtacaatgcttgttaatggttaatataggcagggcgaatactactttgtaacttttaaagtcttaaacttttcaataaaattgagtgagacttataggcccaaaaaaaaaaaa

SEQ ID NO: 315756 - DNA, 1616 bp, Homo sapiens
ccccccttcccgccgccccccccccctccccccaccctcctacacactcctccctctctcatccccacataccagccctggggaagcagtgccaagaattattttcattacaaccagagttatcctcccacatacaatgtgaaggacatgcttgtgccgactgcagtctggagcgggggtcacgactggcttgcagatgtctacgacgtcaatatcttactgactcagatcaccaacttggtgttccatgagagcattccggaatgggagcatcttgacttcatttggggcctggatgccccttggaggctttataataaaattattaatctaatgaggaaatatcagtgaaagctggacttgagctgtgtaccaccaagtcaatgattatgtcatgtgaaaatgtgtttgcttcatttctgtaaaacacttgtttttctttcccaggtcttttgtttttttatatccaagaaaatgataactttgaagatgcccagttcactctagtttcaattagaaacatactagctattttttctttaattagggctggaataggaagccagtgtctcaaccatagtattgtctctttaagtcttttaaatatcactgatgtgtaaaaaggtcattatatccattctgtttttaaaatttaaaatatattgactttttgcccttcataggacaaagtaatatatgtgttggaattttaaaattgtgttgtcattggtaaatctgtcactgacttaagcgaggtataaaagtacgcagttttcatgtccttgccttaaagagctctctagtctaacggtcttgtagttagagatctaaatgacattttatcatgttttcctgcagcaggtgcatagtcaaatccagaaatatcacagctgtgccagtaataaggatgctaacaattaattttatcaaacctaactgtgacagctgtgatttgacacgttttaattgctcaggttaaatgaaatagttttccggcgtcttcaaaaacaaattgcactgataaaacaaaaacaaaagtatgttttaaatgctttgaagactgatacactcaaccatctatattcatgagctctcaatttcatggcaggccatagttctacttatctgagaagcaaatccctgtggagactataccactattttttctgagattaatgtactcttggagcccgctactgtcgttattgatcacatctgtgtgaagccaaagccccgtggttgcccatgagaagtgtccttgttcattttcacccaaatgaagtgtgaacgtgatgttttcggatgcaaactcagctcagggattcattttgtgtcttagttttatatgcatccttatttttaatacacctgcttcacgtccctatgttgggaagtccatatttgtctgcttttcttgcagcatcatttccttacaatactgtccggtggacaaaatgacaattgatatgtttttctgatataattactttagctgcactaacagtacaatgcttgttaatggttaatataggcagggcgaatactactttgtaacttttaaagtcttaaacttttcaataaaattgagtgagacttataggcccaaaaaaaaaaaa

SEQ ID NO: 315757 - DNA, 1078 bp, Homo sapiens
tcaacgctttatacttcgctgaagccagtgtctcaaccatagtattgtctctttaagtcttttaaatatcactgatgtgtaaaaaggtcattatatccattctgtttttaaaatttaaaatatattgactttttgcccttcataggacaaagtaatatatgtgttggaattttaaaattgtgttgtcattggtaaatctgtcactgacttaagcgaggtataaaagtacgcagttttcatgtccttgccttaaagagctctctagtctaacggtcttgtagttagagatctaaatgacattttatcatgttttcctgcagcaggtgcatagtcaaatccagaaatatcacagctgtgccagtaataaggatgctaacaattaattttatcaaacctaactgtgacagctgtgatttgacacgttttaattgctcaggttaaatgaaatagttttccggcgtcttcaaaaacaaattgcactgataaaacaaaaacaaaagtatgttttaaatgctttgaagactgatacactcaaccatctatattcatgagctctcaatttcatggcaggccatagttctacttatctgagaagcaaatccctgtggagactataccactattttttctgagattaatgtactcttggagcccgctactgtcgttattgatcacatctgtgtgaagccaaagccccgtggttgcccatgagaagtgtccttgttcattttcacccaaatgaagtgtgaacgtgatgttttcggatgcaaactcagctcagggattcattttgtgtcttagttttatatgcatccttatttttaatacacctgcttcacgtccctatgttgggaagtccatatttgtctgcttttcttgcagcatcatttccttacaatactgtccggtggacaaaatgacaattgatatgtttttctgatataattactttagctgcactaacagtacaatgcttgttaatggttaatataggcagggcgaatactactttgtaacttttaaagtcttaaacttttcaataaaattgagtgagacttataggcccaaaaaaaaaaaa

SEQ ID NO: 315758 - DNA, 1448 bp, Homo sapiens
atgcgtaggcgacgcgctggtagagctgtggacctgccagcctgcgaggcggaggacgggctccatctcttagaaacgcctacggcgcatgctctatggggtcaactggggggctggcaagcggcagcgctggtctagggcggagtctccgaggcacttcccggtggctggctgctctgattggctgaacaaatagtccgagggtggtgggcatccgccctcccgacaaggcagaccaggccccctgcaggtcccctatccgcaccccggcccctgagagctggcactgcgactcgagacagcggcccggcaggacagctccagaatgaaaatgcggttcttggggttggtggtctgtttggttctctggaccctgcattctgaggggtctggagggaaactgacagctgtggatcctgaaacaaacatgaatgtgagtgaaattatctcttactggggattccctagtgaggaatacctagttgagacagaagatggatatattctgtgccttaaccgaattcctcatgggaggaagaaccattctgacaaaggtcccaaaccagttgtcttcctgcaacatggcttgctggcagattctagtaactgggtcacaaaccttgccaacagcagcctgggcttcattcttgctgatgctggttttgacgtgtggatgggcaacagcagaggaaatacctggtctcggaaacataagacactctcagtttctcaggatgaattctgggctttcagttatgatgagatggcaaaatatgacctaccagcttccattaacttcattctgaataaaactggccaagaacaagtgtattatgtgggtcattctcaaggcaccactataggttaaatgaaatagttttccggcgtcttcaaaaacaaattgcactgataaaaccatgagctctcaatttcatggcaggccatagttctacttatctgagaagcaaatccctgtggagactataccactattttttctgagattaatgtactcttggagcccgctactgtcgttattgatcacatctgtgtgaagccaaagccccgtggttgcccatgagaagtgtccttgttcattttcacccaaatgaagtgtgaacgtgatgttttcggatgcaaactcagctcagggattcattttgtgtcttagttttatatgcatccttatttttaatacacctgcttcacgtccctatgttgggaagtccatatttgtctgcttttcttgcagcatcatttccttacaatactgtccggtggacaaaatgacaattgatatgtttttctgatataattactttagctgcactaacagtacaatgcttgttaatggttaatataggcagggcgaatactactttgtaacttttaaagtcttaaacttttcaataaaattgagtgagacttataggcccaaaaaaaaaaaa

SEQ ID NO: 315759 - DNA, 1537 bp, Homo sapiens
atgcgtaggcgacgcgctggtagagctgtggacctgccagcctgcgaggcggaggacgggctccatctcttagaaacgcctacggcgcatgctctatggggtcaactggggggctggcaagcggcagcgctggtctagggcggagtctccgaggcacttcccggtggctggctgctctgattggctgaacaaatagtccgagggtggtgggcatccgccctcccgacaaggcagaccaggccccctgcaggtcccctatccgcaccccggcccctgagagctggcactgcgactcgagacagcggcccggcaggacagctccagaatgaaaatgcggttcttggggttggtggtctgtttggttctctggaccctgcattctgaggggtctggagggaaactgacagctgtggatcctgaaacaaacatgaatgtgagtgaaattatctcttactggggattccctagtgaggaatacctagttgagacagaagatggatatattctgtgccttaaccgaattcctcatgggaggaagaaccattctgacaaaggtcccaaaccagttgtcttcctgcaacatggcttgctggcagattctagtaactgggtcacaaaccttgccaacagcagcctgggcttcattcttgctgatgctggttttgacgtgtggatgggcaacagcagaggaaatacctggtctcggaaacataagacactctcagtttctcaggatgaattctgggctttcagttatgatgagatggcaaaatatgacctaccagcttccattaacttcattctgaataaaactggccaagaacaagtgtattatgtgggtcattctcaaggcaccactataggttttatagcattttcacagatccctgagctggctaaaaggattaaaatgttttttgccctgggtcctgtggcttccgtcgccttctgtactagccctatggccaaattaggacgattaccagatcatctcattaaggacttatttggagacaaagaatttcttccccagagtgcgtttttgaagtggctgggtacccacgtttgcactcatgtcatactgaaggagctctgtggaaatctctgttttcttctgtgtggatttaatgagagaaatttaaatatgtctagagtggatgtatatacaacacattctccttgttcattttcacccaaatgaagtgtgaacgtgatgttttcggatgcaaactcagctcagggattcattttgtgtcttagttttatatgcatccttatttttaatacacctgcttcacgtccctatgttgggaagtccatatttgtctgcttttcttgcagcatcatttccttacaatactgtccggtggacaaaatgacaattgatatgtttttctgatataattactttagctgcactaacagtacaatgcttgttaatggttaatataggcagggcgaatactactttgtaacttttaaagtcttaaacttttcaataaaattgagtgagacttataggcccaaaaaaaaaaaa

SEQ ID NO: 315760 - DNA, 787 bp, Homo sapiens
cgctcccacagggttcgacccgactcatgcaccccgcgtgccccccggcccagccagcccacccgaccttccagacacgcaggagccccagaagctcagctggtcctcactgcccagatgtgtacagctgctccccccttgcataaagcagcgccatgtgtgcagaggccactcttgaagagcagactccctctgtgactgatgggactaaatattcccactagccagcggactgaaggcaaagaagacctttctagaacctggttaggaaggaagctgtgcagcatgctcctcgtccatgtgtgtcggcagtgctggtgtctgtcgtctccgcgagctgttactggaatgagcccttgtgttcatgggtatcgtcattgcgggccttgtacgcgtacaaggccccgtggttgcccatgagaagtgtccttgttcattttcacccaaatgaagtgtgaacgtgatgttttcggatgcaaactcagctcagggattcattttgtgtcttagttttatatgcatccttatttttaatacacctgcttcacgtccctatgttgggaagtccatatttgtctgcttttcttgcagcatcatttccttacaatactgtccggtggacaaaatgacaattgatatgtttttctgatataattactttagctgcactaacagtacaatgcttgttaatggttaatataggcagggcgaatactactttgtaacttttaaagtcttaaacttttcaataaaattgagtgagacttataggcccaaaaaaaaaaaa

SEQ ID NO: 315761 - DNA, 2566 bp, Homo sapiens
attgtcagctcctgattctgcagaaaacacgaaactgagctgtacaaagatgctgatgaggggctgcagcatgcaattcacttcaccagcagtcactaagaatgaaaatgcggttcttggggttggtggtctgtttggttctctggaccctgcattctgaggggtctggagggaaactgacagctgtggatcctgaaacaaacatgaatgtgagtgaaattatctcttactggggattccctagtgaggaatacctagttgagacagaagatggatatattctgtgccttaaccgaattcctcatgggaggaagaaccattctgacaaaggtcccaaaccagttgtcttcctgcaacatggcttgctggcagattctagtaactgggtcacaaaccttgccaacagcagcctgggcttcattcttgctgatgctggttttgacgtgtggatgggcaacagcagaggaaatacctggtctcggaaacataagacactctcagtttctcaggatgaattctgggctttcagttatgatgagatggcaaaatatgacctaccagcttccattaacttcattctgaataaaactggccaagaacaagtgtattatgtgggtcattctcaaggcaccactataggttttatagcattttcacagatccctgagctggctaaaaggattaaaatgttttttgccctgggtcctgtggcttccgtcgccttctgtactagccctatggccaaattaggacgattaccagatcatctcattaaggacttatttggagacaaagaatttcttccccagagtgcgtttttgaagtggctgggtacccacgtttgcactcatgtcatactgaaggagctctgtggaaatctctgttttcttctgtgtggatttaatgagagaaatttaaatatgtctagagtggatgtatatacaacacattctcctgctggaacttctgtgcaaaacatgttacactggagccaggctgttaaattccaaaagtttcaagcctttgactggggaagcagtgccaagaattattttcattacaaccagagttatcctcccacatacaatgtgaaggacatgcttgtgccgactgcagtctggagcgggggtcacgactggcttgcagatgtctacgacgtcaatatcttactgactcagatcaccaacttggtgttccatgagagcattccggaatgggagcatcttgacttcatttggggcctggatgccccttggaggctttataataaaattattaatctaatgaggaaatatcagtgaaagctggacttgagctgtgtaccaccaagtcaatgattatgtcatgtgaaaatgtgtttgcttcatttctgtaaaacacttgtttttctttcccaggtcttttgtttttttatatccaagaaaatgataactttgaagatgcccagttcactctagtttcaattagaaacatactagctattttttctttaattagggctggaataggaagccagtgtctcaaccatagtattgtctctttaagtcttttaaatatcactgatgtgtaaaaaggtcattatatccattctgtttttaaaatttaaaatatattgactttttgcccttcataggacaaagtaatatatgtgttggaattttaaaattgtgttgtcattggtaaatctgtcactgacttaagcgaggtataaaagtacgcagttttcatgtccttgccttaaagagctctctagtctaacggtcttgtagttagagatctaaatgacattttatcatgttttcctgcagcaggtgcatagtcaaatccagaaatatcacagctgtgccagtaataaggatgctaacaattaattttatcaaacctaactgtgacagctgtgatttgacacgttttaattgctcaggttaaatgaaatagttttccggcgtcttcaaaaacaaattgcactgataaaacaaaaacaaaagtatgttttaaatgctttgaagactgatacactcaaccatctatattcatgagctctcaatttcatggcaggccatagttctacttatctgagaagcaaatccctgtggagactataccactattttttctgagattaatgtactcttggagcccgctactgtcgttattgatcacatctgtgtgaagccaaagccccgtggttgcccatgagaagtgtccttgttcattttcacccaaatgaagtgtgaacgtgatgttttcggatgcaaactcagctcagggattcattttgtgtcttagttttatatgcatccttatttttaatacacctgcttcacgtccctatgttgggaagtccatatttgtctgcttttcttgcagcatcatttccttacaatactgtccggtggacaaaatgacaattgatatgtttttctgatataattactttagctgcactaacagtacaatgcttgttaatggttaatataggcagggcgaatactactttgtaacttttaaagtcttaaacttttcaataaaattgagtgagacttataggcccaaaaaaaaaaaa

SEQ ID NO: 315762 - DNA, 2736 bp, Homo sapiens
atgcgtaggcgacgcgctggtagagctgtggacctgccagcctgcgaggcggaggacgggctccatctcttagaaacgcctacggcgcatgctctatggggtcaactggggggctggcaagcggcagcgctggtctagggcggagtctccgaggcacttcccggtggctggctgctctgattggctgaacaaatagtccgagggtggtgggcatccgccctcccgacaaggcagaccaggccccctgcaggtcccctatccgcaccccggcccctgagagctggcactgcgactcgagacagcggcccggcaggacagctccagaatgaaaatgcggttcttggggttggtggtctgtttggttctctggaccctgcattctgaggggtctggagggaaactgacagctgtggatcctgaaacaaacatgaatgtgagtgaaattatctcttactggggattccctagtgaggaatacctagttgagacagaagatggatatattctgtgccttaaccgaattcctcatgggaggaagaaccattctgacaaaggtcccaaaccagttgtcttcctgcaacatggcttgctggcagattctagtaactgggtcacaaaccttgccaacagcagcctgggcttcattcttgctgatgctggttttgacgtgtggatgggcaacagcagaggaaatacctggtctcggaaacataagacactctcagtttctcaggatgaattctgggctttcagttatgatgagatggcaaaatatgacctaccagcttccattaacttcattctgaataaaactggccaagaacaagtgtattatgtgggtcattctcaaggcaccactataggttttatagcattttcacagatccctgagctggctaaaaggattatggccaaattaggacgattaccagatcatctcattaaggacttatttggagacaaagaatttcttccccagagtgcgtttttgaagtggctgggtacccacgtttgcactcatgtcatactgaaggagctctgtggaaatctctgttttcttctgtgtggatttaatgagagaaatttaaatatgtctagagtggatgtatatacaacacattctcctgctggaacttctgtgcaaaacatgttacactggagccaggctgttaaattccaaaagtttcaagcctttgactggggaagcagtgccaagaattattttcattacaaccagagttatcctcccacatacaatgtgaaggacatgcttgtgccgactgcagtctggagcgggggtcacgactggcttgcagatgtctacgacgtcaatatcttactgactcagatcaccaacttggtgttccatgagagcattccggaatgggagcatcttgacttcatttggggcctggatgccccttggaggctttataataaaattattaatctaatgaggaaatatcagtgaaagctggacttgagctgtgtaccaccaagtcaatgattatgtcatgtgaaaatgtgtttgcttcatttctgtaaaacacttgtttttctttcccaggtcttttgtttttttatatccaagaaaatgataactttgaagatgcccagttcactctagtttcaattagaaacatactagctattttttctttaattagggctggaataggaagccagtgtctcaaccatagtattgtctctttaagtcttttaaatatcactgatgtgtaaaaaggtcattatatccattctgtttttaaaatttaaaatatattgactttttgcccttcataggacaaagtaatatatgtgttggaattttaaaattgtgttgtcattggtaaatctgtcactgacttaagcgaggtataaaagtacgcagttttcatgtccttgccttaaagagctctctagtctaacggtcttgtagttagagatctaaatgacattttatcatgttttcctgcagcaggtgcatagtcaaatccagaaatatcacagctgtgccagtaataaggatgctaacaattaattttatcaaacctaactgtgacagctgtgatttgacacgttttaattgctcaggttaaatgaaatagttttccggcgtcttcaaaaacaaattgcactgataaaacaaaaacaaaagtatgttttaaatgctttgaagactgatacactcaaccatctatattcatgagctctcaatttcatggcaggccatagttctacttatctgagaagcaaatccctgtggagactataccactattttttctgagattaatgtactcttggagcccgctactgtcgttattgatcacatctgtgtgaagccaaagccccgtggttgcccatgagaagtgtccttgttcattttcacccaaatgaagtgtgaacgtgatgttttcggatgcaaactcagctcagggattcattttgtgtcttagttttatatgcatccttatttttaatacacctgcttcacgtccctatgttgggaagtccatatttgtctgcttttcttgcagcatcatttccttacaatactgtccggtggacaaaatgacaattgatatgtttttctgatataattactttagctgcactaacagtacaatgcttgttaatggttaatataggcagggcgaatactactttgtaacttttaaagtcttaaacttttcaataaaattgagtgagacttataggcccaaaaaaaaaaaa

SEQ ID NO: 315763 - DNA, 2734 bp, Homo sapiens
atgcgtaggcgacgcgctggtagagctgtggacctgccagcctgcgaggcggaggacgggctccatctcttagaaacgcctacggcgcatgctctatggggtcaactggggggctggcaagcggcagcgctggtctagggcggagtctccgaggcacttcccggtggctggctgctctgattggctgaacaaatagtccgagggtggtgggcatccgccctcccgacaaggcagaccaggccccctgcaggtcccctatccgcaccccggcccctgagagctggcactgcgactcgagacagcggcccggcaggacagctccagaatgaaaatgcggttcttggggttggtggtctgtttggttctctggaccctgcattctgaggggtctggagggaaactgacagctgtggatcctgaaacaaacatgaatgtgagtgaaattatctcttactggggattccctagtgaggaatacctagttgagacagaagatggatatattctgtgccttaaccgaattcctcatgggaggaagaaccattctgacaaaggtcccaaaccagttgtcttcctgcaacatggcttgctggcagattctagtaactgggtcacaaaccttgccaacagcagcctgggcttcattcttgctgatgctggttttgacgtgtggatgggcaacagcagaggaaatacctggtctcggaaacataagacactctcagtttctcaggatgaattctgggctttcagttatgatgagatggcaaaatatgacctaccagcttccattaacttcattctgaataaaactggccaagaacaagtgtattatgtgggtcattctcaaggcaccactataggttttatagcattttcacagatccctgagctggctaaaaggattaaaatgttttttgccctgggtcctgtggcttccgtcgccttctgtactagccctatggccaaattaggacgattaccagatcatctcattaaggacttatttggagacaaagaatttcttccccagagtgcgtttttgaagtggctgggtacccacgtttgcactcatgtcatactgaaggagctctgtggaaatctctgttttcttctgtgtggatttaatgagagaaatttaaatatgtctagagtggatgtatatacaacacattctcctgctggaacttctgtgcaaaacatgttacactggagccaggctgttaaattccaaaagtttcaagcctttgactggggaagcagtgccaagaattattttcattacaaccagagttatcctcccacatacaatgtgaaggacatgcttgtgccgactgcagtctggagcgggggtcacgactggcttgcagatgtctacgacgtcaatatcttactgactcagatcaccaacttggtgttccatgagagcattccggaatgggagcatcttgacttcatttggggcctggatgccccttggaggctttataataaaattattaatctaatgaggaaatatcagtgaaagctggacttgagctgtgtaccaccaagtcaatgattatgtcatgtgaaaatgtgtttgcttcatttctgtaaaacacttgtttttctttcccaggtcttttgtttttttatatccaagaaaatgataactttgaagatgcccagttcactctagtttcaattagaaacatactagctattttttctttaattagggctggaataggaagccagtgtctcaaccatagtattgtctctttaagtcttttaaatatcactgatgtgtaaaaaggtcattatatccattctgtttttaaaatttaaaatatattgactttttgcccttcataggacaaagtaatatatgtgttggaattttaaaattgtgttgtcattggtaaatctgtcactgacttaagcgaggtataaaagtacgcagttttcatgtccttgccttaaagagctctctagtctaacggtcttgtagttagagatctaaatgacattttatcatgttttcctgcagcaggtgcatagtcaaatccagaaatatcacagctgtgccagtaataaggatgctaacaattaattttatcaaacctaactgtgacagctgtgatttgacacgttttaattgctcaggttaaatgaaatagttttccggcgtcttcaaaaacaaattgcactgataaaacaaaaacaaaagtatgttttaaatgctttgaagactgatacactcaaccatctatattcatgagctctcaatttcatggcaggccatagttctacttatctgagaagcaaatccctgtggagactataccaatctgtgtgaagccaaagccccgtggttgcccatgagaagtgtccttgttcattttcacccaaatgaagtgtgaacgtgatgttttcggatgcaaactcagctcagggattcattttgtgtcttagttttatatgcatccttatttttaatacacctgcttcacgtccctatgttgggaagtccatatttgtctgcttttcttgcagcatcatttccttacaatactgtccggtggacaaaatgacaattgatatgtttttctgatataattactttagctgcactaacagtacaatgcttgttaatggttaatataggcagggcgaatactactttgtaacttttaaagtcttaaacttttcaataaaattgagtgagacttataggcccaaaaaaaaaaaa

SEQ ID NO: 315764 - DNA, 1305 bp, Homo sapiens
atgcgtaggcgacgcgctggtagagctgtggacctgccagcctgcgaggcggaggacgggctccatctcttagaaacgcctacggcgcatgctctatggggtcaactggggggctggcaagcggcagcgctggtctagggcggagtctccgaggcacttcccggtggctggctgctctgattggctgaacaaatagtccgagggtggtgggcatccgccctcccgacaaggcagaccaggccccctgcaggtcccctatccgcaccccggcccctgagagctggcactgcgactcgagacagcggcccggcaggacagctccagaatgaaaatgcggttcttggggttggtggtctgtttggttctctggaccctgcattctgaggggtctggagggaaactgacagctgtggatcctgaaacaaacatgaatgtgagtgaaattatctcttactggggattccctagtgaggaatacctagttgagacagaagatggatatattctgtgccttaaccgaattcctcatgggaggaagaaccattctgacaaaggtcccaaaccagttgtcttcctgcaacatggcttgctggcagattctagtaactgggtcacaaaccttgccaacagcagcctgggcttcattcttgctgatgctggttttgacgtgtggatgggcaacagcagaggaaatacctggtctcggaaacataagacactctcagtttctcaggatgaattctgggctttcagttatgatgagatggcaaaatatgacctaccagcttccattaacttcattctgaataaaactggccaagaacaagtgtattatgtgggtcattctcaaggcaccactataggttttatagcattttcacagatccctgagctggctaaaaggattaaaatgttttttgccctgggtcctgtggcttccgtcgccttctgtactagccctatggccaaattaggacgattaccagatcatctcattaaggacttatttggagacaaagaatttcttccccagagtgcgtttttgaagtggctgggtacccacgtttgcactcatgtcatactgaaggagctctgtggaaatctctgttttcttctgtgtggatttaatgagagaaatttaaatatgtctagagtggatgtatatacaacacattctcctgctggaacttctgtgcaaaacatgttacactggagccaggctgttaaattccaaaagtttcaagcctttgaattttttgcgactgtacacatagctgcagcattaagaacttaaaaaaattgtta

SEQ ID NO: 315765 - DNA, 929 bp, Homo sapiens
atgcgtaggcgacgcgctggtagagctgtggacctgccagcctgcgaggcggaggacgggctccatctcttagaaacgcctacggcgcatgctctatggggtcaactggggggctggcaagcggcagcgctggtctagggcggagtctccgaggcacttcccggtggctggctgctctgattggctgaacaaatagtccgagggtggtgggcatccgccctcccgacaaggcagaccaggccccctgcaggtcccctatccgcaccccggcccctgagagctggcactgcgactcgagacagcggcccggcaggacagctccagaatgaaaatgcggttcttggggttggtggtctgtttggttctctggaccctgcattctgaggggtctggagggaaactgacagctgtggatcctgaaacaaacatgaatgtgagtgaaattatctcttactggggattccctagtgaggaatacctagttgagacagaagatggatatattctgtgccttaaccgaattcctcatgggaggaagaaccattctgacaaaggtcccaaaccagttgtcttcctgcaacatggcttgctggcagattctagtaactgggtcacaaaccttgccaacagcagcctgggcttcattcttgctgatgctggttttgacgtgtggatgggcaacagcagaggaaatacctggtctcggaaacataagacactctcagtttctcaggatgaattctgggctttcagttatgatgagatggcaaaatatgacctaccagcttccattaacttcattctgaataaaactggccaagaacaagtgtattatgtgggtcattctcaaggcaccactataggcttatagcattttcacagatccctgagcttgctggattcctaggacgattccagatcatctattg

SEQ ID NO: 315766 - DNA, 1798 bp, Homo sapiens
aaaaagaaaaagaaaagaaaagaaaaggtacatcagacatgactgcctgcatgaagtcaaacagggtaacaccagtgaagctcaagtcaagagctgtggatattttgtctaaccaacaagaagtctcaagaaatcaggcagtgcagctgcctgcttctcagctatcgtatccagccaaaagatgcatgatgatggagtggtgggggaaggccagttcagtatcctatttaaaagtaaacttcctgaataatggatatatgtggagatacagacatagatatatagatacagctgtaattatttagcctcaagtgactttctccattgcttcacgctatgccactattttgcttctttaatttttttaaccttgcttagtattctatagtttgcccaaccagttttacgtccaaggaaaattagccaatgcataaaatatacaaactatgaaaggcaaggatcaggaaaccagagactttgccaccaaatctcagattattagaaactaggtgtcagggtttatcaagaaggccaggaaggccttttgggttaagccttacattcatgaagaacctcgagggtagatttttgagagcattccaaatgaatggtctctggtcaaatgaatgaatggtcaaatgaataaatctgccctcacagagatacaaaaggaaaaggaatataattcataccatttggtttaagccttacattcatgaagaacctcaagggtagatttttgagatcattccaaatgaagtcgaatctgccctcacagagacacaagaaaggaatataattcatacactattgcatttttaataaatcttttgaaatttgcagaattagattgtattgtgtattttcggttaaatgataattgaatgtaaatatttagatgcagcaccatattttataacccagctttagcatttcttcatattttaaggaaaccccccacctccttcttttaagggcgcttcttgctctctgaaatgccctgctaaatgcttctcttaattatttgaataaggtagtttggaataaagaaagaaaagatcactctacatacagatagtaaacttaatttgtgatcctatatatgagacagtataaaaatacagataagttttagaaagactcaaaacaatatgtaaatgactgatgtttgcattattaaggaaaacttgggatgttgggtcaagaggggaaagtgttagtcaatccactttggagcaatatcatgaaggtcaattataattccatatacctttctttgatgccacagtcagagatagaatacagtttgggtggccatggatgtgccccaatacagtacacattttttggttaaatttgttttcagatcatttcatggaatctttgaagtatctttgactctaactttgacttggtggtggaccttccttggtttttataacacctaagagatatcctttagaattacatgtattttagcataaggaaattgaaaaagtaaaacatactggtttttttcaacaagaccatatgtaaattaaatagtgaaatgtgtatgagtttcagtagaactgtaccatcaacaatgtttccataaatatgcagagttctttcttttgtattgttatttacaatattgttaaattgaatgcatttgcaatttctaggattctaaagaattgagtacagaaagtagcaattttattatttgatgataatatgagaattactgtgccaatactgttttgataaataaatagatttttaaaaataaatgtattgtacttattagtgtagt

SEQ ID NO: 315767 - DNA, 583 bp, Homo sapiens
ccttcatgatattgctccaaagtggattgactaacactttcccctcttgacccaatatcatgaaggtcaattataattccatatacctttctttgatgccacagtcagagatagaatacagtttgggtggccatggatgtgccccaatacagtacacattttttggttaaatttgttttcagatcatttcatggaatctttgaagtatctttgactctaactttgacttggtggtggaccttccttggtttttataacacctaagagatatcctttagaattacatgtattttagcataaggaaattgaaaaagtaaaacatactggtttttttcaacaagaccatatgtaaattaaatagtgaaatgtgtatgagtttcagtagaactgtaccatcaacaatgtttccataaatatgcagagttctttcttttgtattgttatttacaatattgttaaattgaatgcatttgcaatttctaggattctaaagaattgagtacagaaagtagcaattttattatttgatgataatatgagaattactgtgccaatactgttttgataaataaatagattttta

SEQ ID NO: 315768 - DNA, 1767 bp, Homo sapiens
aaaaagaaaaagaaaagaaaagaaaaggtacatcagacatgactgcctgcatgaagtcaaacagggtaacaccagtgaagctcaagtcaagagctgtggatattttgtctaaccaacaagaagtctcaagaaatcaggcagtgcagctgcctgcttctcagctatcgtatccagccaaaagatgcatgatgatggagtggtgggggaaggccagttcagtatcctatttaaaagtaaacttcctgaataatggatatatgtggagatacagacatagatatatagatacagctgtaattatttagcctcaagtgactttctccattgcttcacgctatgccactattttgcttctttaatttttttaaccttgcttagtattctatagtttgcccaaccagttttacgtccaaggaaaattagccaatgcataaaatatacaaactatgaaaggcaaggatcaggaaaccagagactttgccaccaaatctcagattattagaaactaggtgtcagggtttatcaagaaggccaggaaggccttttgggttaagccttacattcatgaagaacctcgagggtagatttttgagagcattccaaatgaatggtctctggtcaaatgaatgaatggtcaaatgaataaatctgccctcacagagatacaaaaggaaaaggaatataattcataccatttggtttaagccttacattcatgaagaacctcaagggtagatttttgagatcattccaaatgaagtcgaatctgccctcacagagacacaagaaaggaatataattcatacactattgcatttttaataaatcttttgaaatttgcagaattagattgtattgtgtattttcggttaaatgataattgaatgtaaatatttagatgcagcaccatattttataacccagctttagcatttcttcatattttaaggaaaccccccacctccttcttttaagggcgcttcttgctctctgaaatgccctgctaaatgcttctcttaattatttgaataaggtagtttggaataaagaaagaaaagatcactctacatacagatagtaaacttaatttgtgatcctatatatgagacagtataaaaatacagataagttttagaaagactcaaaacaatatgtaaatgactgatgtttgcattattaaggaaaacttgggatgttgggtcaagaggggaaagtgttagtcaatccactttggagcaatatcatgaaggtcaattataattccatatacctttctttgatgccacagtcagagatagaatacagtttgggtggccatggatgtgccccaatacagtacacattttttggttaaatttgttttcagatcatttcatggaatctttgaagtatctttgactctaactttgacttggtggtggaccttccttggtttttataacacctaagagatatcctttagaattacatgtattttagcataaggaaattgaaaaagtaaaacatactggtttttttcaacaagaccatatgtaaattaaatagtgaaatgtgtatgagtttcagtagaactgtaccatcaacaatgtttccataaatatgcagagttctttcttttgtattgttatttacaatattgttaaattgaatgcatttgcaatttctaggattctaaagaattgagtacagaaagtagcaattttattatttgatgataatatgagaattactgtgccaatactgttttgataaataaatagattttta

SEQ ID NO: 315769 - DNA, 2562 bp, Homo sapiens
tgcagctgttgaacgctgagtaacttctgcagagtcaggaagacccaaggaagctctgcagaggatgcaggggtacggtcagaacccctgagtgcctttcagctaacgaggactttatgacactccccagcacagcaaatttttatgatgtgtttaaagattgggtgaattactcaggtgaacaagctactttttatcagagaacacctaaaaacacgttcaagagggtttgggaactatacatttaatcctatgacaaactaagttggttctgtcttcacctgttttggtgaggttgtgtaagagttggtgtttgctcaggaagagatttaagcatgcttgcttacccagactcagagaagtctccctgttctgtcctagctagtgattcctgtgttgtgtgcattcgtcttttccagagcaaaccgcccagagtagaagatggattggggcacgctgcagacgatcctggggggtgtgaacaaacactccaccagcattggaaagatctggctcaccgtcctcttcatttttcgcattatgatcctcgttgtggctgcaaaggaggtgtggggagatgagcaggccgactttgtctgcaacaccctgcagccaggctgcaagaacgtgtgctacgatcactacttccccatctcccacatccggctatgggccctgcagctgatcttcgtgtccacgccagcgctcctagtggccatgcacgtggcctaccggagacatgagaagaagaggaagttcatcaagggggagataaagagtgaatttaaggacatcgaggagatcaaaacccagaaggtccgcatcgaaggctccctgtggtggacctacacaagcagcatcttcttccgggtcatcttcgaagccgccttcatgtacgtcttctatgtcatgtacgacggcttctccatgcagcggctggtgaagtgcaacgcctggccttgtcccaacactgtggactgctttgtgtcccggcccacggagaagactgtcttcacagtgttcatgattgcagtgtctggaatttgcatcctgctgaatgtcactgaattgtgttatttgctaattagatattgttctgggaagtcaaaaaagccagtttaacgcattgcccagttgttagattaagaaatagacagcatgagagggatgaggcaacccgtgctcagctgtcaaggctcagtcgccagcatttcccaacacaaagattctgaccttaaatgcaaccatttgaaacccctgtaggcctcaggtgaaactccagatgccacaatggagctctgctcccctaaagcctcaaaacaaaggcctaattctatgcctgtcttaattttctttcacttaagttagttccactgagaccccaggctgttaggggttattggtgtaaggtactttcatattttaaacagaggatatcggcatttgtttctttctctgaggacaagagaaaaaagccaggttccacagaggacacagagaaggtttgggtgtcctcctggggttctttttgccaactttccccacgttaaaggtgaacattggttctttcatttgctttggaagttttaatctctaacagtggacaaagttaccagtgccttaaactctgttacactttttggaagtgaaaactttgtagtatgataggttattttgatgtaaagatgttctggataccattatatgttccccctgtttcagaggctcagattgtaatatgtaaatggtatgtcattcgctactatgatttaatttgaaatatggtcttttggttatgaatactttgcagcacagctgagaggctgtctgttgtattcattgtggtcatagcacctaacaacattgtagcctcaatcgagtgagacagactagaagttcctagtgatggcttatgatagcaaatggcctcatgtcaaatatttagatgtaattttgtgtaagaaatacagactggatgtaccaccaactactacctgtaatgacaggcctgtccaacacatctcccttttccatgactgtggtagccagcatcggaaagaacgctgatttaaagaggtcgcttgggaattttattgacacagtaccatttaatggggaggacaaaatggggcaggggagggagaagtttctgtcgttaaaaacagatttggaaagactggactctaaattctgttgattaaagatgagctttgtctacttcaaaagtttgtttgcttaccccttcagcctccaattttttaagtgaaaatataactaataacatgtgaaaagaatagaagctaaggtttagataaatattgagcagatctataggaagattgaacctgaatattgccattatgcttgacatggtttccaaaaaatggtactccacatacttcagtgagggtaagtattttcctgttgtcaagaatagcattgtaaaagcattttgtaataataaagaatagctttaatgatatgcttgtaactaaaataattttgtaatgtatcaaatacatttaaaacattaaaatataatctctataataaaaaaaaaaa

SEQ ID NO: 315770 - DNA, 2266 bp, Homo sapiens
ggcgccacggcgggagacaggtgttgcggccccgcagcgcccgcgcgctcctctccccgactcggagcccctcggcggcgcccggcccaggacccgcctaggagcgcaggagccccagcgcagagaccccaacgccgagacccccgccccggccccgccgcgcttcctcccgacgcagagcaaaccgcccagagtagaagatggattggggcacgctgcagacgatcctggggggtgtgaacaaacactccaccagcattggaaagatctggctcaccgtcctcttcatttttcgcattatgatcctcgttgtggctgcaaaggaggtgtggggagatgagcaggccgactttgtctgcaacaccctgcagccaggctgcaagaacgtgtgctacgatcactacttccccatctcccacatccggctatgggccctgcagctgatcttcgtgtccacgccagcgctcctagtggccatgcacgtggcctaccggagacatgagaagaagaggaagttcatcaagggggagataaagagtgaatttaaggacatcgaggagatctcttcttccgggtcatcttcgaagccgccttcatgtacgtcttctatgtcatgtacgacggcttctccatgcagcggctggtgaagtgcaacgcctggccttgtcccaacactgtggactgctttgtgtcccggcccacggagaagactgtcttcacagtgttcatgattgcagtgtctggaatttgcatcctgctgaatgtcactgaattgtgttatttgctaattagatattgttctgggaagtcaaaaaagccagtttaacgcattgcccagttgttagattaagaaatagacagcatgagagggatgaggcaacccgtgctcagctgtcaaggctcagtcgccagcatttcccaacacaaagattctgaccttaaatgcaaccatttgaaacccctgtaggcctcaggtgaaactccagatgccacaatggagctctgctcccctaaagcctcaaaacaaaggcctaattctatgcctgtcttaattttctttcacttaagttagttccactgagaccccaggctgttaggggttattggtgtaaggtactttcatattttaaacagaggatatcggcatttgtttctttctctgaggacaagagaaaaaagccaggttccacagaggacacagagaaggtttgggtgtcctcctggggttctttttgccaactttccccacgttaaaggtgaacattggttctttcatttgctttggaagttttaatctctaacagtggacaaagttaccagtgccttaaactctgttacactttttggaagtgaaaactttgtagtatgataggttattttgatgtaaagatgttctggataccattatatgttccccctgtttcagaggctcagattgtaatatgtaaatggtatgtcattcgctactatgatttaatttgaaatatggtcttttggttatgaatactttgcagcacagctgagaggctgtctgttgtattcattgtggtcatagcacctaacaacattgtagcctcaatcgagtgagacagactagaagttcctagtgatggcttatgatagcaaatggcctcatgtcaaatatttagatgtaattttgtgtaagaaatacagactggatgtaccaccaactactacctgtaatgacaggcctgtccaacacatctcccttttccatgactgtggtagccagcatcggaaagaacgctgatttaaagaggtcgcttgggaattttattgacacagtaccatttaatggggaggacaaaatggggcaggggagggagaagtttctgtcgttaaaaacagatttggaaagactggactctaaattctgttgattaaagatgagctttgtctacttcaaaagtttgtttgcttaccccttcagcctccaattttttaagtgaaaatataactaataacatgtgaaaagaatagaagctaaggtttagataaatattgagcagatctataggaagattgaacctgaatattgccattatgcttgacatggtttccaaaaaatggtactccacatacttcagtgagggtaagtattttcctgttgtcaagaatagcattgtaaaagcattttgtaataataaagaatagctttaatgatatgcttgtaactaaaataattttgtaatgtatcaaatacatttaaaacattaaaatataatctctataataaaaaaaaaaa

SEQ ID NO: 315771 - DNA, 992 bp, Homo sapiens
  misc_feature (10)..(10): n is a, c, g, or t
tcctgatccnatgcacaccgcttctaacagtggacaaagttaccagtgccttaaactctgttacactttttggaagtgaaaactttgtagtatgataggttattttgatgtaaagatgttctggataccattatatgttccccctgtttcagaggctcagattgtaatatgtaaatggtatgtcattcgctactatgatttaatttgaaatatggtcttttggttatgaatactttgcagcacagctgagaggctgtctgttgtattcattgtggtcatagcacctaacaacattgtagcctcaatcgagtgagacagactagaagttcctagtgatggcttatgatagcaaatggcctcatgtcaaatatttagatgtaattttgtgtaagaaatacagactggatgtaccaccaactactacctgtaatgacaggcctgtccaacacatctcccttttccatgactgtggtagccagcatcggaaagaacgctgatttaaagaggtcgcttgggaattttattgacacagtaccatttaatggggaggacaaaatggggcaggggagggagaagtttctgtcgttaaaaacagatttggaaagactggactctaaattctgttgattaaagatgagctttgtctacttcaaaagtttgtttgcttaccccttcagcctccaattttttaagtgaaaatataactaataacatgtgaaaagaatagaagctaaggtttagataaatattgagcagatctataggaagattgaacctgaatattgccattatgcttgacatggtttccaaaaaatggtactccacatacttcagtgagggtaagtattttcctgttgtcaagaatagcattgtaaaagcattttgtaataataaagaatagctttaatgatatgcttgtaactaaaataattttgtaatgtatcaaatacatttaaaacattaaaatataatctctataataaaaaaaaaaa

SEQ ID NO: 315772 - DNA, 2321 bp, Homo sapiens
ggcgccacggcgggagacaggtgttgcggccccgcagcgcccgcgcgctcctctccccgactcggagcccctcggcggcgcccggcccaggacccgcctaggagcgcaggagccccagcgcagagaccccaacgccgagacccccgccccggccccgccgcgcttcctcccgacgcagagcaaaccgcccagagtagaagatggattggggcacgctgcagacgatcctggggggtgtgaacaaacactccaccagcattggaaagatctggctcaccgtcctcttcatttttcgcattatgatcctcgttgtggctgcaaaggaggtgtggggagatgagcaggccgactttgtctgcaacaccctgcagccaggctgcaagaacgtgtgctacgatcactacttccccatctcccacatccggctatgggccctgcagctgatcttcgtgtccacgccagcgctcctagtggccatgcacgtggcctaccggagacatgagaagaagaggaagttcatcaagggggagataaagagtgaatttaaggacatcgaggagatcaaaacccagaaggtccgcatcgaaggctccctgtggtggacctacacaagcagcatcttcttccgggtcatcttcgaagccgccttcatgtacgtcttctatgtcatgtacgacggcttctccatgcagcggctggtgaagtgcaacgcctggccttgtcccaacactgtggactgctttgtgtcccggcccacggagaagactgtcttcacagtgttcatgattgcagtgtctggaatttgcatcctgctgaatgtcactgaattgtgttatttgctaattagatattgttctgggaagtcaaaaaagccagtttaacgcattgcccagttgttagattaagaaatagacagcatgagagggatgaggcaacccgtgctcagctgtcaaggctcagtcgccagcatttcccaacacaaagattctgaccttaaatgcaaccatttgaaacccctgtaggcctcaggtgaaactccagatgccacaatggagctctgctcccctaaagcctcaaaacaaaggcctaattctatgcctgtcttaattttctttcacttaagttagttccactgagaccccaggctgttaggggttattggtgtaaggtactttcatattttaaacagaggatatcggcatttgtttctttctctgaggacaagagaaaaaagccaggttccacagaggacacagagaaggtttgggtgtcctcctggggttctttttgccaactttccccacgttaaaggtgaacattggttctttcatttgctttggaagttttaatctctaacagtggacaaagttaccagtgccttaaactctgttacactttttggaagtgaaaactttgtagtatgataggttattttgatgtaaagatgttctggataccattatatgttccccctgtttcagaggctcagattgtaatatgtaaatggtatgtcattcgctactatgatttaatttgaaatatggtcttttggttatgaatactttgcagcacagctgagaggctgtctgttgtattcattgtggtcatagcacctaacaacattgtagcctcaatcgagtgagacagactagaagttcctagtgatggcttatgatagcaaatggcctcatgtcaaatatttagatgtaattttgtgtaagaaatacagactggatgtaccaccaactactacctgtaatgacaggcctgtccaacacatctcccttttccatgactgtggtagccagcatcggaaagaacgctgatttaaagaggtcgcttgggaattttattgacacagtaccatttaatggggaggacaaaatggggcaggggagggagaagtttctgtcgttaaaaacagatttggaaagactggactctaaattctgttgattaaagatgagctttgtctacttcaaaagtttgtttgcttaccccttcagcctccaattttttaagtgaaaatataactaataacatgtgaaaagaatagaagctaaggtttagataaatattgagcagatctataggaagattgaacctgaatattgccattatgcttgacatggtttccaaaaaatggtactccacatacttcagtgagggtaagtattttcctgttgtcaagaatagcattgtaaaagcattttgtaataataaagaatagctttaatgatatgcttgtaactaaaataattttgtaatgtatcaaatacatttaaaacattaaaatataatctctataataaaaaaaaaaa

SEQ ID NO: 315773 - DNA, 1346 bp, Homo sapiens
gcctcagcctcccgagtagctgcgactacaggcgcctccaccacgcctggctaatttttttgtatttttagtagagacagggtttcacctgttagccaggatggtctcgatcccctgacctcgtgatccccccaccttggcctcccaaagtgctgggattccaggagtgagccaccgagcctgggccaccgccgatagttttccactttcccgccaggcccgacgccgctctgacgccactgaggtgcgccacgacgtgacgtcaacgttcgcgccggaagtggaagaccaggcagcccagctgaaggcagtaagctcggctcacagtcgcaggagagttctggggtacacgggcaaaggggcttgagaaggcccggaggcgaagccgaagagaagcaactgtgccccggagaagagaagctcgcccattccagactgggaaccagctttcagtgaagatggcagggccagaactgttgctcgactccaacatccgcctctgggtggtcctacccatcgttatcatcactttcttcgtaggcatgatccgccactacgtgtccatcctgctgcagagcgacaagaagctcacccaggaacaagtatctgacagtcaagtcctaattcgaagcagagtcctcagggaaaatggaaaatacattcccaaacagtctttcttgacacgaaaatattatttcaacaacccagaggatggatttttcaaaaaaactaaacggaaggtagtgccaccttctcctatgactgatcctactatgttgacagacatgatgaaagggaatgtaacaaatgtcctccctatgattcttattggtggatggatcaacatgacattctcaggctttgtcacaaccaaggtcccatttccactgaccctccgttttaagcctatgttacagcaaggaatcgagctactcacattagatgcatcctgggtgagttctgcatcctggtacttcctcaatgtatttgggcttcggagcatttactctctgattctgggccaagataatgccgctgaccaatcacgaatgatgcaggagcagatgacgggagcagccatggccatgcccgcagacacaaacaaagctttcaagacagagtgggaagctttggagctgacggatcaccagtgggcactagatgatgtcgaagaagagctcatggccaaagacctccacttcgaaggcatgttcaaaaaggaattacagacctctattttttgaagaccgagcagggattagctgtgtcaggaacttggagttgcacttaaccttgtaactttgtttggagctggcacctcttgaaataaaaaggaggatgcacga

SEQ ID NO: 315774 - DNA, 2490 bp, Homo sapiens
  misc_feature (1330)..(1330): n is a, c, g, or t
  misc_feature (1340)..(1340): n is a, c, g, or t
  misc_feature (1476)..(1476): n is a, c, g, or t
cattgaaactccactgaaaatgccatgggtggtttatggcaacttttacatgagtctagcaaaaggaaagaatgtgtcacctcttttctatcacaattgggggcttaagaatgcaggggtggatgtatcaacccccagaaagttacaagtttaagccaggaattctggccaggcaatcatttttagtaatacccttgagcttatgggagtggaagtttgtatttttttttttccaaagtacattactactaatgataatagttttcattagttctagtcactgggcttagcgttttccatattttaccctcatagcaacctatgaaacctgtgtaggaattgacatttgatgacaaggtctgttcaaatccagcacccatgtgttacttaccactctttataattttttaaaagagatttctccttctgaataccactatttttttttgaatggcagaataagaaaaattaaaatctgaaaagctcttagaaaatactgctacaatatctggaacctagtaatgctgcttcatgtagcctctccagactcttgcctgtggcttcccaaagactggcataaacaagaggaaaagaaaaatggacaaaatggggattactagtggtaatcttgactacttggtttgagcagagccctctaggatgtgtgggaggagcaggaaaggccagaggctgggaaggctgggccatgcacagttctgctagagaagaaaagctgtacattatatgagtagcatgagtctattctacttttaccttcagtctcattgggctaaacaaaaacttcatgggttggagaaaagcttatttatcttttctcagcatccagagaggcatgtgactgaaatgcagtcatggacagacgcgagactggaacctgagtgtacaattaccactgtggtgagatcagcaacattgtattcagacaggccatttacttacctgcagcctatggagtaaccagaatagactcttgcccttatgtgacccacttgttggaatgagtgtggatctttccatttatctatcacttcccatatgcatttttgtttttagtttttattatatgcaagcatatttattttatggaggttgagtaggaaacctaagctaaaggaagcctcagtgatatagttcaaaacttggaatggctctcccagtagctatagtcctcggtactgtatttcctgaaatccatgtctcatcccttcttgtaagtatggaacacacccagtggctcacgcctgtaatcccagcactttgggaggctgaggtgggcggatcacttgaggtcaggagttcgagaccagcntggccaacanggtgagaccccatctctaataaaaatataaaaattagccaggcatggtggtgtgtgcctgtagtcccagctactcaggaggttgaggcaggagaatctcttgaacccaggtggcagaggttgcagtgagccaagantgcgccactgcactccagcctgggtaacagggtgagactccgtctcaaaaaaaaaaaaagtatggaacacaccaacacttgtgatttcctctagggaatggaattcagaatgggagtcacctttggattttttgaaatatagttctgtattggtgagactgctttaacaacttgtatttcttctgtggttgtgctttggatgaatatagcccatccaaggtgacttctttacaaacactgaacaactttgggtggtagggaagtgggaactgcattactctctgatataataactaaccacaccattttcattttgctttgccagggtgagttctgcatcctggtacttcctcaatgtatttgggcttcggagcatttactctctgattctgggccaagataatggtaagaagcatgtcaggtttactaagcaaatacttccatagatgaatcatccatattagagccagaaaagtcttgtaggttgtgctgtttgttaccatagtcaaataaaatgtttccttccttaagtttctgaggtattctgaaagagtcttaaaaattccgggggtcaaactgaagatctcaattctctctggcaatgactgggacagtattttgattccccagagtctgataccatcatgtgagggatccagcaccagcagtgtaagcctgtgaacctaaagcttaaagaaggcttggtttgtcagttcattgactagagcccttgccagtactaatccttgctctcttgtttactggctgggacctcagaaaagttacttaacaagttacttaacttcgaattctctatttacttatctgtaaataaggactttattagttaacctgtggggttgttaggaacagatgaggaaaaatatgcaaagcacttagtgaagtacttggcatgcagtagttgctcaataactggtggctgttattgttgaaatttgaaataaagtttagagcttcctttagtgatctctcttttgctgttactgtccccat

SEQ ID NO: 315775 - DNA, 831 bp, Homo sapiens
gcctcagcctcccgagtagctgcgactacaggcgcctccaccacgcctggctaatttttttgtatttttagtagagacagggtttcacctgttagccaggatggtctcgatcccctgacctcgtgatccccccaccttggcctcccaaagtgctgggattccaggagtgagccaccgagcctgggccaccgccgatagttttccactttcccgccaggcccgacgccgctctgacgccactgaggtgcgccacgacgtgacgtcaacgttcgcgccggaagtggaagaccaggcagcccagctgaaggcagtaagctcggctcacagtcgcaggagagttctggggtacacgggcaaaggggcttgagaaggcccggaggcgaagccgaagagaagcaactgtgccccggagaagagaagctcgcccattccagactgggaaccagctttcagtgaagatggcagggccagaactgttgctcgactccaacatccgcctctgggtggtcctacccatcgttatcatcactttcttcgtaggcatgatccgccactacgtgtccatcctgctgcagagcgacaagaagctcacccaggaacaagtatctgacagtcaagtcctaattcgaagcagagtcctcagggaaaatggaaaatacattcccaaacagtctttcttgacacgaaaatattatttcaacaacccagtgtggagagagctccacactggccatctgatctataaatgcggtggcatcgacaaaagaaccattgaaaaatttgagaaggaggctgctgagatgggacagggctccttcaagtatgcctggg

SEQ ID NO: 315776 - DNA, 850 bp, Homo sapiens
cacccgggtctccccaggtagggcttcggccattcacttcggctggcccaatgttagcccgtgcccattcccgattgatccgggcccggtttcgggactcaccatggctcagcccgcagaccctatctagcctttcaacagagtgggaagctttggagctgacggatcaccagtgggcactagatgatgtcgaagaagagctcatggccaaagacctccacttcgaaggcatgttcaaaaaggaattacagacctctattttttgaagaccgagcagggattagctgtgtcaggaacttggagttgcacttaaccttgtaactttgtttggagctggcacctcttgaaataaaaaggaggatgcacgagctggcaggcatgcagcaaggcttgttcttgtctgggctgggttcccctttatgtttgaaactagaggaaataggagtatgctgggcaacttgttatttttaaaatgttgtaaatgttccttctggtgactctagtaatgaaagtcagagaaagggggaaacctcaggctactgataatatataaaatcttggccaggcgcagtggctcacgcctgtaatcccaggattttgggaggctgaggcgggtgggtcacgagatcaggagttcaagatcagcctggccaagatggtgaaaccccatctctactaaaaatacaaaaaaaaattagccgggcgtggtggtgggcacctgtaatcccagctacttgggaggctgaggcagagaactgcttaaacctaggaggcggaggatgcagtgagctgacatcgtgccactgcgctccagcctgggcgacagagcaaaactccctgaaaaaaaaaa

SEQ ID NO: 315777 - DNA, 956 bp, Homo sapiens
gcctcagcctcccgagtagctgcgactacaggcgcctccaccacgcctggctaatttttttgtatttttagtagagacagggtttcacctgttagccaggatggtctcgatcccctgacctcgtgatccccccaccttggcctcccaaagtgctgggattccaggagtgagccaccgagcctgggccaccgccgatagttttccactttcccgccaggcccgacgccgctctgacgccactgaggtgcgccacgacgtgacgtcaacgttcgcgccggaagtggaagaccaggcagcccagctgaaggcagtaagctcggctcacagtcgcaggagagttctggggtacacgggcaaaggggcttgagaaggcccggaggcgaagccgaagagaagcaactgtgccccggagaagagaagctcgcccattccagactgggaaccagctttcagtgaagatggcagggccagaactgttgctcgactccaacatccgcctctgggtggtcctacccatcgttatcatcactttcttcgtaggcatgatccgccactacgtgtccatcctgctgcagagcgacaagaagctcacccaggaacaagtatctgacaggtcagcgccctcccttctccagcctacctcacaccgccgtaccttgggcaaaaaagtgcaggagttatgtcaatttgcctaggttcacttcgcgccccctctgacagggtgaccttacccgttacctctgtgtttcacttttgtcctctgtgaaatggggatgataacagtacctgcttcatagacaggtaggaatcaaattaggtgatgtctgtaagtcccttagcacaggatctaggacgtattgagtgttgaaaaaaactgtactgttaatcctttaggttagtcgccgaccctcggtgggtttacctatgaactattccatcccacccttccgtgatct

SEQ ID NO: 315778 - DNA, 2112 bp, Homo sapiens
  misc_feature (1330)..(1330): n is a, c, g, or t
  misc_feature (1340)..(1340): n is a, c, g, or t
  misc_feature (1476)..(1476): n is a, c, g, or t
cattgaaactccactgaaaatgccatgggtggtttatggcaacttttacatgagtctagcaaaaggaaagaatgtgtcacctcttttctatcacaattgggggcttaagaatgcaggggtggatgtatcaacccccagaaagttacaagtttaagccaggaattctggccaggcaatcatttttagtaatacccttgagcttatgggagtggaagtttgtatttttttttttccaaagtacattactactaatgataatagttttcattagttctagtcactgggcttagcgttttccatattttaccctcatagcaacctatgaaacctgtgtaggaattgacatttgatgacaaggtctgttcaaatccagcacccatgtgttacttaccactctttataattttttaaaagagatttctccttctgaataccactatttttttttgaatggcagaataagaaaaattaaaatctgaaaagctcttagaaaatactgctacaatatctggaacctagtaatgctgcttcatgtagcctctccagactcttgcctgtggcttcccaaagactggcataaacaagaggaaaagaaaaatggacaaaatggggattactagtggtaatcttgactacttggtttgagcagagccctctaggatgtgtgggaggagcaggaaaggccagaggctgggaaggctgggccatgcacagttctgctagagaagaaaagctgtacattatatgagtagcatgagtctattctacttttaccttcagtctcattgggctaaacaaaaacttcatgggttggagaaaagcttatttatcttttctcagcatccagagaggcatgtgactgaaatgcagtcatggacagacgcgagactggaacctgagtgtacaattaccactgtggtgagatcagcaacattgtattcagacaggccatttacttacctgcagcctatggagtaaccagaatagactcttgcccttatgtgacccacttgttggaatgagtgtggatctttccatttatctatcacttcccatatgcatttttgtttttagtttttattatatgcaagcatatttattttatggaggttgagtaggaaacctaagctaaaggaagcctcagtgatatagttcaaaacttggaatggctctcccagtagctatagtcctcggtactgtatttcctgaaatccatgtctcatcccttcttgtaagtatggaacacacccagtggctcacgcctgtaatcccagcactttgggaggctgaggtgggcggatcacttgaggtcaggagttcgagaccagcntggccaacanggtgagaccccatctctaataaaaatataaaaattagccaggcatggtggtgtgtgcctgtagtcccagctactcaggaggttgaggcaggagaatctcttgaacccaggtggcagaggttgcagtgagccaagantgcgccactgcactccagcctgggtaacagggtgagactccgtctcaaaaaaaaaaaaagtatggaacacaccaacacttgtgatttcctctagggaatggaattcagaatgggagtcacctttggattttttgaaatatagttctgtattggtgagactgctttaacaacttgtatttcttctgtggttgtgctttggatgaatatagcccatccaaggtgacttctttacaaacactgaacaactttgggtggtagggaagtgggaactgcattactctctgatataataactaaccacaccattttcattttgctttgccagggtgagttctgcatcctggtacttcctcaatgtatttgggcttcggagcatttactctctgattctgggccaagataatgacagagtgggaagctttggagctgacggatcaccagtgggcactagatgatgtcgaagaagagctcatggccaaagacctccacttcgaaggcatgttcaaaaaggaattacagacctctattttttgaagaccgagcagggattagctgtgtcaggaacttggagttgcacttaaccttgtaactttgtttggagctggcacctcttgaaataaaaaggaggatgcacga

SEQ ID NO: 315779 - DNA, 2012 bp, Homo sapiens
  misc_feature (1361)..(1361): n is a, c, g, or t
  misc_feature (1365)..(1365): n is a, c, g, or t
gcctcagcctcccgagtagctgcgactacaggcgcctccaccacgcctggctaatttttttgtatttttagtagagacagggtttcacctgttagccaggatggtctcgatcccctgacctcgtgatccccccaccttggcctcccaaagtgctgggattccaggagtgagccaccgagcctgggccaccgccgatagttttccactttcccgccaggcccgacgccgctctgacgccactgaggtgcgccacgacgtgacgtcaacgttcgcgccggaagtggaagaccaggcagcccagctgaaggcagtaagctcggctcacagtcgcaggagagttctggggtacacgggcaaaggggcttgagaaggcccggaggcgaagccgaagagaagcaactgtgccccggagaagagaagctcgcccattccagactgggaaccagctttcagtgaagatggcagggccagaactgttgctcgactccaacatccgcctctgggtggtcctacccatcgttatcatcactttcttcgtaggcatgatccgccactacgtgtccatcctgctgcagagcgacaagaagctcacccaggaacaagtatctgacagtcaagtcctaattcgaagcagagtcctcagggaaaatggaaaatacattcccaaacagtctttcttgacacgaaaatattatttcaacaacccagaggatggatttttcaaaaaaactaaacggaaggtagtgccaccttctcctatgactgatcctactatgttgacagacatgatgaaagggaatgtaacaaatgtcctccctatgattcttattggtggatggatcaacatgacattctcaggctttgtcacaaccaaggtcccatttccactgaccctccgttttaagcctatgttacagcaaggaatcgagctactcacattagatgcatcctgggtgagttctgcatcctggtacttcctcaatgtatttgggcttcggagcatttactctctgattctgggccaagataatgccgctgaccaatcacgaatgatgcaggagcagatgacgggagcagccatggccatgcccgcagacacaaacaaagctttcaagacagagtgggaagctttggagctgacggatcaccagtgggcactagatgatgtcgaagaagagctcatggccaaagacctccacttcgaaggcatgttcaaaaaggaattacagacctctattttttgaagaccgagcagggattagctgtgtcaggaacttggagttgcacttaaccttgtaactttgtttggagctggcacctcttgaaataaaaaggaggatgcacgaaaaaaaaaaaaaaanaaanaaaaaaaaaaaaaacacaacaaaaacaaaaacacaaacaaaaaacaaaaaaaaaaaacaaaaagggggggccccccacaccccatacccccctctagagcgggagctccaacagtcaatcggagaccaccaccacctgtcatatttctgtacaaaaacgggtcgcctaccactatcagatgtaagatacacatatcaaacacaacatgtgatattggcgccgagaccacacacacaacgcgtgttagctgaatcactcccgctccccgtgacaaacccgcccgacgacacgacgccccacaaacttgcggcgggcgcccaaccaaaaacgctagcgacccccaccccaccaacgccgacccacacgcccgaacgacggccaatcaacacaaccctcagcccgtgctcaaccgccgtcacccaccaaaccacagagccgacaccgcccgacgaccaacagttgctccgcacaccggcgcacgaacccccgcaaccacaaatccaacggggcccaccaccgaacaaccacgcccccccacaccccaaccgcaccaccaccgccacgcccccctcccaccagcgccgcccgcgccgcacccccccgccacccaccgccacgcaccccccaggcccctcccccccaacgcc

SEQ ID NO: 315780 - DNA, 1942 bp, Homo sapiens
gcctcagcctcccgagtagctgcgactacaggcgcctccaccacgcctggctaatttttttgtatttttagtagagacagggtttcacctgttagccaggatggtctcgatcccctgacctcgtgatccccccaccttggcctcccaaagtgctgggattccaggagtgagccaccgagcctgggccaccgccgatagttttccactttcccgccaggcccgacgccgctctgacgccactgaggtgcgccacgacgtgacgtcaacgttcgcgccggaagtggaagaccaggcagcccagctgaaggcagtaagctcggctcacagtcgcaggagagttctggggtacacgggcaaaggggcttgagaaggcccggaggcgaagccgaagagaagcaactgtgccccggagaagagaagctcgcccattccagactgggaaccagctttcagtgaagatggcagggccagaactgttgctcgactccaacatccgcctctgggtggtcctacccatcgttatcatcactttcttcgtaggcatgatccgccactacgtgtccatcctgctgcagagcgacaagaagctcacccaggaacaagtatctgacagaaaatatctttcaggcctggtgcaatggctcacacctataatcccagcactttggggggctgagatgggaggatcccttgagcccaggaatttgagaccaaccttggcagcatgtcaagtcctaattcgaagcagagtcctcagggaaaatggaaaatacattcccaaacagtctttcttgacacgaaaatattatttcaacaacccagaggatggatttttcaaaaaaactaaacggaaggtagtgccaccttctcctatgactgatcctactatgttgacagacatgatgaaagggaatgtaacaaatgtcctccctatgattcttattggtggatggatcaacatgacattctcaggctttgtcacaaccaaggtcccatttccactgaccctccgttttaagcctatgttacagcaaggaatcgagctactcacattagatgcatcctgggtgagttctgcatcctggtacttcctcaatgtatttgggcttcggagcatttactctctgattctgggccaagataatgccgctgaccaatcacgaatgatgcaggagcagatgacgggagcagccatggccatgcccgcagacacaaacaaagctttcaagacagagtgggaagctttggagctgacggatcaccagtgggcactagatgatgtcgaagaagagctcatggccaaagacctccacttcgaaggcatgttcaaaaaggaattacagacctctattttttgaagaccgagcagggattagctgtgtcaggaacttggagttgcacttaaccttgtaactttgtttggagctggcacctcttgaaataaaaaggaggatgcacgagctggcaggcatgcagcaaggcttgttcttgtctgggctgggttcccctttatgtttgaaactagaggaaataggagtatgctgggcaacttgttatttttaaaatgttgtaaatgttccttctggtgactctagtaatgaaagtcagagaaagggggaaacctcaggctactgataatatataaaatcttggccaggcgcagtggctcacgcctgtaatcccaggattttgggaggctgaggcgggtgggtcacgagatcaggagttcaagatcagcctggccaagatggtgaaaccccatctctactaaaaatacaaaaaaaaattagccgggcgtggtggtgggcacctgtaatcccagctacttgggaggctgaggcagagaactgcttaaacctaggaggcggaggatgcagtgagctgacatcgtgccactgcgctccagcctgggcgacagagcaaaactccctgaaaaaaaaaa

SEQ ID NO: 315781 - DNA, 1303 bp, Homo sapiens
agtggcgccatctcagctcattgcaacctctgcctcttgggctcaggtgatccttctactgcagcctcctgagtagctgggactacagtcaagtcctaattcgaagcagagtcctcagggaaaatggaaaatacattcccaaacagtctttcttgacacgaaaatattatttcaacaacccagaggatggatttttcaaaaaaactaaacggaaggtagtgccaccttctcctatgactgatcctactatgttgacagacatgatgaaagggaatgtaacaaatgtcctccctatgattcttattggtggatggatcaacatgacattctcaggctttgtcacaaccaaggtcccatttccactgaccctccgttttaagcctatgttacagcaaggaatcgagctactcacattagatgcatcctgggtgagttctgcatcctggtacttcctcaatgtatttgggcttcggagcatttactctctgattctgggccaagataatgccgctgaccaatcacgaatgatgcaggagcagatgacgggagcagccatggccatgcccgcagacacaaacaaagctttcaagacagagtgggaagctttggagctgacggatcaccagtgggcactagatgatgtcgaagaagagctcatggccaaagacctccacttcgaaggcatgttcaaaaaggaattacagacctctattttttgaagaccgagcagggattagctgtgtcaggaacttggagttgcacttaaccttgtaactttgtttggagctggcacctcttgaaataaaaaggaggatgcacgagctggcaggcatgcagcaaggcttgttcttgtctgggctgggttcccctttatgtttgaaactagaggaaataggagtatgctgggcaacttgttatttttaaaatgttgtaaatgttccttctggtgactctagtaatgaaagtcagagaaagggggaaacctcaggctactgataatatataaaatcttggccaggcgcagtggctcacgcctgtaatcccaggattttgggaggctgaggcgggtgggtcacgagatcaggagttcaagatcagcctggccaagatggtgaaaccccatctctactaaaaatacaaaaaaaaattagccgggcgtggtggtgggcacctgtaatcccagctacttgggaggctgaggcagagaactgcttaaacctaggaggcggaggatgcagtgagctgacatcgtgccactgcgctccagcctgggcgacagagcaaaactccctgaaaaaaaaaa

SEQ ID NO: 315782 - DNA, 1271 bp, Homo sapiens
gcctcagcctcccgagtagctgcgactacaggcgcctccaccacgcctggctaatttttttgtatttttagtagagacagggtttcacctgttagccaggatggtctcgatcccctgacctcgtgatccccccaccttggcctcccaaagtgctgggattccaggagtgagccaccgagcctgggccaccgccgatagttttccactttcccgccaggcccgacgccgctctgacgccactgaggtgcgccacgacgtgacgtcaacgttcgcgccggaagtggaagaccaggcagcccagctgaaggcagtaagctcggctcacagtcgcaggagagttctggggtacacgggcaaaggggcttgagaaggcccggaggcgaagccgaagagaagcaactgtgccccggagaagagaagctcgcccattccagactgggaaccagctttcagtgaagatggcagggccagaactgttgctcgactccaacatccgcctctgggtggtcctacccatcgttatcatcactttcttcgtaggcatgatccgccactacgtgtccatcctgctgcagagcgacaagaagctcacccaggaacaagtatctgacagtcaagtcctaattcgaagcagagtcctcagggaaaatggaaaatacattcccaaacagtctttcttgacacgaaaatattatttcaacaacccagaggatggatttttcaaaaaaactaaacggaaggtagtgccaccttctcctatgactgatcctactatgttgacagacatgatgaaagggaatgtaacaaatgtcctccctatgattcttattggtggatggatcaacatgacattctcaggctttgtcacaaccaaggtcccatttccactgaccctccgttttaagcctatgttacagcaaggaatcgagctactcacattagatgcatcctgggtgagttctgcatcctggtacttcctcaatgtatttgggcttcggacagccatggccatgcccgcagacacaaacaaagctttcaagacagagtgggaagctttggagctgacggatcaccagtgggcactagatgatgtcgaagaagagctcatggccaaagacctccacttcgaaggcatgttcaaaaaggaattacagacctctattttttgaagaccgagcagggattagctgtgtcaggaacttggagttgcacttaaccttgtaactttgtttggagctggcacctcttgaaataaaaaggaggatgcacga

SEQ ID NO: 315783 - DNA, 1239 bp, Homo sapiens
gcctcagcctcccgagtagctgcgactacaggcgcctccaccacgcctggctaatttttttgtatttttagtagagacagggtttcacctgttagccaggatggtctcgatcccctgacctcgtgatccccccaccttggcctcccaaagtgctgggattccaggagtgagccaccgagcctgggccaccgccgatagttttccactttcccgccaggcccgacgccgctctgacgccactgaggtgcgccacgacgtgacgtcaacgttcgcgccggaagtggaagaccaggcagcccagctgaaggcagtaagctcggctcacagtcgcaggagagttctggggtacacgggcaaaggggcttgagaaggcccggaggcgaagccgaagagaagcaactgtgccccggagaagagaagctcgcccattccagactgggaaccagctttcagtgaagatggcagggccagaactgttgctcgactccaacatccgcctctgggtggtcctacccatcgttatcatcactttcttcgtaggcatgatccgccactacgtgtccatcctgctgcagagcgacaagaagctcacccaggaacaagtatctgacagtcaagtcctaattcgaagcagagtcctcagggaaaatggaaaatacattcccaaacagtctttcttgacacgaaaatattatttcaacaacccagaggatggatttttcaaaaaaactaaacggaaggtagtgccaccttctcctatgactggtatgtttgttcccttcactcatctttaaggaagatttttaacatgggtatttgagtggggtggggtaggcagggagggtgtcattttatttaaatgttaaattgcaaaagatagtaatcttagaccttagaaatcatctgatacagggatctatggaagtggaattctctttttcagttagattttctgagaaccccaatgtataaagtggattaaaaaaaatagttctcagctgatggagtggggaggccagagctattgtccctgggtctctccttattgctgttctcaggacccaggattctagggagcacagttggtaaagcattccagcctggctgtcacccagtgcctggatccccttccaatagatggctgcccagcttctgcctaaatgaggaagagtgcagtacttccaagatgtgccattttgttgactttgttgttagacgtgattgtttggtctaccctac

SEQ ID NO: 315784 - DNA, 1828 bp, Homo sapiens
gcctcagcctcccgagtagctgcgactacaggcgcctccaccacgcctggctaatttttttgtatttttagtagagacagggtttcacctgttagccaggatggtctcgatcccctgacctcgtgatccccccaccttggcctcccaaagtgctgggattccaggagtgagccaccgagcctgggccaccgccgatagttttccactttcccgccaggcccgacgccgctctgacgccactgaggtgcgccacgacgtgacgtcaacgttcgcgccggaagtggaagaccaggcagcccagctgaaggcagtaagctcggctcacagtcgcaggagagttctggggtacacgggcaaaggggcttgagaaggcccggaggcgaagccgaagagaagcaactgtgccccggagaagagaagctcgcccattccagactgggaaccagctttcagtgaagatggcagggccagaactgttgctcgactccaacatccgcctctgggtggtcctacccatcgttatcatcactttcttcgtaggcatgatccgccactacgtgtccatcctgctgcagagcgacaagaagctcacccaggaacaagtatctgacagtcaagtcctaattcgaagcagagtcctcagggaaaatggaaaatacattcccaaacagtctttcttgacacgaaaatattatttcaacaacccagaggatggatttttcaaaaaaactaaacggaaggtagtgccaccttctcctatgactgatcctactatgttgacagacatgatgaaagggaatgtaacaaatgtcctccctatgattcttattggtggatggatcaacatgacattctcaggctttgtcacaaccaaggtcccatttccactgaccctccgttttaagcctatgttacagcaaggaatcgagctactcacattagatgcatcctgggtgagttctgcatcctggtacttcctcaatgtatttgggcttcggagcatttactctctgattctgggccaagataatgccgctgaccaatcacgaatgatgcaggagcagatgacgggagcagccatggccatgcccgcagacacaaacaaagctttcaagacagagtgggaagctttggagctgacggatcaccagtgggcactagatgatgtcgaagaagagctcatggccaaagacctccacttcgaaggcatgttcaaaaaggaattacagacctctattttttgaagaccgagcagggattagctgtgtcaggaacttggagttgcacttaaccttgtaactttgtttggagctggcacctcttgaaataaaaaggaggatgcacgagctggcaggcatgcagcaaggcttgttcttgtctgggctgggttcccctttatgtttgaaactagaggaaataggagtatgctgggcaacttgttatttttaaaatgttgtaaatgttccttctggtgactctagtaatgaaagtcagagaaagggggaaacctcaggctactgataatatataaaatcttggccaggcgcagtggctcacgcctgtaatcccaggattttgggaggctgaggcgggtgggtcacgagatcaggagttcaagatcagcctggccaagatggtgaaaccccatctctactaaaaatacaaaaaaaaattagccgggcgtggtggtgggcacctgtaatcccagctacttgggaggctgaggcagagaactgcttaaacctaggaggcggaggatgcagtgagctgacatcgtgccactgcgctccagcctgggcgacagagcaaaactccctgaaaaaaaaaa

SEQ ID NO: 315785 - DNA, 707 bp, Homo sapiens
gcctcagcctcccgagtagctgcgactacaggcgcctccaccacgcctggctaatttttttgtatttttagtagagacagggtttcacctgttagccaggatggtctcgatcccctgacctcgtgatccccccaccttggcctcccaaagtgctgggattccaggagtgagccaccgagcctgggccaccgccgatagttttccactttcccgccaggcccgacgccgctctgacgccactgaggtgcgccacgacgtgacgtcaacgttcgcgccggaagtggaagaccaggcagcccagctgaaggcagtaagctcggctcacagtcgcaggagagttctggggtacacgggcaaaggggcttgagaaggcccggaggcgaagccgaagagaagcaactgtgccccggagaagagaagctcgcccattccagactgggaaccagctttcagtgaagatggcagggccagaactgttgctcgactccaacatccgcctctgggtggtcctacccatcgttatcatcactttcttcgtaggcatgatccgccactacgtgtccatcctgctgcagagcgacaagaagctcacccaggaacaagtatctgacagtcaagtcctaattcgaagcagagtcctcagggaaaatggaaaatacattcccaaacagtctttcttgacacgtatatttcaaccccagaggtgg

SEQ ID NO: 315786 - DNA, 508 bp, Homo sapiens
tccatcccacccgttcgttgagaagagtgccaggtgcgttacagcgtcacacagggtgacatttaggacttcacaccaagccttctgggtattgggctttttccactatactacagcgatcactttatctttctgtagcattagtttcagaactgaccagagccagcaccccaccctggagcgaaccttaagaagtcagcttactggccgggcatggtggctcatgcctgtactcccagcactttgggaggccgaggcggacggatcacgaggtcaggagatcgagaccatcctggctaacatggtgaaaccccgtctctactaaaaatacaaaaaattagctgagcgtggtatgctgggcgcctgtagtcccagctactcgggaggctgaggcagtggaattgcttgaacccaggaggcggagcttgcagtgagccaagatcgcgccactgcacttcaacctgggtgacagagcaagactctgtctcaaaaaaacagaaaagaagtc

SEQ ID NO: 315787 - DNA, 1312 bp, Homo sapiens
gcctcagcctcccgagtagctgcgactacaggcgcctccaccacgcctggctaatttttttgtatttttagtagagacagggtttcacctgttagccaggatggtctcgatcccctgacctcgtgatccccccaccttggcctcccaaagtgctgggattccaggagtgagccaccgagcctgggccaccgccgatagttttccactttcccgccaggcccgacgccgctctgacgccactgaggtgcgccacgacgtgacgtcaacgttcgcgccggaagtggaagaccaggcagcccagctgaaggcagtaagctcggctcacagtcgcaggagagttctggggtacacgggcaaaggggcttgagaaggcccggaggcgaagccgaagagaagcaactgtgccccggagaagagaagctcgcccattccagactgggaaccagctttcagtgaagatggcagggccagaactgttgctcgactccaacatccgcctctgggtggtcctacccatcgttatcatcactttcttcgtaggcatgatccgccactacgtgtccatcctgctgcagagcgacaagaagctcacccaggaacaagtatctgacagtcaagtcctaattcgaagcagagtcctcagggaaaatggaaaatacattcccaaacagtctttcttgacacgaaaatattatttcaacaacccagaggatggatttttcaaaaaaactaaacggaaggtagtgccaccttctcctatgactgatcctactatgttgacagacatgatgaaagggaatgtaacaaatgtcctccctatgattcttattggtggatggatcaacatgacattctcaggctttgtcacaaccaaggtcccatttccactgaccctccgttttaagcctatgttacagcaaggaatcgagctactcacattagatgcatcctgggtgagttctgcatcctggtacttcctcaatgtatttgggcttcggagcatttactctctgattctgggccaagataatgccgctgaccaatcacgaatgatgcaggagcagatgacgggagcagccatggccatgcccgcagacacaaacaaagctttcaaggtatactccttcacctttcaaagctgcagcaatgctctgaaaggtgttaccaagagctattttaaaaatagcttccttgaagggagtgttgtgtggttccatcgttttaatttaaacttagtaaaaacatagtttacacgtctctctttcctgagacagaatcatctattaagtaaatggaaattcttggtgctttt

SEQ ID NO: 315788 - DNA, 1523 bp, Homo sapiens
aacaggtattaaaccaaagctgtaaaatacatgaatgaaatatattagactaggtttggggatagattatgtgtaaaaaatggttctcagacttgacaaatatactactgacattttggaaaggaagaaacactgattcttaagaatttggaactctggtttgagaagtactgactttaaagttttattccaagaaaatatctttcaggcctggtgcaatggctcacacctataatcccagcactttggggggctgagatgggaggatcccttgagcccaggaatttgagaccaaccttggcagcatgtcaagtcctaattcgaagcagagtcctcagggaaaatggaaaatacattcccaaacagtctttcttgacacgaaaatattatttcaacaacccagaggatggatttttcaaaaaaactaaacggaaggtagtgccaccttctcctatgactgatcctactatgttgacagacatgatgaaagggaatgtaacaaatgtcctccctatgattcttattggtggatggatcaacatgacattctcaggctttgtcacaaccaaggtcccatttccactgaccctccgttttaagcctatgttacagcaaggaatcgagctactcacattagatgcatcctgggtgagttctgcatcctggtacttcctcaatgtatttgggcttcggagcatttactctctgattctgggccaagataatgccgctgaccaatcacgaatgatgcaggagcagatgacgggagcagccatggccatgcccgcagacacaaacaaagctttcaagacagagtgggaagctttggagctgacggatcaccagtgggcactagatgatgtcgaagaagagctcatggccaaagacctccacttcgaaggcatgttcaaaaaggaattacagacctctattttttgaagaccgagcagggattagctgtgtcaggaacttggagttgcacttaaccttgtaactttgtttggagctggcacctcttgaaataaaaaggaggatgcacgagctggcaggcatgcagcaaggcttgttcttgtctgggctgggttcccctttatgtttgaaactagaggaaataggagtatgctgggcaacttgttatttttaaaatgttgtaaatgttccttctggtgactctagtaatgaaagtcagagaaagggggaaacctcaggctactgataatatataaaatcttggccaggcgcagtggctcacgcctgtaatcccaggattttgggaggctgaggcgggtgggtcacgagatcaggagttcaagatcagcctggccaagatggtgaaaccccatctctactaaaaatacaaaaaaaaattagccgggcgtggtggtgggcacctgtaatcccagctacttgggaggctgaggcagagaactgcttaaacctaggaggcggaggatgcagtgagctgacatcgtgccactgcgctccagcctgggcgacagagcaaaactccctgaaaaaaaaaa

SEQ ID NO: 315789 - DNA, 1577 bp, Homo sapiens
  misc_feature (1286)..(1286): n is a, c, g, or t
  misc_feature (1290)..(1290): n is a, c, g, or t
gcctcagcctcccgagtagctgcgactacaggcgcctccaccacgcctggctaatttttttgtatttttagtagagacagggtttcacctgttagccaggatggtctcgatcccctgacctcgtgatccccccaccttggcctcccaaagtgctgggattccaggagtgagccaccgagcctgggccaccgccgatagttttccactttcccgccaggcccgacgccgctctgacgccactgaggtgcgccacgacgtgacgtcaacgttcgcgccggaagtggaagaccaggcagcccagctgaaggcagtaagctcggctcacagtcgcaggagagttctggggtacacgggcaaaggggcttgagaaggcccggaggcgaagccgaagagaagcaactgtgccccggagaagagaagctcgcccattccagactgggaaccagctttcagtgaagatggcagggccagaactgttgctcgactccaacatccgcctctgggtggtcctacccatcgttatcatcactttcttcgtaggcatgatccgccactacgtgtccatcctgctgcagagcgacaagaagctcacccaggaacaagtatctgacagtcaagtcctaattcgaagcagagtcctcagggaaaatggaaaatacattcccaaacagtctttcttgacacgaaaatattatttcaacaacccagaggatggatttttcaaaaaaactaaacggaaggtagtgccaccttctcctatgactgatcctactatgttgacagacatgatgaaagggaatgtaacaaatgtcctccctatgattcttattggtggatggatcaacatgacattctcaggctttgtcacaaccaaggtcccatttccactgaccctccgttttaagcctatgttacagcaaggaatcgagctactcacattagatgcatcctgggtgagttctgcatcctggtacttcctcaatgtatttgggcttcggacagccatggccatgcccgcagacacaaacaaagctttcaagacagagtgggaagctttggagctgacggatcaccagtgggcactagatgatgtcgaagaagagctcatggccaaagacctccacttcgaaggcatgttcaaaaaggaattacagacctctattttttgaagaccgagcagggattagctgtgtcaggaacttggagttgcacttaaccttgtaactttgtttggagctggcacctcttgaaataaaaaggaggatgcacgaaaaaaaaaaaaaaanaaanaaaaaaaaaaaaaaattttgggcccccccgcggccccacaagaaagaaacttattaaagaaaccaaacccgcgttggtggagcgcgcgggcggacccccaaaagagagtatcacgaacctgttgggcacgaaacgagtttcccaaggaagaacccccgggtcacggaacgaggggggaactccccaccagataaaaaagggccggggacacaccgaagcctctggaacaacccgagagggaacagagaccaagggggcaaacaggggtccaggacacgaataaatgc

SEQ ID NO: 315790 - DNA, 912 bp, Homo sapiens
gccagccagtgaggctgtagtccagttctctaatctgtgtgaagcccattcttccccttgggtgctggggtgcttgctgagtcctggcactcatgtaagtgtgtcttatgctacagccgctgaccaatcacgaatgatgcaggagcagatgacgggagcagccatggccatgcccgcagacacaaacaaagctttcaagacagagtgggaagctttggagctgacggatcaccagtgggcactagatgatgtcgaagaagagctcatggccaaagacctccacttcgaaggcatgttcaaaaaggaattacagacctctattttttgaagaccgagcagggattagctgtgtcaggaacttggagttgcacttaaccttgtaactttgtttggagctggcacctcttgaaataaaaaggaggatgcacgagctggcaggcatgcagcaaggcttgttcttgtctgggctgggttcccctttatgtttgaaactagaggaaataggagtatgctgggcaacttgttatttttaaaatgttgtaaatgttccttctggtgactctagtaatgaaagtcagagaaagggggaaacctcaggctactgataatatataaaatcttggccaggcgcagtggctcacgcctgtaatcccaggattttgggaggctgaggcgggtgggtcacgagatcaggagttcaagatcagcctggccaagatggtgaaaccccatctctactaaaaatacaaaaaaaaattagccgggcgtggtggtgggcacctgtaatcccagctacttgggaggctgaggcagagaactgcttaaacctaggaggcggaggatgcagtgagctgacatcgtgccactgcgctccagcctgggcgacagagcaaaactccctgaaaaaaaaaa

SEQ ID NO: 315791 - DNA, 2138 bp, Homo sapiens
cggtatcttcctcgcggtggacatcttgtcggctcttaggtggaaccatcggagcagaagctcggggttgctgggcggttccgaggtgacggaagcgggagggtgcgggagaagtcgctgttcgctctgcggagtggctcgccagcgaagaccccgcctgcgcccccggggacggacgaccgcggtgccagggtcccgcgacctgggaccccctcgcggctccgggtggtctacgaactgtgatggcggcggccgcggtgatgggcccggcgcagatcctctgtggttgttgaattgtaacaagagagagaactctggctgcctgagagggcatgactctagtcacagcaggaggggcttggacaggccctggttgttggcatgaagtgaaggatgaagagtcatcttctgaacagagcatttctatagcagtgtcacatgttaatacttccaaggcaggtttgcccgcacagacggctctcccttgtgacatatgtggccccatcttgaaagatattttgcacctggatgaacaccagggtacacaccatggactgaaacttcacacatgtggggcatgtgggagacaattctggttcagtgcaaaccttcatcagtaccagaagtgttacagtatagagcaacccttaagaagggataaaagtgaggcctcaattgtgaagaactgcacagttagcaaagaacctcatccgtcagagaagccctttacgtgtaaggaggagcagaaaaacttccaggctactttgggtggctgccaacaaaaggccatccacagtaagaggaagacacacaggagcactgagagtggggatgcatttcatggtgaacaaatgcattacaagtgcagtgaatgtgggaaagctttcagccgcaaagacacacttgtccagcaccagagaattcatagtggagagaagccttatgagtgcagcgaatgtgggaaagccttcagccgcaaagctacacttgtccagcatcagagaatccatactggagaaaggccttatgaatgcagcgaatgtggaaaaaccttcagtcgaaaagacaaccttactcagcacaagagaatccacactggagaaatgccttataagtgcaatgaatgtgggaaatattttagccatcactccaatctaattgtacaccagagagttcacaatggagcaaggccttataagtgcagtgattgtgggaaagtcttcagacacaaatctacacttgttcagcatgagagtattcacactggagaaaatccttatgattgcagtgattgtgggaaatcctttggccacaaatacaccctcattaaacatcagcgaattcacactgagtcaaagccgtttgagtgcattgaatgcgggaaattctttagtcgaagttctgactatattgcacaccagagggttcacactggtgaaaggccttttgtgtgcagtaaatgtgggaaagactttatcagaacctcccaccttgttcgacaccaaagagttcacactggagaaaggccatatgagtgcagtgaatgtgggaaggcctacagcttaagctcccacctcaatcggcaccagaaagttcacactgcaggcaggctttaggagtgctttgaatacaacaggactcatcaatcagatgttgaatttcatgtatctgaacattgacacaaaggagataccttatggtgccaggtacgtgggaaccttctagggatatgttgcactttctgacttgctcaggttttttgccagagttatgtcactgtcaatccatgtggccgaaaccatcttaactctaccagctaagataccccagcattggggaaggcagggttttgtattgtccagtccctggagaaaatcatgaaatgcctgagttcattgggggtcctcattcccttctgtatgacaggtataggtatggatatgacccatttttagccaagagggtctgagctgtatctgctggtggcttatacaaaaagtttactttcttcatggatattcttggtctcacatacttgtaatcaagtttttccagcctccaagtcacctggcctgggaaagtacttgcctcatgttgctctggtttgtgataataaaggctttacagtttaagccaca

SEQ ID NO: 315792 - DNA, 339 bp, Homo sapiens
cggccgcggtgatgggcccggcgcaggtgggtgctgcctttcccagactttcgcccgccccaaatcctgaagttccaaatgaggagcgcctgtctgagtccctgcagcgcaggccccagtgtccaaggcagcggggcgctggtgggtgggggcgagtgtgactggcagaggggcagcctgagcataggtttggagctggactgagcccgtagcagtcgggagcgtgtgtgaaccgtagtcaggcctgcaatgtcgaggggagaagttgctccttcattgcgaggacgataggagccatggcgggttttgaatggtggagggaagggatccgaaaaagga

SEQ ID NO: 315793 - DNA, 2041 bp, Homo sapiens
cggtatcttcctcgcggtggacatcttgtcggctcttaggtggaaccatcggagcagaagctcggggttgctgggcggttccgaggtgacggaagcgggagggtgcgggagaagtcgctgttcgctctgcggagtggctcgccagcgaagaccccgcctgcgcccccggggacggacgaccgcggtgccagggtcccgcgacctgggaccccctcgcggctccgggtggtctacgaactgtgatggcggcggccgcggtgatgggcccggcgcaggttgttggcatgaagtgaaggatgaagagtcatcttctgaacagagcatttctatagcagtgtcacatgttaatacttccaaggcaggtttgcccgcacagacggctctcccttgtgacatatgtggccccatcttgaaagatattttgcacctggatgaacaccagggtacacaccatggactgaaacttcacacatgtggggcatgtgggagacaattctggttcagtgcaaaccttcatcagtaccagaagtgttacagtatagagcaacccttaagaagggataaaagtgaggcctcaattgtgaagaactgcacagttagcaaagaacctcatccgtcagagaagccctttacgtgtaaggaggagcagaaaaacttccaggctactttgggtggctgccaacaaaaggccatccacagtaagaggaagacacacaggagcactgagagtggggatgcatttcatggtgaacaaatgcattacaagtgcagtgaatgtgggaaagctttcagccgcaaagacacacttgtccagcaccagagaattcatagtggagagaagccttatgagtgcagcgaatgtgggaaagccttcagccgcaaagctacacttgtccagcatcagagaatccatactggagaaaggccttatgaatgcagcgaatgtggaaaaaccttcagtcgaaaagacaaccttactcagcacaagagaatccacactggagaaatgccttataagtgcaatgaatgtgggaaatattttagccatcactccaatctaattgtacaccagagagttcacaatggagcaaggccttataagtgcagtgattgtgggaaagtcttcagacacaaatctacacttgttcagcatgagagtattcacactggagaaaatccttatgattgcagtgattgtgggaaatcctttggccacaaatacaccctcattaaacatcagcgaattcacactgagtcaaagccgtttgagtgcattgaatgcgggaaattctttagtcgaagttctgactatattgcacaccagagggttcacactggtgaaaggccttttgtgtgcagtaaatgtgggaaagactttatcagaacctcccaccttgttcgacaccaaagagttcacactggagaaaggccatatgagtgcagtgaatgtgggaaggcctacagcttaagctcccacctcaatcggcaccagaaagttcacactgcaggcaggctttaggagtgctttgaatacaacaggactcatcaatcagatgttgaatttcatgtatctgaacattgacacaaaggagataccttatggtgccaggtacgtgggaaccttctagggatatgttgcactttctgacttgctcaggttttttgccagagttatgtcactgtcaatccatgtggccgaaaccatcttaactctaccagctaagataccccagcattggggaaggcagggttttgtattgtccagtccctggagaaaatcatgaaatgcctgagttcattgggggtcctcattcccttctgtatgacaggtataggtatggatatgacccatttttagccaagagggtctgagctgtatctgctggtggcttatacaaaaagtttactttcttcatggatattcttggtctcacatacttgtaatcaagtttttccagcctccaagtcacctggcctgggaaagtacttgcctcatgttgctctggtttgtgataataaaggctttacagtttaagccaca

SEQ ID NO: 315794 - DNA, 10071 bp, Homo sapiens
tccggcgcggcgccgccagccagcctcggcggggagagtgcaggtactttgccttcagaataattagcaggacccaagccggctttccgagcgcgctttctttttcttcctttgccccctccctccggaaaagaagatcccacttttgaaacaatcagaaatcgaagcaccccaccaaagccaaaccctgacgggctgctgtgcatgtgccatccctttttgcagtttattctgggcctgtgtggaatagaaagacaattctttatttgactggtaggaaagaaaagagaagactcctcagggtttccaaggaggactggagcggctgctttagtgaagaagtgaagaatcaaggaagtaaaggacctgtctcaaagtcacacaactaggaaatcttgaggagtctgatacttttcatcctccagctataaaatcatcttgtagggggaagctgtacattggtggaaaataaaaggcaagcagttcctggcccgtgatattccagttagaggtgtctgactgacagcatgttggcaccgagggaagcgatgggcttcggctccaggtttctgtcctgagaccacagcagaatgtgccttggacaaaggcttggactccttgatcttctggtaacttcaaaaatctggtctcagggtggtgaactttttcttcgaattcctaacctgtgagcttacgatgatggtgcctgtccattaactgaacaactgtggttttgaacttcttgaggccagggactgtgtctgaaaacaccgacggtggctaactcaagggagacgtctggtgaacacccgtgggatctaaagaacaagctctgaaagtgttccagctgaaatttcagatcggacagactcgctgcggctccggaggcagtgattccaagctgctcgcgcacgctgctgccaagctgcaggatggtgcacgtagccaggctgctgctgctgctcctcactttcttcctccgcacggatgctgagacacctccaaggtttacacgaacacccgttgatcagacaggggtctctggcggagttgcctctttcatctgccaagctacgggagacccaagacctaaaattgtctggaacaaaaaaggaaagaaagtcagcaatcagagatttgaggtaatagagtttgacgatgggtctggatcagttctcagaatacaacccttacggactccgagggatgaggccatttatgaatgtgtggcctcaaataatgtgggagaaataagtgtatccaccagactcacagttttgcgggaagatcaaattcccaggggcttccctaccattgacatgggcccacagttgaaggtggttgagcgtactcgcacggccaccatgctttgtgcagccagtggtaatccggatccagaaatcacttggtttaaagatttcttacctgtggacacaagcaacaacaatggtcgtattaagcagttacgatcagaatctattggtggtacaccaataagaggagcccttcagattgagcagagtgaagagtctgaccaaggaaaatatgagtgtgttgccaccaacagcgcgggcactcgctattccgctcctgccaatttatatgtcagagagctgcgagaagttcgccgtgtcccaccaagattctctatcccacccactaatcatgaaatcatgccaggcggaagcgttaatatcacctgtgtggccgtggggtcaccaatgccttatgtaaagtggatgttgggggcagaagatctgacacctgaagatgatatgccaataggaagaaatgtgctagaactgaatgatgtaagacagtcagcaaattacacctgtgttgctatgtcaacactgggtgtcattgaagcaatagcacagatcactgtcaaagccttacccaaacctccaggaactcctgtagtgaccgagagcacagctacaagcatcacactgacgtgggactctgggaaccctgagcctgtttcttattacataattcagcataaacctaaaaactctgaggaactttacaaagaaattgatggggtggcgaccacacgctacagtgtcgctggactaagtccctactcggattatgaattcagggttgttgctgtcaataacattgggcgggggcctcccagcgaacctgtgctaacacaaacctcagagcaagcaccatccagtgccccgagggatgtccaggcacgaatgttgagttcgaccaccattttggtacagtggaaggaacctgaagagccaaatggacagatccaaggatatagagtttattatacaatggatcccactcaacatgtcaacaactggatgaaacacaatgtagctgacagccaaatcactactattggcaacttagtgccccagaaaacatattctgtcaaagtcctggcttttacctcaattggagatggtcccctttcaagtgacatacaagtcatcactcagacaggagtaccagggcagccactaaacttcaaagcagaacctgagtctgaaacaagtattttgctctcttggacacctccacgttcagataccattgccaactatgaactggtctacaaagatggggagcatggagaggagcaacgaattaccattgagccagggacatcatataggctgcaaggactgaaaccaaacagcttatactatttccgtctggctgcacgctcccctcaaggcctgggtgcttctactgcagaaatatcagctagaaccatgcagtcaaagccgtcagctcctcctcaagacattagttgcaccagcccaagttccactagtattttggtaagttggcaacctccaccagtggaaaaacagaatggcattatcactgaatactccatcaagtacactgcagtggatggggaagatgacaagcctcacgagattttgggaattccttcggacactaccaaataccttttggaacagctggaaaaatggactgaataccggatcactgtgacagcccatacagatgtcggccctggccctgagagcttgtccgtgttgattcgaaccaatgaagatgttcctagtggtcctcctcgcaaagtcgaggtagaggctgtcaactcaacatctgttaaagtctcatggcgctcacccgtgcccaataaacagcatggccagataagaggatatcaggtgcattatgtgaggatggaaaatggtgagcccaagggccagcccatgctgaaagatgtcatgctggctgatgcacagtgggaatttgatgatactactgaacatgacatgatcatttctgggctccagcctgaaacttcctactccctcaccgtcacagcctacacaaccaaaggagatggtgctcgcagcaagcccaaactggtgtccaccactggggcagttccagggaaacctcggcttgtgattaaccacactcagatgaatactgctcttattcagtggcaccctccggtggacacatttggacctcttcagggctaccgtctaaaatttggccgcaaggatatggagccacttactactcttgagttctctgaaaaagaagatcactttacagctacagacatccacaagggagcatcatacgtcttcaggctctcagccagaaacaaagtgggctttggggaggagatggtgaaggagatttccattccagaagaagtaccaactggattccctcaaaaccttcactcagaaggcaccacttcaacctccgtccagttatcttggcaaccacctgtcctggcagagagaaatggcattatcaccaagtatacccttctttatagggatatcaacatcccccttctcccgatggagcagcttattgttccagctgacaccactatgacactcactggcttaaaaccagataccacatacgatgtaaaagtacgtgctcatacgagcaaagggcccgggccatatagtcccagtgtccagttcaggacactgcctgtggatcaagtgtttgcaaaaaattttcatgtcaaagcagtaatgaagacttccgtgttgctgtcttgggagattccagagaattataactccgccatgcctttcaaaattctttatgatgatgggaaaatggtagaagaagtggatggccgagccacacagaagttaattgtcaacctgaagcctgagaaatcatattcatttgtgctgacaaatcgtggaaacagtgctggtgggctgcagcacagggtcacggcaaagactgcaccagatgtattacgtaccaagcctgccttcattgggaagaccaacttggatggcatgattactgtgcaactgcctgaagtacctgcaaatgagaatataaaaggttactacataataattgtgcctttgaagaaatctcgcgggaaatttatcaagccatgggagagtccagatgaaatggaattagatgagctgcttaaggagatatctaggaagcgcagaagcatccgttatgggagagaagttgaattaaagccatatattgccgctcactttgatgtccttcccactgagttcaccctgggggatgacaagcattatggtggatttacaaacaagcaactccaaagtggtcaagaatatgtcttctttgtgttagcagtaatggaacatgcagagtctaagatgtatgcaaccagcccttactccgaccccgtggtgtcaatggatctggatccgcagccaatcacggatgaagaagaaggcttgatctgggttgtaggtcctgtccttgcagtggtctttatcatctgcattgtcattgctattcttctttataaaaggaagagggcagagtccgactctagaaaaagcagcataccgaacaataaggagatcccttcacaccacccaacagaccctgtagaactgaggcgccttaactttcaaacaccgggtatggctagccatcctccaatacccatcttggaacttgcagaccacattgaaagattgaaagcaaatgacaacttgaagttttcccaggaatatgagtcaattgaccctggccagcagttcacttgggaacattcaaacttggaagtaaacaaaccaaagaatagatacgcgaatgtaatcgcatatgatcattcccgggttctcctatcagctatagaagggatcccaggaagtgactatgtgaatgccaactacatagatgggtataggaagcaaaatgcctatattgcaacacagggatctctccccgaaacatttggggacttttggagaatgatatgggaacaacggagtgccacagttgtcatgatgacaaaactagaagaaagatcaagggtgaagtgtgaccagtattggcctagcagaggcacagaaacccacggactcgttcaagtaacgctgcttgatactgtggagctggccacatattgtgttcgaacatttgcactttacaagaatggttcaagtgagaagagagaagtgagacaattccagttcaccgcctggcctgatcatggtgttccagaacaccctacaccttttctagctttcttacgtagagtcaaaacctgtaaccctcccgatgctggtccgatggttgtgcactgcagtgcgggagttggccggactggttgcttcatcgtcatagatgccatgttagaaagaataaagcatgaaaaaactgtagatatttatggccatgtaactttaatgagagcccagaggaactatatggttcaaacagaagaccaatacatctttatccatgatgcactgttagaagcagtgacttgtggaaataccgaagtgccagctagaaacttgtatgcctacattcagaagctgacacaaatagaaacgggagagaatgtcacaggaatggagctcgaatttaagcgtctagccagctcaaaagctcacacctcaaggtttatcagtgccaatcttccatgtaataaattcaaaaatcgccttgttaatattatgccatatgaatccacaagggtatgcctgcagcctatccgtggagtagaaggatctgattacatcaatgccagttttattgatggatacagacaacagaaagcctacatcgctacccaggggcccttggcagagaccactgaagacttctggcggatgctctgggaacacaattccaccatagttgtgatgctcaccaagctgcgtgaaatgggcagagagaaatgtcaccaatactggccagcagaacggtctgcaagataccagtactttgttgtagatcccatggctgagtacaacatgccacagtatatcctaagggaattcaaggtcacagatgccagggacggccagtcccgaacagtaaggcagttccagttcactgactggccagagcaaggagtgccaaagtccggagaaggatttattgacttcatcggccaagtccataaaacaaaagaacagtttggccaagatggacccatttcagtccattgcagcgcgggcgttggaagaactggagtcttcataacgctaagcattgttttggaaagaatgagatatgaaggagttgtagatatcttccagactgtcaaaatgttaagaacacaacgaccagctatggtacagacagaggatcaatatcagttttcctatcgtgccgcactagagtacctgggcagctttgaccactatgcaacgtagaaacccctgacccattctggatttttactacaggcccttcaatatccatggagtctcttctgagccatacagggcacttgagaagtccttcttaacttctagctaacaactacttagtgggactattacacacaaaacaaattaaaaacaaattattccaggtggaccaagaattctttgacatcgccccttcccaccatactgctcataataacattttagggggaaaggggagggaatgtttaaaaagaaagtccttgatttagttttttagtattgtaaagatactgctgacctgtgcttcatttctaactgtgtaaacttttttttaacaaaatgtatcattcgataaagtgaattttaaaaaagttacataactcttcatttttttatttccaaatcgtaggtttttttaagctgtagaactgttatctgtaatatcttgctgtagaaatatcaaatcatttgaaaatttgcacatttttgtgcaaaactcaatctacagtatcagtctcgtcagatatattaattttacacttcagttttgattggtgagaaagtacccattctcttcaaataatcaaagataattattattttgttttgtttttggaatcaacagggaggcgcaaagtataaagttgctgctaacatatatacatatatatccatattttataagggtgtctatgtatatatagacagtgtgtccacacaaaaaatagatacagttatcagtcagtcagttcttccatgatttagtttttttaaacgtagaaaagctattgtaaacatctctttccatttattcttaattttttgacatattggtatttctttaaagggaaatgaggaatgcacatcagtgattgattgtcaaacctcaccccctgatttcctacctaatctacccccacctaaccaatcaatcacatccacaaattgttttgtttgtttgttagtcaggcttccaacaaagttcaatatttctaacactctagtgcaataaaaattattattaaatagctaagaggtgtgcatgtgggaaaggtcagtgcatatccctttaggaggggagaatgttgtaatatatcagctatcgagttgtttaaaaaaagtgtattcaatcgtatattgtctatagtatgtgctatgaaatttgcatttatgatatgtaacaggggcaaagccaaattcatgttactctgttcagtcagaaacattttgtggcatacagcattcctgggaagtgctgtactttgtttcgttttggttttagttttgcatttagagtgccttataattgatgcctattttaatagcatttctttttagcttttggttcgtatttccattcactgttcgtatctgttactttctattaaagcattatctgtttaccacatgtacaaaaactctttgaataatatgcattcctagttttcagccaagtcggggatgttagtgattgtaccagcccaaagcacttggataatcagggcccttcttccttttataatcaatcatcaacatcagaaaaagctacttgttttatttatattcccttccaaatccgctctggaacatgcagtaactgcaccaaacttattttagtaacaaatatcattggcaactttggaatatatttgatattccattaggatttttctaaaaggggaaataaactatatatatatatgtatcttacccccaattcttccaacagaatttctataggaagccatggatgatggcataagtttgccacatattacatgattttaaataatcctcaaaatacccaaggaactcttaaagagttttggtatgagtatactactttggtttaattttagcttcatggatgttctgcatggaaggatttttgttttccacattttcccattgctagcagagtgaaatccaagagaccaaacatttgcaagcattgtatttgagcacttttgtaaaaaacaaagaaaaagaaaaaaaagaaaatatatataatactaaaaaaaagtatctagaaggctacctcagaatgagactctctaacctacatcagaaccagagaagaatgtgcactatgtgggtctgttatcattattttcttttagtttgtatctttttggagatttatccaagtgccagattactcagtgctataattttcttttagttaaacaaagggggtcagacagacattgcatcatccagacatgccttgttggacatgtagaatccgatggagcactgcacaccagaatgattggccaatgagcagcttctctccctgaaacaataactgcccatttggcaaagggaaagatgacaataatcagaagaagaaaatgaatgggatgcataccatagacgaacgaggcggagactattgcgggaatcttactgttcaggagctgttcctagaactaactcccttactgtcattgatgtgcattccactctgtgcttttctgtacaaccattcaagttttaatttcccaggtgaaccatctttatctgccattaccacaagctttcaagtttccagttattttcatcatcataaccagtacggtgctattatttacctatgtacgtgtagttatgtataattttgtaattagttacaatggtaaaaaaaatcaaaatatataaaaagtgatttgtacagaactttattttagctcttttttaaaaatgatttgcatggttagaaaacggcgaggacagccaggggagggaagggcctctagggaactttgcactttctatacctttgtactatgcactgccctattgattctacacccaataatgatattacttgaacccatctgtaagaaactgcttcggaaattcatttgtgtgtatgtaaataacacaacatagaaacaggaagggaaaaaagtctgcagtaatgcacgtattttttttctttcctgtttattttcggttttgctttaagtccttttatttttaattccctttttgtttttctttttgggttttggttccttttgggtttatgggtgccctgatactccagcagagatcagaaggctacagatccattctatccatccgttatgtggctttgccatcccagcttggagtgtctttacaaagataataacagttgtgttctttgctctcgttttggatgcatagactgaaaaattaaaacaaataacttgtaaaatggcttgttaaaaaatacaattacctctaattagtagtacgcgtaaatgttttacagaatgaaaggcgtgctttttattttcttacttcgttacattggtggcgaaagaagtctgtatgaaaatcagttctttgctgacacaagttccatttgttacaaatgaattctaataaaaatgtcagtgttatgcaaaaaaag

SEQ ID NO: 315795 - DNA, 10010 bp, Homo sapiens
tccggcgcggcgccgccagccagcctcggcggggagagtgcaggtactttgccttcagaataattagcaggacccaagccggctttccgagcgcgctttctttttcttcctttgccccctccctccggaaaagaagatcccacttttgaaacaatcagaaatcgaagcaccccaccaaagccaaaccctgacgggctgctgtgcatgtgccatccctttttgcagtttattctgggcctgtgtggaatagaaagacaattctttatttgactggtaggaaagaaaagagaagactcctcagggtttccaaggaggactggagcggctgctttagtgaagaagtgaagaatcaaggaagtaaaggacctgtctcaaagtcacacaactaggaaatcttgaggagtctgatacttttcatcctccagctataaaatcatcttgtagggggaagctgtacattggtggaaaataaaaggcaagcagttcctggcccgtgatattccagttagaggtgtctgactgacagcatgttggcaccgagggaagcgatgggcttcggctccaggtttctgtcctgagaccacagcagaatgtgccttggacaaaggcttggactccttgatcttctggtaacttcaaaaatctggtctcagggtggtgaactttttcttcgaattcctaacctgtgagcttacgatgatggtgcctgtccattaactgaacaactgtggttttgaacttcttgaggccagggactgtgtctgaaaacaccgacggtggctaactcaagggagacgtctggtgaacacccgtgggatctaaagaacaagctctgaaagtgttccagctgaaatttcagatcggacagactcgctgcggctccggaggcagtgattccaagctgctcgcgcacgctgctgccaagctgcaggatggtgcacgtagccaggctgctgctgctgctcctcactttcttcctccgcacggatgctgagacacctccaaggtttacacgaacacccgttgatcagacaggggtctctggcggagttgcctctttcatctgccaagctacgggagacccaagacctaaaattgtctggaacaaaaaaggaaagaaagtcagcaatcagagatttgaggtaatagagtttgacgatgggtctggatcagttctcagaatacaacccttacggactccgagggatgaggccatttatgaatgtgtggcctcaaataatgtgggagaaataagtgtatccaccagactcacagttttgcgggaagatcaaattcccaggggcttccctaccattgacatgggcccacagttgaaggtggttgagcgtactcgcacggccaccatgctttgtgcagccagtggtaatccggatccagaaatcacttggtttaaagatttcttacctgtggacacaagcaacaacaatggtcgtattaagcagttacgatcagaatctattggtggtacaccaataagaggagcccttcagattgagcagagtgaagagtctgaccaaggaaaatatgagtgtgttgccaccaacagcgcgggcactcgctattccgctcctgccaatttatatgtcagagagctgcgagaagttcgccgtgtcccaccaagattctctatcccacccactaatcatgaaatcatgccaggcggaagcgttaatatcacctgtgtggccgtggggtcaccaatgccttatgtaaagtggatgttgggggcagaagatctgacacctgaagatgatatgccaataggaagaaatgtgctagaactgaatgatgtaagacagtcagcaaattacacctgtgttgctatgtcaacactgggtgtcattgaagcaatagcacagatcactgtcaaagccttacccaaacctccaggaactcctgtagtgaccgagagcacagctacaagcatcacactgacgtgggactctgggaaccctgagcctgtttcttattacataattcagcataaacctaaaaactctgaggaactttacaaagaaattgatggggtggcgaccacacgctacagtgtcgctggactaagtccctactcggattatgaattcagggttgttgctgtcaataacattgggcgggggcctcccagcgaacctgtgctaacacaaacctcagagcaagcaccatccagtgccccgagggatgtccaggcacgaatgttgagttcgaccaccattttggtacagtggaaggaacctgaagagccaaatggacagatccaaggatatagagtttattatacaatggatcccactcaacatgtcaacaactggatgaaacacaatgtagctgacagccaaatcactactattggcaacttagtgccccagaaaacatattctgtcaaagtcctggcttttacctcaattggagatggtcccctttcaagtgacatacaagtcatcactcagacaggagtaccagggcagccactaaacttcaaagcagaacctgagtctgaaacaagtattttgctctcttggacacctccacgttcagataccattgccaactatgaactggtctacaaagatggggagcatggagaggagcaacgaattaccattgagccagggacatcatataggctgcaaggactgaaaccaaacagcttatactatttccgtctggctgcacgctcccctcaaggcctgggtgcttctactgcagaaatatcagctagaaccatgcagtcaaagccgtcagctcctcctcaagacattagttgcaccagcccaagttccactagtattttggtaagttggcaacctccaccagtggaaaaacagaatggcattatcactgaatactccatcaagtacactgcagtggatggggaagatgacaagcctcacgagattttgggaattccttcggacactaccaaataccttttggaacagctggaaaaatggactgaataccggatcactgtgacagcccatacagatgtcggccctggccctgagagcttgtccgtgttgattcgaaccaatgaagatgttcctagtggtcctcctcgcaaagtcgaggtagaggctgtcaactcaacatctgttaaagtctcatggcgctcacccgtgcccaataaacagcatggccagataagaggatatcaggtgcattatgtgaggatggaaaatggtgagcccaagggccagcccatgctgaaagatgtcatgctggctgatgcacagtgggaatttgatgatactactgaacatgacatgatcatttctgggctccagcctgaaacttcctactccctcaccgtcacagcctacacaaccaaaggagatggtgctcgcagcaagcccaaactggtgtccaccactggggcagttccagggaaacctcggcttgtgattaaccacactcagatgaatactgctcttattcagtggcaccctccggtggacacatttggacctcttcagggctaccgtctaaaatttggccgcaaggatatggagccacttactactcttgagttctctgaaaaagaagatcactttacagctacagacatccacaagggagcatcatacgtcttcaggctctcagccagaaacaaagtgggctttggggaggagatggtgaaggagatttccattccagaagaagtaccaactggattccctcaaaaccttcactcagaaggcaccacttcaacctccgtccagttatcttggcaaccacctgtcctggcagagagaaatggcattatcaccaagtatacccttctttatagggatatcaacatcccccttctcccgatggagcagcttattgttccagctgacaccactatgacactcactggcttaaaaccagataccacatacgatgtaaaagtacgtgctcatacgagcaaagggcccgggccatatagtcccagtgtccagttcaggacactgcctgtggatcaagtgtttgcaaaaaattttcatgtcaaagcagtaatgaagacttccgtgttgctgtcttgggagattccagagaattataactccgccatgcctttcaaaattctttatgatgatgggaaaatggtagaagaagtggatggccgagccacacagaagttaattgtcaacctgaagcctgagaaatcatattcatttgtgctgacaaatcgtggaaacagtgctggtgggctgcagcacagggtcacggcaaagactgcaccagatgtattacgtaccaagcctgccttcattgggaagaccaacttggatggcatgattactgtgcaactgcctgaagtacctgcaaatgagaatataaaaggttactacataataattgtgcctttgaagaaatctcgcgggaaatttatcaagccatgggagagtccagatgaaatggaattagatgagctgcttaaggagatatctaggaagcgcagaagcatccgttatgggagagaagttgaattaaagccatatattgccgctcactttgatgtccttcccactgagttcaccctgggggatgacaagcattatggtggatttacaaacaagcaactccaaagtggtcaagaatatgtcttctttgtgttagcagtaatggaacatgcagagtctaagatgtatgcaaccagcccttactccgaccccgtggtgtcaatggatctggatccgcagccaatcacggatgaagaagaaggcttgatctgggttgtaggtcctgtccttgcagtggtctttatcatctgcattgtcattgctattcttctttataaaaggaagagggcagagtccgactctagaaaaagcagcataccgaacaataaggagatcccttcacaccacccaacagaccctgtagaactgaggcgccttaactttcaaacaccgggtatggctagccatcctccaatacccatcttggaacttgcagaccacattgaaagattgaaagcaaatgacaacttgaagttttcccaggaatatgagtcaattgaccctggccagcagttcacttgggaacattcaaacttggaagtaaacaaaccaaagaatagatacgcgaatgtaatcgcatatgatcattcccgggttctcctatcagctatagaagggatcccaggaagtgactatgtgaatgccaactacatagatgggtataggaagcaaaatgcctatattgcaacacagggatctctccccgaaacatttggggacttttggagaatgatatgggaacaacggagtgccacagttgtcatgatgacaaaactagaagaaagatcaagggtgaagtgtgaccagtattggcctagcagaggcacagaaacccacggactcgttcaagtaacgctgcttgatactgtggagctggccacatattgtgttcgaacatttgcactttacaagaatggttcaagtgagaagagagaagtgagacaattccagttcaccgcctggcctgatcatggtgttccagaacaccctacaccttttctagctttcttacgtagagtcaaaacctgtaaccctcccgatgctggtccgatggttgtgcactgcagtgcgggagttggccggactggttgcttcatcgtcatagatgccatgttagaaagaataaagcatgaaaaaactgtagatatttatggccatgtaactttaatgagagcccagaggaactatatggttcaaacagaagaccaatacatctttatccatgatgcactgttagaagcagtgacttgtggaaataccgaagtgccagctagaaacttgtatgcctacattcagaagctgacacaaatagaaacgggagagaatgtcacaggaatggagctcgaatttaagcgtctagccagctcaaaagctcacacctcaaggtttatcagtgccaatcttccatgtaataaattcaaaaatcgccttgttaatattatgccatatgaatccacaagggtatgcctgcagcctatccgtggagtagaaggatctgattacatcaatgccagttttattgatggatacagacaacagaaagcctacatcgctacccaggggcccttggcagagaccactgaagacttctggcggatgctctgggaacacaattccaccatagttgtgatgctcaccaagctgcgtgaaatgggcagagagaaatgtcaccaatactggccagcagaacggtctgcaagataccagtactttgttgtagatcccatggctgagtacaacatgccacagtatatcctaagggaattcaaggtcacagatgccagggacggccagtcccgaacagtaaggcagttccagttcactgactggccagagcaaggagtgccaaagtccggagaaggatttattgacttcatcggccaagtccataaaacaaaagaacagtttggccaagatggacccatttcagtccattgcagcgcgggcgttggaagaactggagtcttcataacgctaagcattgttttggaaagaatgagatatgaaggagttgtagatatcttccagactgtcaaaatgttaagaacacaacgaccagctatggtacagacagaggatcaatatcagttttcctatcgtgccgcactagagtacctgggcagctttgaccactatgcaacgtagaaacccctgacccattctggatttttactacaggcccttcaatatccatggagtctcttctgagccatacagggcacttgagaagtccttcttaacttctagctaacaactacttagtgggactattacacacaaaacaaattaaaaacaaattattccaggtggaccaagaattctttgacatcgccccttcccaccatactgctcataataacattttagggggaaaggggagggaatgtttaaaaagaaagtccttgatttagttttttagtattgtaaagatactgctgacctgtgcttcatttctaactgtgtaaacttttttttaacaaaatgtatcattcgataaagtgaattttaaaaaagttacataactcttcatttttttatttccaaatcgtaggtttttttaagctgtagaactgttatctgtaatatcttgctgtagaaatatcaaatcatttgaaaatttgcacatttttgtgcaaaactcaatctacagtatcagtctcgtcagatatattaattttacacttcagttttgattggtgagaaagtacccattctcttcaaataatcaaagataattattattttgttttgtttttggaatcaacagggaggcgcaaagtataaagttgctgctaacatatatacatatatatccatattttataagggtgtctatgtatatatagacagtgtgtccacacaaaaaatagatacagttatcagtcagtcagttcttccatgatttagtttttttaaacgtagaaaagctattgtaaacatctctttccatttattcttaattttttgacatattggtatttctttaaagggaaatgaggaatgcacatcagtgattgattgtcaaacctcaccccctgatttcctacctaatctacccccacctaaccaatcaatcacatccacaaattgttttgtttgtttgttagtcaggcttccaacaaagttcaatatttctaacactctagtgcaataaaaattattattaaatagctaagaggtgtgcatgtgggaaaggtcagtgcatatccctttaggaggggagaatgttgtaatatatcagctatcgagttgtttaaaaaaagtgtattcaatcgtatattgtctatagtatgtgctatgaaatttgcatttatgatatgtaacaggggcaaagccaaattcatgttactctgttcagtcagaaacattttgtggcatacagcattcctgggaagtgctgtactttgtttcgttttggttttagttttgcatttagagtgccttataattgatgcctattttaatagcatttctttttagcttttggttcgtatttccattcactgttcgtatctgttactttctattaaagcattatctgtttaccacatgtacaaaaactctttgaataatatgcattcctagttttcagccaagtcggggatgttagtgattgtaccagcccaaagcacttggataatcagggcccttcttccttttataatcaatcatcaacatcagaaaaagctacttgttttatttatattcccttccaaatccgctctggaacatgcagtaactgcaccaaacttattttagtaacaaatatcattggcaactttggaatatatttgatattccattaggatttttctaaaaggggaaataaactatatatatatatgtatcttacccccaattcttccaacagaatttctataggaagccatggatgatggcataagtttgccacatattacatgattttaaataatcctcaaaatacccaaggaactcttaaagagttttggtatgagtatactactttggtttaattttagcttcatggatgttctgcatggaaggatttttgttttccacattttcccattgctagcagagtgaaatccaagagaccaaacatttgcaagcattgtatttgagcacttttgtaaaaaacaaagaaaaagaaaaaaaagaaaatatatataatactaaaaaaaagtatctagaaggctacctcagaatgagactctctaacctacatcagaaccagagaagaatgtgcactatgtgggtctgttatcattattttcttttagtttgtatctttttggagatttatccaagtgccagattactcagtgctataattttcttttagttaaacaaagggggtcagacagacattgcatcatccagacatgccttgttggacatgtagaatccgatggagcactgcacaccagaatgattggccaatgagcagcttctctccctgaaacaataactgcccatttggcaaagggaaagatgacaataatcagaagaagaaaatgaatgggatgcataccatagacgaacgaggcggagactattgcgggaatcttactgttcaggagctgttcctagaactaactcccttactgtcattgatgtgcattccactctgtgcttttctgtacaaccattcaagttttaatttcccaggtgaaccatctttatctgccattaccacaagctttcaagtttccagttattttcatcatcataaccagtacggtgctattatttacctatgtacgtgtagttatgtataattttgtaattagttacaatggtaaatgatttgcatggttagaaaacggcgaggacagccaggggagggaagggcctctagggaactttgcactttctatacctttgtactatgcactgccctattgattctacacccaataatgatattacttgaacccatctgtaagaaactgcttcggaaattcatttgtgtgtatgtaaataacacaacatagaaacaggaagggaaaaaagtctgcagtaatgcacgtattttttttctttcctgtttattttcggttttgctttaagtccttttatttttaattccctttttgtttttctttttgggttttggttccttttgggtttatgggtgccctgatactccagcagagatcagaaggctacagatccattctatccatccgttatgtggctttgccatcccagcttggagtgtctttacaaagataataacagttgtgttctttgctctcgttttggatgcatagactgaaaaattaaaacaaataacttgtaaaatggcttgttaaaaaatacaattacctctaattagtagtacgcgtaaatgttttacagaatgaaaggcgtgctttttattttcttacttcgttacattggtggcgaaagaagtctgtatgaaaatcagttctttgctgacacaagttccatttgttacaaatgaattctaataaaaatgtcagtgttatgcaaaaaaag

SEQ ID NO: 315796 - DNA, 9537 bp, Homo sapiens
cggcggccgctgctccgcgggattaaattggccgcccggaggcggcggcgcggccgtggcggggcgcgaaggcgctggaggaaagtgttggcggcggcgcgggaggcggtggcggcggctgcccggggccaacatgaccaggctctgaaagtgttccagctgaaatttcagatcggacagactcgctgcggctccggaggcagtgattccaagctgctcgcgcacgctgctgccaagctgcaggatggtgcacgtagccaggctgctgctgctgctcctcactttcttcctccgcacggatgctgagacacctccaaggtttacacgaacacccgttgatcagacaggggtctctggcggagttgcctctttcatctgccaagctacgggagacccaagacctaaaattgtctggaacaaaaaaggaaagaaagtcagcaatcagagatttgaggtaatagagtttgacgatgggtctggatcagttctcagaatacaacccttacggactccgagggatgaggccatttatgaatgtgtggcctcaaataatgtgggagaaataagtgtatccaccagactcacagttttgcgggaagatcaaattcccaggggcttccctaccattgacatgggcccacagttgaaggtggttgagcgtactcgcacggccaccatgctttgtgcagccagtggtaatccggatccagaaatcacttggtttaaagatttcttacctgtggacacaagcaacaacaatggtcgtattaagcagttacgatcaggagcccttcagattgagcagagtgaagagtctgaccaaggaaaatatgagtgtgttgccaccaacagcgcgggcactcgctattccgctcctgccaatttatatgtcagagagctgcgagaagttcgccgtgtcccaccaagattctctatcccacccactaatcatgaaatcatgccaggcggaagcgttaatatcacctgtgtggccgtggggtcaccaatgccttatgtaaagtggatgttgggggcagaagatctgacacctgaagatgatatgccaataggaagaaatgtgctagaactgaatgatgtaagacagtcagcaaattacacctgtgttgctatgtcaacactgggtgtcattgaagcaatagcacagatcactgtcaaagccttacccaaacctccaggaactcctgtagtgaccgagagcacagctacaagcatcacactgacgtgggactctgggaaccctgagcctgtttcttattacataattcagcataaacctaaaaactctgaggaactttacaaagaaattgatggggtggcgaccacacgctacagtgtcgctggactaagtccctactcggattatgaattcagggttgttgctgtcaataacattgggcgggggcctcccagcgaacctgtgctaacacaaacctcagagcaagcaccatccagtgccccgagggatgtccaggcacgaatgttgagttcgaccaccattttggtacagtggaaggaacctgaagagccaaatggacagatccaaggatatagagtttattatacaatggatcccactcaacatgtcaacaactggatgaaacacaatgtagctgacagccaaatcactactattggcaacttagtgccccagaaaacatattctgtcaaagtcctggcttttacctcaattggagatggtcccctttcaagtgacatacaagtcatcactcagacaggagtaccagggcagccactaaacttcaaagcagaacctgagtctgaaacaagtattttgctctcttggacacctccacgttcagataccattgccaactatgaactggtctacaaagatggggagcatggagaggagcaacgaattaccattgagccagggacatcatataggctgcaaggactgaaaccaaacagcttatactatttccgtctggctgcacgctcccctcaaggcctgggtgcttctactgcagaaatatcagctagaaccatgcagtcaaagccgtcagctcctcctcaagacattagttgcaccagcccaagttccactagtattttggtaagttggcaacctccaccagtggaaaaacagaatggcattatcactgaatactccatcaagtacactgcagtggatggggaagatgacaagcctcacgagattttgggaattccttcggacactaccaaataccttttggaacagctggaaaaatggactgaataccggatcactgtgacagcccatacagatgtcggccctggccctgagagcttgtccgtgttgattcgaaccaatgaagatgttcctagtggtcctcctcgcaaagtcgaggtagaggctgtcaactcaacatctgttaaagtctcatggcgctcacccgtgcccaataaacagcatggccagataagaggatatcaggtgcattatgtgaggatggaaaatggtgagcccaagggccagcccatgctgaaagatgtcatgctggctgatgcacagtgggaatttgatgatactactgaacatgacatgatcatttctgggctccagcctgaaacttcctactccctcaccgtcacagcctacacaaccaaaggagatggtgctcgcagcaagcccaaactggtgtccaccactggggcagttccagggaaacctcggcttgtgattaaccacactcagatgaatactgctcttattcagtggcaccctccggtggacacatttggacctcttcagggctaccgtctaaaatttggccgcaaggatatggagccacttactactcttgagttctctgaaaaagaagatcactttacagctacagacatccacaagggagcatcatacgtcttcaggctctcagccagaaacaaagtgggctttggggaggagatggtgaaggagatttccattccagaagaagtaccaactggattccctcaaaaccttcactcagaaggcaccacttcaacctccgtccagttatcttggcaaccacctgtcctggcagagagaaatggcattatcaccaagtatacccttctttatagggatatcaacatcccccttctcccgatggagcagcttattgttccagctgacaccactatgacactcactggcttaaaaccagataccacatacgatgtaaaagtacgtgctcatacgagcaaagggcccgggccatatagtcccagtgtccagttcaggacactgcctgtggatcaagtgtttgcaaaaaattttcatgtcaaagcagtaatgaagacttccgtgttgctgtcttgggagattccagagaattataactccgccatgcctttcaaaattctttatgatgatgggaaaatggtagaagaagtggatggccgagccacacagaagttaattgtcaacctgaagcctgagaaatcatattcatttgtgctgacaaatcgtggaaacagtgctggtgggctgcagcacagggtcacggcaaagactgcaccagatgtattacgtaccaagcctgccttcattgggaagaccaacttggatggcatgattactgtgcaactgcctgaagtacctgcaaatgagaatataaaaggttactacataataattgtgcctttgaagaaatctcgcgggaaatttatcaagccatgggagagtccagatgaaatggaattagatgagctgcttaaggagatatctaggaagcgcagaagcatccgttatgggagagaagttgaattaaagccatatattgccgctcactttgatgtccttcccactgagttcaccctgggggatgacaagcattatggtggatttacaaacaagcaactccaaagtggtcaagaatatgtcttctttgtgttagcagtaatggaacatgcagagtctaagatgtatgcaaccagcccttactccgaccccgtggtgtcaatggatctggatccgcagccaatcacggatgaagaagaaggcttgatctgggttgtaggtcctgtccttgcagtggtctttatcatctgcattgtcattgctattcttctttataaaaggaagagggcagagtccgactctagaaaaagcagcataccgaacaataaggagatcccttcacaccacccaacagaccctgtagaactgaggcgccttaactttcaaacaccgggtatggctagccatcctccaatacccatcttggaacttgcagaccacattgaaagattgaaagcaaatgacaacttgaagttttcccaggaatatgagtcaattgaccctggccagcagttcacttgggaacattcaaacttggaagtaaacaaaccaaagaatagatacgcgaatgtaatcgcatatgatcattcccgggttctcctatcagctatagaagggatcccaggaagtgactatgtgaatgccaactacatagatgggtataggaagcaaaatgcctatattgcaacacagggatctctccccgaaacatttggggacttttggagaatgatatgggaacaacggagtgccacagttgtcatgatgacaaaactagaagaaagatcaagggtgaagtgtgaccagtattggcctagcagaggcacagaaacccacggactcgttcaagtaacgctgcttgatactgtggagctggccacatattgtgttcgaacatttgcactttacaagaatggttcaagtgagaagagagaagtgagacaattccagttcaccgcctggcctgatcatggtgttccagaacaccctacaccttttctagctttcttacgtagagtcaaaacctgtaaccctcccgatgctggtccgatggttgtgcactgcagtgcgggagttggccggactggttgcttcatcgtcatagatgccatgttagaaagaataaagcatgaaaaaactgtagatatttatggccatgtaactttaatgagagcccagaggaactatatggttcaaacagaagaccaatacatctttatccatgatgcactgttagaagcagtgacttgtggaaataccgaagtgccagctagaaacttgtatgcctacattcagaagctgacacaaatagaaacgggagagaatgtcacaggaatggagctcgaatttaagcgtctagccagctcaaaagctcacacctcaaggtttatcagtgccaatcttccatgtaataaattcactatccgtggagtagaaggatctgattacatcaatgccagttttattgatggatacagacaacagaaagcctacatcgctacccaggggcccttggcagagaccactgaagacttctggcggatgctctgggaacacaattccaccatagttgtgatgctcaccaagctgcgtgaaatgggcagagagaaatgtcaccaatactggccagcagaacggtctgcaagataccagtactttgttgtagatcccatggctgagtacaacatgccacagtatatcctaagggaattcaaggtcacagatgccagggacggccagtcccgaacagtaaggcagttccagttcactgactggccagagcaaggagtgccaaagtccggagaaggatttattgacttcatcggccaagtccataaaacaaaagaacagtttggccaagatggacccatttcagtccattgcagcgcgggcgttggaagaactggagtcttcataacgctaagcattgttttggaaagaatgagatatgaaggagttgtagatatcttccagactgtcaaaatgttaagaacacaacgaccagctatggtacagacagaggatcaatatcagttttcctatcgtgccgcactagagtacctgggcagctttgaccactatgcaacgtagaaacccctgacccattctggatttttactacaggcccttcaatatccatggagtctcttctgagccatacagggcacttgagaagtccttcttaacttctagctaacaactacttagtgggactattacacacaaaacaaattaaaaacaaattattccaggtggaccaagaattcacagtttaataatctaacctgaaaaataatgaagagaatcctgactgatgaggcatctgaaggattttatttacagatacctcaaggattcaaaatcaagggaagaagaaatcacagcaaagaaccaccatcttattcaggattgcttgaaaggtgcaaggagaaattgccagaatgctgcagttcagcacaagatatgtgctggtgtggcttctcacaatgaaacggactctgctttgacatcgccccttcccaccatactgctcataataacattttagggggaaaggggagggaatgtttaaaaagaaagtccttgatttagttttttagtattgtaaagatactgctgacctgtgcttcatttctaactgtgtaaacttttttttaacaaaatgtatcattcgataaagtgaattttaaaaaagttacataactcttcatttttttatttccaaatcgtaggtttttttaagctgtagaactgttatctgtaatatcttgctgtagaaatatcaaatcatttgaaaatttgcacatttttgtgcaaaactcaatctacagtatcagtctcgtcagatatattaattttacacttcagttttgattggtgagaaagtacccattctcttcaaataatcaaagataattattattttgttttgtttttggaatcaacagggaggcgcaaagtataaagttgctgctaacatatatacatatatatccatattttataagggtgtctatgtatatatagacagtgtgtccacacaaaaaatagatacagttatcagtcagtcagttcttccatgatttagtttttttaaacgtagaaaagctattgtaaacatctctttccatttattcttaattttttgacatattggtatttctttaaagggaaatgaggaatgcacatcagtgattgattgtcaaacctcaccccctgatttcctacctaatctacccccacctaaccaatcaatcacatccacaaattgttttgtttgtttgttagtcaggcttccaacaaagttcaatatttctaacactctagtgcaataaaaattattattaaatagctaagaggtgtgcatgtgggaaaggtcagtgcatatccctttaggaggggagaatgttgtaatatatcagctatcgagttgtttaaaaaaagtgtattcaatcgtatattgtctatagtatgtgctatgaaatttgcatttatgatatgtaacaggggcaaagccaaattcatgttactctgttcagtcagaaacattttgtggcatacagcattcctgggaagtgctgtactttgtttcgttttggttttagttttgcatttagagtgccttataattgatgcctattttaatagcatttctttttagcttttggttcgtatttccattcactgttcgtatctgttactttctattaaagcattatctgtttaccacatgtacaaaaactctttgaataatatgcattcctagttttcagccaagtcggggatgttagtgattgtaccagcccaaagcacttggataatcagggcccttcttccttttataatcaatcatcaacatcagaaaaagctacttgttttatttatattcccttccaaatccgctctggaacatgcagtaactgcaccaaacttattttagtaacaaatatcattggcaactttggaatatatttgatattccattaggatttttctaaaaggggaaataaactatatatatatatgtatcttacccccaattcttccaacagaatttctataggaagccatggatgatggcataagtttgccacatattacatgattttaaataatcctcaaaatacccaaggaactcttaaagagttttggtatgagtatactactttggtttaattttagcttcatggatgttctgcatggaaggatttttgttttccacattttcccattgctagcagagtgaaatccaagagaccaaacatttgcaagcattgtatttgagcacttttgtaaaaaacaaagaaaaagaaaaaaaagaaaatatatataatactaaaaaaaagtatctagaaggctacctcagaatgagactctctaacctacatcagaaccagagaagaatgtgcactatgtgggtctgttatcattattttcttttagtttgtatctttttggagatttatccaagtgccagattactcagtgctataattttcttttagttaaacaaagggggtcagacagacattgcatcatccagacatgccttgttggacatgtagaatccgatggagcactgcacaccagaatgattggccaatgagcagcttctctccctgaaacaataactgcccatttggcaaagggaaagatgacaataatcagaagaagaaaatgaatgggatgcataccatagacgaacgaggcggagactattgcgggaatcttactgttcaggagctgttcctagaactaactcccttactgtcattgatgtgcattccactctgtgcttttctgtacaaccattcaagttttaatttcccaggtgaaccatctttatctgccattaccacaagctttcaagtttccagttattttcatcatcataaccagtacggtgctattatttacctatgtacgtgtagttatgtataattttgtaattagttacaatggtaaaaaaaatcaaaatatataaaaagtgatttgtacagaactttattttagctcttttttaaaaatgatttgcatggttagaaaacggcgaggacagccaggggagggaagggcctctagggaactttgcactttctatacctttgtactatgcactgccctattgattctacacccaataatgatattacttgaacccatctgtaagaaactgcttcggaaattcatttgtgtgtatgtaaataacacaacatagaaacaggaagggaaaaaagtctgcagtaatgcacgtattttttttctttcctgtttattttcggttttgctttaagtccttttatttttaattccctttttgtttttctttttgggttttggttccttttgggtttatgggtgccctgatactccagcagagatcagaaggctacagatccattctatccatccgttatgtggctttgccatcccagcttggagtgtctttacaaagataataacagttgtgttctttgctctcgttttggatgcatagactgaaaaattaaaacaaataacttgtaaaatggcttgttaaaaaatacaattacctctaattagtagtacgcgtaaatgttttacagaatgaaaggcgtgctttttattttcttacttcgttacattggtggcgaaagaagtctgtatgaaaatcagttctttgctgacacaagttccatttgttacaaatgaattctaataaaaatgtcagtgttatgcaaaaaaag

SEQ ID NO: 315797 - DNA, 9537 bp, Homo sapiens
cggcggccgctgctccgcgggattaaattggccgcccggaggcggcggcgcggccgtggcggggcgcgaaggcgctggaggaaagtgttggcggcggcgcgggaggcggtggcggcggctgcccggggccaacatgaccaggctctgaaagtgttccagctgaaatttcagatcggacagactcgctgcggctccggaggcagtgattccaagctgctcgcgcacgctgctgccaagctgcaggatggtgcacgtagccaggctgctgctgctgctcctcactttcttcctccgcacggatgctgagacacctccaaggtttacacgaacacccgttgatcagacaggggtctctggcggagttgcctctttcatctgccaagctacgggagacccaagacctaaaattgtctggaacaaaaaaggaaagaaagtcagcaatcagagatttgaggtaatagagtttgacgatgggtctggatcagttctcagaatacaacccttacggactccgagggatgaggccatttatgaatgtgtggcctcaaataatgtgggagaaataagtgtatccaccagactcacagttttgcgggaagatcaaattcccaggggcttccctaccattgacatgggcccacagttgaaggtggttgagcgtactcgcacggccaccatgctttgtgcagccagtggtaatccggatccagaaatcacttggtttaaagatttcttacctgtggacacaagcaacaacaatggtcgtattaagcagttacgatcaggagcccttcagattgagcagagtgaagagtctgaccaaggaaaatatgagtgtgttgccaccaacagcgcgggcactcgctattccgctcctgccaatttatatgtcagagagctgcgagaagttcgccgtgtcccaccaagattctctatcccacccactaatcatgaaatcatgccaggcggaagcgttaatatcacctgtgtggccgtggggtcaccaatgccttatgtaaagtggatgttgggggcagaagatctgacacctgaagatgatatgccaataggaagaaatgtgctagaactgaatgatgtaagacagtcagcaaattacacctgtgttgctatgtcaacactgggtgtcattgaagcaatagcacagatcactgtcaaagccttacccaaacctccaggaactcctgtagtgaccgagagcacagctacaagcatcacactgacgtgggactctgggaaccctgagcctgtttcttattacataattcagcataaacctaaaaactctgaggaactttacaaagaaattgatggggtggcgaccacacgctacagtgtcgctggactaagtccctactcggattatgaattcagggttgttgctgtcaataacattgggcgggggcctcccagcgaacctgtgctaacacaaacctcagagcaagcaccatccagtgccccgagggatgtccaggcacgaatgttgagttcgaccaccattttggtacagtggaaggaacctgaagagccaaatggacagatccaaggatatagagtttattatacaatggatcccactcaacatgtcaacaactggatgaaacacaatgtagctgacagccaaatcactactattggcaacttagtgccccagaaaacatattctgtcaaagtcctggcttttacctcaattggagatggtcccctttcaagtgacatacaagtcatcactcagacaggagtaccagggcagccactaaacttcaaagcagaacctgagtctgaaacaagtattttgctctcttggacacctccacgttcagataccattgccaactatgaactggtctacaaagatggggagcatggagaggagcaacgaattaccattgagccagggacatcatataggctgcaaggactgaaaccaaacagcttatactatttccgtctggctgcacgctcccctcaaggcctgggtgcttctactgcagaaatatcagctagaaccatgcagtcaaagccgtcagctcctcctcaagacattagttgcaccagcccaagttccactagtattttggtaagttggcaacctccaccagtggaaaaacagaatggcattatcactgaatactccatcaagtacactgcagtggatggggaagatgacaagcctcacgagattttgggaattccttcggacactaccaaataccttttggaacagctggaaaaatggactgaataccggatcactgtgacagcccatacagatgtcggccctggccctgagagcttgtccgtgttgattcgaaccaatgaagatgttcctagtggtcctcctcgcaaagtcgaggtagaggctgtcaactcaacatctgttaaagtctcatggcgctcacccgtgcccaataaacagcatggccagataagaggatatcaggtgcattatgtgaggatggaaaatggtgagcccaagggccagcccatgctgaaagatgtcatgctggctgatgcacagtgggaatttgatgatactactgaacatgacatgatcatttctgggctccagcctgaaacttcctactccctcaccgtcacagcctacacaaccaaaggagatggtgctcgcagcaagcccaaactggtgtccaccactggggcagttccagggaaacctcggcttgtgattaaccacactcagatgaatactgctcttattcagtggcaccctccggtggacacatttggacctcttcagggctaccgtctaaaatttggccgcaaggatatggagccacttactactcttgagttctctgaaaaagaagatcactttacagctacagacatccacaagggagcatcatacgtcttcaggctctcagccagaaacaaagtgggctttggggaggagatggtgaaggagatttccattccagaagaagtaccaactggattccctcaaaaccttcactcagaaggcaccacttcaacctccgtccagttatcttggcaaccacctgtcctggcagagagaaatggcattatcaccaagtatacccttctttatagggatatcaacatcccccttctcccgatggagcagcttattgttccagctgacaccactatgacactcactggcttaaaaccagataccacatacgatgtaaaagtacgtgctcatacgagcaaagggcccgggccatatagtcccagtgtccagttcaggacactgcctgtggatcaagtgtttgcaaaaaattttcatgtcaaagcagtaatgaagacttccgtgttgctgtcttgggagattccagagaattataactccgccatgcctttcaaaattctttatgatgatgggaaaatggtagaagaagtggatggccgagccacacagaagttaattgtcaacctgaagcctgagaaatcatattcatttgtgctgacaaatcgtggaaacagtgctggtgggctgcagcacagggtcacggcaaagactgcaccagatgtattacgtaccaagcctgccttcattgggaagaccaacttggatggcatgattactgtgcaactgcctgaagtacctgcaaatgagaatataaaaggttactacataataattgtgcctttgaagaaatctcgcgggaaatttatcaagccatgggagagtccagatgaaatggaattagatgagctgcttaaggagatatctaggaagcgcagaagcatccgttatgggagagaagttgaattaaagccatatattgccgctcactttgatgtccttcccactgagttcaccctgggggatgacaagcattatggtggatttacaaacaagcaactccaaagtggtcaagaatatgtcttctttgtgttagcagtaatggaacatgcagagtctaagatgtatgcaaccagcccttactccgaccccgtggtgtcaatggatctggatccgcagccaatcacggatgaagaagaaggcttgatctgggttgtaggtcctgtccttgcagtggtctttatcatctgcattgtcattgctattcttctttataaaagtaaacccgacaggaagagggcagagtccgactctagagtagaactgaggcgccttaactttcaaacaccgggttcagatgattccggttaccctggtaaccttcattcttcaagtatggctagccatcctccaatacccatcttggaacttgcagaccacattgaaagattgaaagcaaatgacaacttgaagttttcccaggaatatgagtcaattgaccctggccagcagttcacttgggaacattcaaacttggaagtaaacaaaccaaagaatagatacgcgaatgtaatcgcatatgatcattcccgggttctcctatcagctatagaagggatcccaggaagtgactatgtgaatgccaactacatagatgggtataggaagcaaaatgcctatattgcaacacagggatctctccccgaaacatttggggacttttggagaatgatatgggaacaacggagtgccacagttgtcatgatgacaaaactagaagaaagatcaagggtgaagtgtgaccagtattggcctagcagaggcacagaaacccacggactcgttcaagtaacgctgcttgatactgtggagctggccacatattgtgttcgaacatttgcactttacaagaatggttcaagtgagaagagagaagtgagacaattccagttcaccgcctggcctgatcatggtgttccagaacaccctacaccttttctagctttcttacgtagagtcaaaacctgtaaccctcccgatgctggtccgatggttgtgcactgcagtgcgggagttggccggactggttgcttcatcgtcatagatgccatgttagaaagaataaagcatgaaaaaactgtagatatttatggccatgtaactttaatgagagcccagaggaactatatggttcaaacagaagaccaatacatctttatccatgatgcactgttagaagcagtgacttgtggaaataccgaagtgccagctagaaacttgtatgcctacattcagaagctgacacaaatagaaacgggagagaatgtcacaggaatggagctcgaatttaagcgtctagccagctcaaaagctcacacctcaaggtttatcagtgccaatcttccatgtaataaattcactatccgtggagtagaaggatctgattacatcaatgccagttttattgatggatacagacaacagaaagcctacatcgctacccaggggcccttggcagagaccactgaagacttctggcggatgctctgggaacacaattccaccatagttgtgatgctcaccaagctgcgtgaaatgggcagagagaaatgtcaccaatactggccagcagaacggtctgcaagataccagtactttgttgtagatcccatggctgagtacaacatgccacagtatatcctaagggaattcaaggtcacagatgccagggacggccagtcccgaacagtaaggcagttccagttcactgactggccagagcaaggagtgccaaagtccggagaaggatttattgacttcatcggccaagtccataaaacaaaagaacagtttggccaagatggacccatttcagtccattgcagcgcgggcgttggaagaactggagtcttcataacgctaagcattgttttggaaagaatgagatatgaaggagttgtagatatcttccagactgtcaaaatgttaagaacacaacgaccagctatggtacagacagaggatcaatatcagttttcctatcgtgccgcactagagtacctgggcagctttgaccactatgcaacgtagaaacccctgacccattctggatttttactacaggcccttcaatatccatggagtctcttctgagccatacagggcacttgagaagtccttcttaacttctagctaacaactacttagtgggactattacacacaaaacaaattaaaaacaaattattccaggtggaccaagaattcacagtttaataatctaacctgaaaaataatgaagagaatcctgactgatgaggcatctgaaggattttatttacagatacctcaaggattcaaaatcaagggaagaagaaatcacagcaaagaaccaccatcttattcaggattgcttgaaaggtgcaaggagaaattgccagaatgctgcagttcagcacaagatatgtgctggtgtggcttctcacaatgaaacggactctgctttgacatcgccccttcccaccatactgctcataataacattttagggggaaaggggagggaatgtttaaaaagaaagtccttgatttagttttttagtattgtaaagatactgctgacctgtgcttcatttctaactgtgtaaacttttttttaacaaaatgtatcattcgataaagtgaattttaaaaaagttacataactcttcatttttttatttccaaatcgtaggtttttttaagctgtagaactgttatctgtaatatcttgctgtagaaatatcaaatcatttgaaaatttgcacatttttgtgcaaaactcaatctacagtatcagtctcgtcagatatattaattttacacttcagttttgattggtgagaaagtacccattctcttcaaataatcaaagataattattattttgttttgtttttggaatcaacagggaggcgcaaagtataaagttgctgctaacatatatacatatatatccatattttataagggtgtctatgtatatatagacagtgtgtccacacaaaaaatagatacagttatcagtcagtcagttcttccatgatttagtttttttaaacgtagaaaagctattgtaaacatctctttccatttattcttaattttttgacatattggtatttctttaaagggaaatgaggaatgcacatcagtgattgattgtcaaacctcaccccctgatttcctacctaatctacccccacctaaccaatcaatcacatccacaaattgttttgtttgtttgttagtcaggcttccaacaaagttcaatatttctaacactctagtgcaataaaaattattattaaatagctaagaggtgtgcatgtgggaaaggtcagtgcatatccctttaggaggggagaatgttgtaatatatcagctatcgagttgtttaaaaaaagtgtattcaatcgtatattgtctatagtatgtgctatgaaatttgcatttatgatatgtaacaggggcaaagccaaattcatgttactctgttcagtcagaaacattttgtggcatacagcattcctgggaagtgctgtactttgtttcgttttggttttagttttgcatttagagtgccttataattgatgcctattttaatagcatttctttttagcttttggttcgtatttccattcactgttcgtatctgttactttctattaaagcattatctgtttaccacatgtacaaaaactctttgaataatatgcattcctagttttcagccaagtcggggatgttagtgattgtaccagcccaaagcacttggataatcagggcccttcttccttttataatcaatcatcaacatcagaaaaagctacttgttttatttatattcccttccaaatccgctctggaacatgcagtaactgcaccaaacttattttagtaacaaatatcattggcaactttggaatatatttgatattccattaggatttttctaaaaggggaaataaactatatatatatatgtatcttacccccaattcttccaacagaatttctataggaagccatggatgatggcataagtttgccacatattacatgattttaaataatcctcaaaatacccaaggaactcttaaagagttttggtatgagtatactactttggtttaattttagcttcatggatgttctgcatggaaggatttttgttttccacattttcccattgctagcagagtgaaatccaagagaccaaacatttgcaagcattgtatttgagcacttttgtaaaaaacaaagaaaaagaaaaaaaagaaaatatatataatactaaaaaaaagtatctagaaggctacctcagaatgagactctctaacctacatcagaaccagagaagaatgtgcactatgtgggtctgttatcattattttcttttagtttgtatctttttggagatttatccaagtgccagattactcagtgctataattttcttttagttaaacaaagggggtcagacagacattgcatcatccagacatgccttgttggacatgtagaatccgatggagcactgcacaccagaatgattggccaatgagcagcttctctccctgaaacaataactgcccatttggcaaagggaaagatgacaataatcagaagaagaaaatgaatgggatgcataccatagacgaacgaggcggagactattgcgggaatcttactgttcaggagctgttcctagaactaactcccttactgtcattgatgtgcattccactctgtgcttttctgtacaaccattcaagttttaatttcccaggtgaaccatctttatctgccattaccacaagctttcaagtttccagttattttcatcatcataaccagtacggtgctattatttacctatgtacgtgtagttatgtataattttgtaattagttacaatggtaaaaaaaatcaaaatatataaaaagtgatttgtacagaactttattttagctcttttttaaaaatgatttgcatggttagaaaacggcgaggacagccaggggagggaagggcctctagggaactttgcactttctatacctttgtactatgcactgccctattgattctacacccaataatgatattacttgaacccatctgtaagaaactgcttcggaaattcatttgtgtgtatgtaaataacacaacatagaaacaggaagggaaaaaagtctgcagtaatgcacgtattttttttctttcctgtttattttcggttttgctttaagtccttttatttttaattccctttttgtttttctttttgggttttggttccttttgggtttatgggtgccctgatactccagcagagatcagaaggctacagatccattctatccatccgttatgtggctttgccatcccagcttggagtgtctttacaaagataataacagttgtgttctttgctctcgttttggatgcatagactgaaaaattaaaacaaataacttgtaaaatggcttgttaaaaaatacaattacctctaattagtagtacgcgtaaatgttttacagaatgaaaggcgtgctttttattttcttacttcgttacattggtggcgaaagaagtctgtatgaaaatcagttctttgctgacacaagttccatttgttacaaatgaattctaataaaaatgtcagtgttatgcaaaaaaag

SEQ ID NO: 315798 - DNA, 7055 bp, Homo sapiens
ctagtatctcagcctactttaataaagtaagacaaggagcatatttccacaaaggtatgtaggtcaaacattgcctgttttgttttgttttggtaagtaagaaaatgggaataccagtagagtggaactccctcatttggcaatgactgaaatgtgaacgttcagattggttggtcttaccactccatcccatgtgctccagttccagggaaacctcggcttgtgattaaccacactcagatgaatactgctcttattcagtggcaccctccggtggacacatttggacctcttcagggctaccgtctaaaatttggccgcaaggatatggagccacttactactcttgagttctctgaaaaagaagatcactttacagctacagacatccacaagggagcatcatacgtcttcaggctctcagccagaaacaaagtgggctttggggaggagatggtgaaggagatttccattccagaagaagtaccaactggattccctcaaaaccttcactcagaaggcaccacttcaacctccgtccagttatcttggcaaccacctgtcctggcagagagaaatggcattatcaccaagtatacccttctttatagggatatcaacatcccccttctcccgatggagcagcttattgttccagctgacaccactatgacactcactggcttaaaaccagataccacatacgatgtaaaagtacgtgctcatacgagcaaagggcccgggccatatagtcccagtgtccagttcaggacactgcctgtggatcaagtgtttgcaaaaaattttcatgtcaaagcagtaatgaagacttccgtgttgctgtcttgggagattccagagaattataactccgccatgcctttcaaaattctttatgatgatgggaaaatggtagaagaagtggatggccgagccacacagaagttaattgtcaacctgaagcctgagaaatcatattcatttgtgctgacaaatcgtggaaacagtgctggtgggctgcagcacagggtcacggcaaagactgcaccagatgtattacgtaccaagcctgccttcattgggaagaccaacttggatggcatgattactgtgcaactgcctgaagtacctgcaaatgagaatataaaaggttactacataataattgtgcctttgaagaaatctcgcgggaaatttatcaagccatgggagagtccagatgaaatggaattagatgagctgcttaaggagatatctaggaagcgcagaagcatccgttatgggagagaagttgaattaaagccatatattgccgctcactttgatgtccttcccactgagttcaccctgggggatgacaagcattatggtggatttacaaacaagcaactccaaagtggtcaagaatatgtcttctttgtgttagcagtaatggaacatgcagagtctaagatgtatgcaaccagcccttactccgaccccgtggtgtcaatggatctggatccgcagccaatcacggatgaagaagaaggcttgatctgggttgtaggtcctgtccttgcagtggtctttatcatctgcattgtcattgctattcttctttataaaaggaagagggcagagtccgactctagaaaaagcagcataccgaacaataaggagatcccttcacaccacccaacagaccctgtagaactgaggcgccttaactttcaaacaccgggtatggctagccatcctccaatacccatcttggaacttgcagaccacattgaaagattgaaagcaaatgacaacttgaagttttcccaggaatatgagtcaattgaccctggccagcagttcacttgggaacattcaaacttggaagtaaacaaaccaaagaatagatacgcgaatgtaatcgcatatgatcattcccgggttctcctatcagctatagaagggatcccaggaagtgactatgtgaatgccaactacatagatgggtataggaagcaaaatgcctatattgcaacacagggatctctccccgaaacatttggggacttttggagaatgatatgggaacaacggagtgccacagttgtcatgatgacaaaactagaagaaagatcaagggtgaagtgtgaccagtattggcctagcagaggcacagaaacccacggactcgttcaagtaacgctgcttgatactgtggagctggccacatattgtgttcgaacatttgcactttacaagaatggttcaagtgagaagagagaagtgagacaattccagttcaccgcctggcctgatcatggtgttccagaacaccctacaccttttctagctttcttacgtagagtcaaaacctgtaaccctcccgatgctggtccgatggttgtgcactgcagtgcgggagttggccggactggttgcttcatcgtcatagatgccatgttagaaagaataaagcatgaaaaaactgtagatatttatggccatgtaactttaatgagagcccagaggaactatatggttcaaacagaagaccaatacatctttatccatgatgcactgttagaagcagtgacttgtggaaataccgaagtgccagctagaaacttgtatgcctacattcagaagctgacacaaatagaaacgggagagaatgtcacaggaatggagctcgaatttaagcgtctagccagctcaaaagctcacacctcaaggtttatcagtgccaatcttccatgtaataaattcactatccgtggagtagaaggatctgattacatcaatgccagttttattgatggatacagacaacagaaagcctacatcgctacccaggggcccttggcagagaccactgaagacttctggcggatgctctgggaacacaattccaccatagttgtgatgctcaccaagctgcgtgaaatgggcagagagaaatgtcaccaatactggccagcagaacggtctgcaagataccagtactttgttgtagatcccatggctgagtacaacatgccacagtatatcctaagggaattcaaggtcacagatgccagggacggccagtcccgaacagtaaggcagttccagttcactgactggccagagcaaggagtgccaaagtccggagaaggatttattgacttcatcggccaagtccataaaacaaaagaacagtttggccaagatggacccatttcagtccattgcagcgcgggcgttggaagaactggagtcttcataacgctaagcattgttttggaaagaatgagatatgaaggagttgtagatatcttccagactgtcaaaatgttaagaacacaacgaccagctatggtacagacagaggatcaatatcagttttcctatcgtgccgcactagagtacctgggcagctttgaccactatgcaacgtagaaacccctgacccattctggatttttactacaggcccttcaatatccatggagtctcttctgagccatacagggcacttgagaagtccttcttaacttctagctaacaactacttagtgggactattacacacaaaacaaattaaaaacaaattattccaggtggaccaagaattcacagtttaataatctaacctgaaaaataatgaagagaatcctgactgatgaggcatctgaaggattttatttacagatacctcaaggattcaaaatcaagggaagaagaaatcacagcaaagaaccaccatcttattcaggattgcttgaaaggtgcaaggagaaattgccagaatgctgcagttcagcacaagatatgtgctggtgtggcttctcacaatgaaacggactctgctttgacatcgccccttcccaccatactgctcataataacattttagggggaaaggggagggaatgtttaaaaagaaagtccttgatttagttttttagtattgtaaagatactgctgacctgtgcttcatttctaactgtgtaaacttttttttaacaaaatgtatcattcgataaagtgaattttaaaaaagttacataactcttcatttttttatttccaaatcgtaggtttttttaagctgtagaactgttatctgtaatatcttgctgtagaaatatcaaatcatttgaaaatttgcacatttttgtgcaaaactcaatctacagtatcagtctcgtcagatatattaattttacacttcagttttgattggtgagaaagtacccattctcttcaaataatcaaagataattattattttgttttgtttttggaatcaacagggaggcgcaaagtataaagttgctgctaacatatatacatatatatccatattttataagggtgtctatgtatatatagacagtgtgtccacacaaaaaatagatacagttatcagtcagtcagttcttccatgatttagtttttttaaacgtagaaaagctattgtaaacatctctttccatttattcttaattttttgacatattggtatttctttaaagggaaatgaggaatgcacatcagtgattgattgtcaaacctcaccccctgatttcctacctaatctacccccacctaaccaatcaatcacatccacaaattgttttgtttgtttgttagtcaggcttccaacaaagttcaatatttctaacactctagtgcaataaaaattattattaaatagctaagaggtgtgcatgtgggaaaggtcagtgcatatccctttaggaggggagaatgttgtaatatatcagctatcgagttgtttaaaaaaagtgtattcaatcgtatattgtctatagtatgtgctatgaaatttgcatttatgatatgtaacaggggcaaagccaaattcatgttactctgttcagtcagaaacattttgtggcatacagcattcctgggaagtgctgtactttgtttcgttttggttttagttttgcatttagagtgccttataattgatgcctattttaatagcatttctttttagcttttggttcgtatttccattcactgttcgtatctgttactttctattaaagcattatctgtttaccacatgtacaaaaactctttgaataatatgcattcctagttttcagccaagtcggggatgttagtgattgtaccagcccaaagcacttggataatcagggcccttcttccttttataatcaatcatcaacatcagaaaaagctacttgttttatttatattcccttccaaatccgctctggaacatgcagtaactgcaccaaacttattttagtaacaaatatcattggcaactttggaatatatttgatattccattaggatttttctaaaaggggaaataaactatatatatatatgtatcttacccccaattcttccaacagaatttctataggaagccatggatgatggcataagtttgccacatattacatgattttaaataatcctcaaaatacccaaggaactcttaaagagttttggtatgagtatactactttggtttaattttagcttcatggatgttctgcatggaaggatttttgttttccacattttcccattgctagcagagtgaaatccaagagaccaaacatttgcaagcattgtatttgagcacttttgtaaaaaacaaagaaaaagaaaaaaaagaaaatatatataatactaaaaaaaagtatctagaaggctacctcagaatgagactctctaacctacatcagaaccagagaagaatgtgcactatgtgggtctgttatcattattttcttttagtttgtatctttttggagatttatccaagtgccagattactcagtgctataattttcttttagttaaacaaagggggtcagacagacattgcatcatccagacatgccttgttggacatgtagaatccgatggagcactgcacaccagaatgattggccaatgagcagcttctctccctgaaacaataactgcccatttggcaaagggaaagatgacaataatcagaagaagaaaatgaatgggatgcataccatagacgaacgaggcggagactattgcgggaatcttactgttcaggagctgttcctagaactaactcccttactgtcattgatgtgcattccactctgtgcttttctgtacaaccattcaagttttaatttcccaggtgaaccatctttatctgccattaccacaagctttcaagtttccagttattttcatcatcataaccagtacggtgctattatttacctatgtacgtgtagttatgtataattttgtaattagttacaatggtaaaaaaaatcaaaatatataaaaagtgatttgtacagaactttattttagctcttttttaaaaatgatttgcatggttagaaaacggcgaggacagccaggggagggaagggcctctagggaactttgcactttctatacctttgtactatgcactgccctattgattctacacccaataatgatattacttgaacccatctgtaagaaactgcttcggaaattcatttgtgtgtatgtaaataacacaacatagaaacaggaagggaaaaaagtctgcagtaatgcacgtattttttttctttcctgtttattttcggttttgctttaagtccttttatttttaattccctttttgtttttctttttgggttttggttccttttgggtttatgggtgccctgatactccagcagagatcagaaggctacagatccattctatccatccgttatgtggctttgccatcccagcttggagtgtctttacaaagataataacagttgtgttctttgctctcgttttggatgcatagactgaaaaattaaaacaaataacttgtaaaatggcttgttaaaaaatacaattacctctaattagtagtacgcgtaaatgttttacagaatgaaaggcgtgctttttattttcttacttcgttacattggtggcgaaagaagtctgtatgaaaatcagttctttgctgacacaagttccatttgttacaaatgaattctaataaaaatgtcagtgttatgcaaaaaaag

SEQ ID NO: 315799 - DNA, 2717 bp, Homo sapiens
  misc_feature (1)..(1): n is a, c, g, or t
ngaggcccaaggataaagttgcgcaaacatatatacttatatgccctatttataagggggccatggaataatagcagtgtttttttaaacgtagaaaagctattgtaaacatctctttccatttattcttaattttttgacatattggtatttctttaaagggaaatgaggaatgcacatcagtgattgattgtcaaacctcaccccctgatttcctacctaatctacccccacctaaccaatcaatcacatccacaaattgttttgtttgtttgttagtcaggcttccaacaaagttcaatatttctaacactctagtgcaataaaaattattattaaatagctaagaggtgtgcatgtgggaaaggtcagtgcatatccctttaggaggggagaatgttgtaatatatcagctatcgagttgtttaaaaaaagtgtattcaatcgtatattgtctatagtatgtgctatgaaatttgcatttatgatatgtaacaggggcaaagccaaattcatgttactctgttcagtcagaaacattttgtggcatacagcattcctgggaagtgctgtactttgtttcgttttggttttagttttgcatttagagtgccttataattgatgcctattttaatagcatttctttttagcttttggttcgtatttccattcactgttcgtatctgttactttctattaaagcattatctgtttaccacatgtacaaaaactctttgaataatatgcattcctagttttcagccaagtcggggatgttagtgattgtaccagcccaaagcacttggataatcagggcccttcttccttttataatcaatcatcaacatcagaaaaagctacttgttttatttatattcccttccaaatccgctctggaacatgcagtaactgcaccaaacttattttagtaacaaatatcattggcaactttggaatatatttgatattccattaggatttttctaaaaggggaaataaactatatatatatatgtatcttacccccaattcttccaacagaatttctataggaagccatggatgatggcataagtttgccacatattacatgattttaaataatcctcaaaatacccaaggaactcttaaagagttttggtatgagtatactactttggtttaattttagcttcatggatgttctgcatggaaggatttttgttttccacattttcccattgctagcagagtgaaatccaagagaccaaacatttgcaagcattgtatttgagcacttttgtaaaaaacaaagaaaaagaaaaaaaagaaaatatatataatactaaaaaaaagtatctagaaggctacctcagaatgagactctctaacctacatcagaaccagagaagaatgtgcactatgtgggtctgttatcattattttcttttagtttgtatctttttggagatttatccaagtgccagattactcagtgctataattttcttttagttaaacaaagggggtcagacagacattgcatcatccagacatgccttgttggacatgtagaatccgatggagcactgcacaccagaatgattggccaatgagcagcttctctccctgaaacaataactgcccatttggcaaagggaaagatgacaataatcagaagaagaaaatgaatgggatgcataccatagacgaacgaggcggagactattgcgggaatcttactgttcaggagctgttcctagaactaactcccttactgtcattgatgtgcattccactctgtgcttttctgtacaaccattcaagttttaatttcccaggtgaaccatctttatctgccattaccacaagctttcaagtttccagttattttcatcatcataaccagtacggtgctattatttacctatgtacgtgtagttatgtataattttgtaattagttacaatggtaaaaaaaatcaaaatatataaaaagtgatttgtacagaactttattttagctcttttttaaaaatgatttgcatggttagaaaacggcgaggacagccaggggagggaagggcctctagggaactttgcactttctatacctttgtactatgcactgccctattgattctacacccaataatgatattacttgaacccatctgtaagaaactgcttcggaaattcatttgtgtgtatgtaaataacacaacatagaaacaggaagggaaaaaagtctgcagtaatgcacgtattttttttctttcctgtttattttcggttttgctttaagtccttttatttttaattccctttttgtttttctttttgggttttggttccttttgggtttatgggtgccctgatactccagcagagatcagaaggctacagatccattctatccatccgttatgtggctttgccatcccagcttggagtgtctttacaaagataataacagttgtgttctttgctctcgttttggatgcatagactgaaaaattaaaacaaataacttgtaaaatggcttgttaaaaaatacaattacctctaattagtagtacgcgtaaatgttttacagaatgaaaggcgtgctttttattttcttacttcgttacattggtggcgaaagaagtctgtatgaaaatcagttctttgctgacacaagttccatttgttacaaatgaattctaataaaaatgtcagtgttatgcaaaaaaag

SEQ ID NO: 315800 - DNA, 4832 bp, Homo sapiens
cggcggccgctgctccgcgggattaaattggccgcccggaggcggcggcgcggccgtggcggggcgcgaaggcgctggaggaaagtgttggcggcggcgcgggaggcggtggcggcggctgcccggggccaacatgaccaggctctgaaagtgttccagctgaaatttcagatcggacagactcgctgcggctccggaggcagtgattccaagctgctcgcgcacgctgctgccaagctgcaggatggtgcacgtagccaggctgctgctgctgctcctcactttcttcctccgcacggatgctgagacacctccaaggtttacacgaacacccgttgatcagacaggggtctctggcggagttgcctctttcatctgccaagctacgggagacccaagacctaaaattgtctggaacaaaaaaggaaagaaagtcagcaatcagagatttgaggtaatagagtttgacgatgggtctggatcagttctcagaatacaacccttacggactccgagggatgaggccatttatgaatgtgtggcctcaaataatgtgggagaaataagtgtatccaccagactcacagttttgcgggaagatcaaattcccaggggcttccctaccattgacatgggcccacagttgaaggtggttgagcgtactcgcacggccaccatgctttgtgcagccagtggtaatccggatccagaaatcacttggtttaaagatttcttacctgtggacacaagcaacaacaatggtcgtattaagcagttacgatcaggagcccttcagattgagcagagtgaagagtctgaccaaggaaaatatgagtgtgttgccaccaacagcgcgggcactcgctattccgctcctgccaatttatatgtcagagagctgcgagaagttcgccgtgtcccaccaagattctctatcccacccactaatcatgaaatcatgccaggcggaagcgttaatatcacctgtgtggccgtggggtcaccaatgccttatgtaaagtggatgttgggggcagaagatctgacacctgaagatgatatgccaataggaagaaatgtgctagaactgaatgatgtaagacagtcagcaaattacacctgtgttgctatgtcaacactgggtgtcattgaagcaatagcacagatcactgtcaaagccttacccaaacctccaggaactcctgtagtgaccgagagcacagctacaagcatcacactgacgtgggactctgggaaccctgagcctgtttcttattacataattcagcataaacctaaaaactctgaggaactttacaaagaaattgatggggtggcgaccacacgctacagtgtcgctggactaagtccctactcggattatgaattcagggttgttgctgtcaataacattgggcgggggcctcccagcgaacctgtgctaacacaaacctcagagcaagcaccatccagtgccccgagggatgtccaggcacgaatgttgagttcgaccaccattttggtacagtggaaggaacctgaagagccaaatggacagatccaaggatatagagtttattatacaatggatcccactcaacatgtcaacaactggatgaaacacaatgtagctgacagccaaatcactactattggcaacttagtgccccagaaaacatattctgtcaaagtcctggcttttacctcaattggagatggtcccctttcaagtgacatacaagtcatcactcagacaggagtaccagggcagccactaaacttcaaagcagaacctgagtctgaaacaagtattttgctctcttggacacctccacgttcagataccattgccaactatgaactggtctacaaagatggggagcatggagaggagcaacgaattaccattgagccagggacatcatataggctgcaaggactgaaaccaaacagcttatactatttccgtctggctgcacgctcccctcaaggcctgggtgcttctactgcagaaatatcagctagaaccatgcagtcaaagccgtcagctcctcctcaagacattagttgcaccagcccaagttccactagtattttggtaagttggcaacctccaccagtggaaaaacagaatggcattatcactgaatactccatcaagtacactgcagtggatggggaagatgacaagcctcacgagattttgggaattccttcggacactaccaaataccttttggaacagctggaaaaatggactgaataccggatcactgtgacagcccatacagatgtcggccctggccctgagagcttgtccgtgttgattcgaaccaatgaagatgttcctagtggtcctcctcgcaaagtcgaggtagaggctgtcaactcaacatctgttaaagtctcatggcgctcacccgtgcccaataaacagcatggccagataagaggatatcaggtgcattatgtgaggatggaaaatggtgagcccaagggccagcccatgctgaaagatgtcatgctggctgatgcacagtgggaatttgatgatactactgaacatgacatgatcatttctgggctccagcctgaaacttcctactccctcaccgtcacagcctacacaaccaaaggagatggtgctcgcagcaagcccaaactggtgtccaccactggggcagttccagggaaacctcggcttgtgattaaccacactcagatgaatactgctcttattcagtggcaccctccggtggacacatttggacctcttcagggctaccgtctaaaatttggccgcaaggatatggagccacttactactcttgagttctctgaaaaagaagatcactttacagctacagacatccacaagggagcatcatacgtcttcaggctctcagccagaaacaaagtgggctttggggaggagatggtgaaggagatttccattccagaagaagtaccaactggattccctcaaaaccttcactcagaaggcaccacttcaacctccgtccagttatcttggcaaccacctgtcctggcagagagaaatggcattatcaccaagtatacccttctttatagggatatcaacatcccccttctcccgatggagcagcttattgttccagctgacaccactatgacactcactggcttaaaaccagataccacatacgatgtaaaagtacgtgctcatacgagcaaagggcccgggccatatagtcccagtgtccagttcaggacactgcctgtggatcaagtgtttgcaaaaaattttcatgtcaaagcagtaatgaagacttccgtgttgctgtcttgggagattccagagaattataactccgccatgcctttcaaaattctttatgatgatgggaaaatggtagaagaagtggatggccgagccacacagaagttaattgtcaacctgaagcctgagaaatcatattcatttgtgctgacaaatcgtggaaacagtgctggtgggctgcagcacagggtcacggcaaagactgcaccagatgtattacgtaccaagcctgccttcattgggaagaccaacttggatggcatgattactgtgcaactgcctgaagtacctgcaaatgagaatataaaaggttactacataataattgtgcctttgaagaaatctcgcgggaaatttatcaagccatgggagagtccagatgaaatggaattagatgagctgcttaaggagatatctaggaagcgcagaagcatccgttatgggagagaagttgaattaaagccatatattgccgctcactttgatgtccttcccactgagttcaccctgggggatgacaagcattatggtggatttacaaacaagcaactccaaagtggtcaagaatatgtcttctttgtgttagcagtaatggaacatgcagagtctaagatgtatgcaaccagcccttactccgaccccgtggtgtcaatggatctggatccgcagccaatcacggatgaagaagaaggcttgatctgggttgtaggtcctgtccttgcagtggtctttatcatctgcattgtcattgctattcttctttataaaaggaagagggcagagtccgactctagaaaaagcagcataccgaacaataaggagatcccttcacaccacccaacagaccctgtagaactgaggcgccttaactttcaaacaccgggtatggctagccatcctccaatacccatcttggaacttgcagaccacattgaaagattgaaagcaaatgacaacttgaagttttcccaggaatatgagtcaattgaccctggccagcagttcacttgggaacattcaaacttggaagtaaacaaaccaaagaatagatacgcgaatgtaatcgcatatgatcattcccgggttctcctatcagctatagaagggatcccaggaagtgactatgtgaatgccaactacatagatgggtataggaagcaaaatgcctatattgcaacacagggatctctccccgaaacatttggggacttttggagaatgatatgggaacaacggagtgccacagttgtcatgatgacaaaactagaagaaagatcaagggtaagaataagtatccacctctttccttttaaaaattttccctcagagtccctatgttgcatattttattctgttcagaatctaacctttccctaaggcttatctttctaacagatactaattatgaatgggcatcaacaactctaattaaaccattctttaaaactcctctgggtgttttcacaaaagaaattctcccatgttatgatgtgtgtggttgctaaaaagt

SEQ ID NO: 315801 - DNA, 2869 bp, Homo sapiens
cggcggccgctgctccgcgggattaaattggccgcccggaggcggcggcgcggccgtggcggggcgcgaaggcgctggaggaaagtgttggcggcggcgcgggaggcggtggcggcggctgcccggggccaacatgaccaggctctgaaagtgttccagctgaaatttcagatcggacagactcgctgcggctccggaggcagtgattccaagctgctcgcgcacgctgctgccaagctgcaggatggtgcacgtagccaggctgctgctgctgctcctcactttcttcctccgcacggatgctgagacacctccaaggtttacacgaacacccgttgatcagacaggggtctctggcggagttgcctctttcatctgccaagctacgggagacccaagacctaaaattgtctggaacaaaaaaggaaagaaagtcagcaatcagagatttgaggtaatagagtttgacgatgggtctggatcagttctcagaatacaacccttacggactccgagggatgaggccatttatgaatgtgtggcctcaaataatgtgggagaaataagtgtatccaccagactcacagttttgcgggaagatcaaattcccaggggcttccctaccattgacatgggcccacagttgaaggtggttgagcgtactcgcacggccaccatgctttgtgcagccagtggtaatccggatccagaaatcacttggtttaaagatttcttacctgtggacacaagcaacaacaatggtcgtattaagcagttacgatcaggagcccttcagattgagcagagtgaagagtctgaccaaggaaaatatgagtgtgttgccaccaacagcgcgggcactcgctattccgctcctgccaatttatatgtcagagagctgcgagaagttcgccgtgtcccaccaagattctctatcccacccactaatcatgaaatcatgccaggcggaagcgttaatatcacctgtgtggccgtggggtcaccaatgccttatgtaaagtggatgttgggggcagaagatctgacacctgaagatgatatgccaataggaagaaatgtgctagaactgaatgatgtaagacagtcagcaaattacacctgtgttgctatgtcaacactgggtgtcattgaagcaatagcacagatcactgtcaaagccttacccaaacctccaggaactcctgtagtgaccgagagcacagctacaagcatcacactgacgtgggactctgggaaccctgagcctgtttcttattacataattcagcataaacctaaaaactctgaggaactttacaaagaaattgatggggtggcgaccacacgctacagtgtcgctggactaagtccctactcggattatgaattcagggttgttgctgtcaataacattgggcgggggcctcccagcgaacctgtgctaacacaaacctcagagcaagcaccatccagtgccccgagggatgtccaggcacgaatgttgagttcgaccaccattttggtacagtggaaggaacctgaagagccaaatggacagatccaaggatatagagtttattatacaatggatcccactcaacatgtcaacaactggatgaaacacaatgtagctgacagccaaatcactactattggcaacttagtgccccagaaaacatattctgtcaaagtcctggcttttacctcaattggagatggtcccctttcaagtgacatacaagtcatcactcagacaggagtaccagggcagccactaaacttcaaagcagaacctgagtctgaaacaagtattttgctctcttggacacctccacgttcagataccattgccaactatgaactggtctacaaagatggggagcatggagaggagcaacgaattaccattgagccagggacatcatataggctgcaaggactgaaaccaaacagcttatactatttccgtctggctgcacgctcccctcaaggcctgggtgcttctactgcagaaatatcagctagaaccatgcagtcaagtaggtgtctctctttgcttactttctgcctttttatttcctcggggagatgttgctagctttcaccttcaccaataagcaaacctgctaatatgcttaatagttagtctctaggttagtatgcatcacacttcacaggtgaaagtgtaactgtgacttcttttggtctcatcacttgatccaaataacagatcccaccttcccacttcctacactgaaagacttttaaagaaggtagtagacgtccatgggtgaaatgtgggttaaaggagttagatcaagccctgtttaatgaattacaagtctttaaagcaaaattcacattgagaaccctgtaaaataatcataggagggcttcgcaaatgaaagaggctgcaaaagacaaaaaaaaactttatttttttaagcacacaggctttagctttgcaatcaaacaagtccttatttcatgtatttgtttctactaagaaaagctcagctctgatgacttgtttcttattaactctgtgtgtagtacctgtggaaatttggaacattgacagaaaatctgtatgtggacaaattaagaaacaatggaataatcgcaaacatatttgcaattctaaattgtattttgtttcctggggttcaatttctttttggagctgttacccttaagcatagctgtgtttatcacaatgggggttaattgttcccagggcagattgttttgcataaagtattatacaggattttgtttttggtggaaagtttggtggcttattattattaattgctttttattagtatgtgtttacagttcattcataaaaaatactatttaccttgaa

SEQ ID NO: 315802 - DNA, 1776 bp, Homo sapiens
cggcggccgctgctccgcgggattaaattggccgcccggaggcggcggcgcggccgtggcggggcgcgaaggcgctggaggaaagtgttggcggcggcgcgggaggcggtggcggcggctgcccggggccaacatgaccaggctctgaaagtgttccagctgaaatttcagatcggacagactcgctgcggctccggaggcagtgattccaagctgctcgcgcacgctgctgccaagctgcaggatggtgcacgtagccaggctgctgctgctgctcctcactttcttcctccgcacggatgctgagacacctccaaggtttacacgaacacccgttgatcagacaggggtctctggcggagttgcctctttcatctgccaagctacgggagacccaagacctaaaattgtctggaacaaaaaaggaaagaaagtcagcaatcagagatttgaggtaatagagtttgacgatgggtctggatcagttctcagaatacaacccttacggactccgagggatgaggccatttatgaatgtgtggcctcaaataatgtgggagaaataagtgtatccaccagactcacagttttgcgggaagatcaaattcccaggggcttccctaccattgacatgggcccacagttgaaggtggttgagcgtactcgcacggccaccatgctttgtgcagccagtggtaatccggatccagaaatcacttggtttaaagatttcttacctgtggacacaagcaacaacaatggtcgtattaagcagttacgatcaggtactgatttttctccctcttctctttctctgttacttaatgggtggtccatgtttgtgatgtcatagcctgtttcagagtctgtctttctccttttctctgtgtgttttgcagcttctgtttaatccacattgctcactgctgtgactgtatttttggtaattttttaatttactgctttttcgcagtatttgatggatccattttctcctctttctttcttctttctctgttttcttttgaaacaaatttatttcaacattggacttcattcagaacttgcaaggagatccaatggttgtatccattaaaaaataaaatgttcatattaaaccctaaaatgtttcaattttattaaagtatgttttctgctatcttttctacatttgaactcatcaaagtaccaaagtttagtaagtctgggcacatctgctttcttttcactaatacataaaaacacagaaacgttatctcatgagtaaccagatgtatgtttttaaaagtctttagaaaataccagtaaaaggaggggatttttattaatactatgataataacattgtgagtgaacattttctacacattagccacagtagtgtgcgcccgtcaaggtttttgaaccctccagtgactggatctacagaagtctgcttttggtgtagactccagcttttgctgttttctctctctctttacccttttctccttttcccattcccatcccaagtttatgcctttgctctcttagattttcacagggatatataataataagctgtttactttgacattggtagtaatattggtatagaattctaagttgtttaactgcctgtcttcccagaattctcagcttttgacctgtcctgtgatgttaaagcgtcttgttaactgcctcttttgcttgttgtcagcagaattgtgtagattagcattctggtattgtaaatgaagaattaattattcacatgtaacatagatgatttagtat

SEQ ID NO: 315803 - DNA, 440 bp, Homo sapiens
gctcacctggttgaataacactccttgttttccagggatcccaggaagtgactatgtgaatgccaactacatagatgggtataggaagcaaaatgcctatattgcaacacagggatctctccccgaaacatttggggacttttggagaatgatatgggaacaacggagtgccacagttgtcatgatgacaaaactagaagaaagatcaagggtaagaataagtatccacctctttccttttaaaaattttccctcagagtccctatgttgcatattttattctgttcagaatctaacctttccctaaggcttatctttctaacagatactaattatgaatgggcatcaacaactctaattaaaccattctttaaaactcctctgggtgttttcacaaaagaaattctcccatgttatgatgtgtgtggttgctaaaaagt

SEQ ID NO: 315804 - DNA, 626 bp, Homo sapiens
gtaattttttaatttactgctttttcgcagtatttgatggatccattttctcctctttctttcttctttctctgttttcttttgaaacaaatttatttcaacattggacttcattcagaacttgcaaggagatccaatggttgtatccattaaaaaataaaatgttcatattaaaccctaaaatgtttcaattttattaaagtatgttttctgctatcttttctacatttgaactcatcaaagtaccaaagtttagtaagtctgggcacatctgctttcttttcactaatacataaaaacacagaaacgttatctcatgagtaaccagatgtatgtttttaaaagtctttagaaaataccagtaaaaggaggggatttttattaatactatgataataacattgtgagtgaacattttctacacattagccacagtagtgtgcgcccgtcaaggtttttgaaccctccagtgactggatctacagaagtctgcttttggtgtagactccagcttttgctgttttctctctctctttacccttttctccttttcccattcccatcccaagtttatgcctttgctctcttagattaaaagtagagataattctaaatttcttaagttt

SEQ ID NO: 315805 - DNA, 433 bp, Homo sapiens
aacagatctccatagcatgagctcaggcatgaaatttccagggcttagcatggctgcaagggatgtgcgagcatttgcagaatgaaggcagacggccttgtttttcccccagagcattagtagcatgttttgaatcagtgacattctattttgtcatttcaggacatgatcatttctgggctccagcctgaaacttcctactccctcaccgtcacagcctacacaaccaaaggagatggtgctcgcagcaagcccaaactggtgtccaccactggggcaggtaatcatgtctgtgcatgtatgtgccttgaacagtaatactaactttttaaatggtataggtagcttctagcaggcttttattatagtaaaatcagaggaaataaatggactatggtcaacttttgtgtttttagttcaggggtaaaaaaaa

SEQ ID NO: 315806 - DNA, 440 bp, Homo sapiens
cactgcaagagtaaataaatttaggatttcaagagtaaataaatttaggatttaaaggtatgtgagtgtggacaatatttatagcagataaaccataactaagtttctatttaaacatgttcctaactttttctaccctttttgttttcgggaaatgaaaatgattgttcttgtggtccgtatgcttgctgaatcctcctggcgtcttcctttgcggccgggtatgtggctttccttctaaaggacggccagtcccgaacagtaaggcagttccagttcactgactggccagagcaaggagtgccaaagtccggagaaggatttattgacttcatcggccaagtccataaaacaaaagaacagtttggccaagatggacccatttcagtccattgcaggtaagtttccatttgtgaataaagcagtgataagtggtggtg

SEQ ID NO: 315807 - DNA, 9961 bp, Homo sapiens
tccggcgcggcgccgccagccagcctcggcggggagagtgcagtttattctgggcctgtgtggaatagaaagacaattctttatttgactggtaggaaagaaaagagaagactcctcagggtttccaaggaggactggagcggctgctttagtgaagaagtgaagaatcaaggaagtaaaggacctgtctcaaagtcacacaactaggaaatcttgaggagtctgatacttttcatcctccagctataaaatcatcttgtagggggaagctgtacattggtggaaaataaaaggcaagcagttcctggcccgtgatattccagttagaggtgtctgactgacagcatgttggcaccgagggaagcgatgggcttcggctccaggtttctgtcctgagaccacagcagaatgtgccttggacaaaggcttggactccttgatcttctggtaacttcaaaaatctggtctcagggtggtgaactttttcttcgaattcctaacctgtgagcttacgaaaaagggagcatgcctgtcttattctcagtgcctcatgggaaataaaagattgggagatgatagctacctgatgatggtgcctgtccattaactgaacaactgtggttttgaacttcttgaggccagggactgtgtctgaaaacaccgacggtggctaactcaagggagacgtctggtgaacacccgtgggatctaaagaacaagctctgaaagtgttccagctgaaatttcagatcggacagactcgctgcggctccggaggcagtgattccaagctgctcgcgcacgctgctgccaagctgcaggatggtgcacgtagccaggctgctgctgctgctcctcactttcttcctccgcacggatgctgagacacctccaaggtttacacgaacacccgttgatcagacaggggtctctggcggagttgcctctttcatctgccaagctacgggagacccaagacctaaaattgtctggaacaaaaaaggaaagaaagtcagcaatcagagatttgaggtaatagagtttgacgatgggtctggatcagttctcagaatacaacccttacggactccgagggatgaggccatttatgaatgtgtggcctcaaataatgtgggagaaataagtgtatccaccagactcacagttttgcgggaagatcaaattcccaggggcttccctaccattgacatgggcccacagttgaaggtggttgagcgtactcgcacggccaccatgctttgtgcagccagtggtaatccggatccagaaatcacttggtttaaagatttcttacctgtggacacaagcaacaacaatggtcgtattaagcagttacgatcagaatctattggtggtacaccaataagaggagcccttcagattgagcagagtgaagagtctgaccaaggaaaatatgagtgtgttgccaccaacagcgcgggcactcgctattccgctcctgccaatttatatgtcagagagctgcgagaagttcgccgtgtcccaccaagattctctatcccacccactaatcatgaaatcatgccaggcggaagcgttaatatcacctgtgtggccgtggggtcaccaatgccttatgtaaagtggatgttgggggcagaagatctgacacctgaagatgatatgccaataggaagaaatgtgctagaactgaatgatgtaagacagtcagcaaattacacctgtgttgctatgtcaacactgggtgtcattgaagcaatagcacagatcactgtcaaagccttacccaaacctccaggaactcctgtagtgaccgagagcacagctacaagcatcacactgacgtgggactctgggaaccctgagcctgtttcttattacataattcagcataaacctaaaaactctgaggaactttacaaagaaattgatggggtggcgaccacacgctacagtgtcgctggactaagtccctactcggattatgaattcagggttgttgctgtcaataacattgggcgggggcctcccagcgaacctgtgctaacacaaacctcagagcaagcaccatccagtgccccgagggatgtccaggcacgaatgttgagttcgaccaccattttggtacagtggaaggaacctgaagagccaaatggacagatccaaggatatagagtttattatacaatggatcccactcaacatgtcaacaactggatgaaacacaatgtagctgacagccaaatcactactattggcaacttagtgccccagaaaacatattctgtcaaagtcctggcttttacctcaattggagatggtcccctttcaagtgacatacaagtcatcactcagacaggagtaccagggcagccactaaacttcaaagcagaacctgagtctgaaacaagtattttgctctcttggacacctccacgttcagataccattgccaactatgaactggtctacaaagatggggagcatggagaggagcaacgaattaccattgagccagggacatcatataggctgcaaggactgaaaccaaacagcttatactatttccgtctggctgcacgctcccctcaaggcctgggtgcttctactgcagaaatatcagctagaaccatgcagtcaaagccgtcagctcctcctcaagacattagttgcaccagcccaagttccactagtattttggtaagttggcaacctccaccagtggaaaaacagaatggcattatcactgaatactccatcaagtacactgcagtggatggggaagatgacaagcctcacgagattttgggaattccttcggacactaccaaataccttttggaacagctggaaaaatggactgaataccggatcactgtgacagcccatacagatgtcggccctggccctgagagcttgtccgtgttgattcgaaccaatgaagatgttcctagtggtcctcctcgcaaagtcgaggtagaggctgtcaactcaacatctgttaaagtctcatggcgctcacccgtgcccaataaacagcatggccagataagaggatatcaggtgcattatgtgaggatggaaaatggtgagcccaagggccagcccatgctgaaagatgtcatgctggctgatgcacagtgggaatttgatgatactactgaacatgacatgatcatttctgggctccagcctgaaacttcctactccctcaccgtcacagcctacacaaccaaaggagatggtgctcgcagcaagcccaaactggtgtccaccactggggcagttccagggaaacctcggcttgtgattaaccacactcagatgaatactgctcttattcagtggcaccctccggtggacacatttggacctcttcagggctaccgtctaaaatttggccgcaaggatatggagccacttactactcttgagttctctgaaaaagaagatcactttacagctacagacatccacaagggagcatcatacgtcttcaggctctcagccagaaacaaagtgggctttggggaggagatggtgaaggagatttccattccagaagaagtaccaactggattccctcaaaaccttcactcagaaggcaccacttcaacctccgtccagttatcttggcaaccacctgtcctggcagagagaaatggcattatcaccaagtatacccttctttatagggatatcaacatcccccttctcccgatggagcagcttattgttccagctgacaccactatgacactcactggcttaaaaccagataccacatacgatgtaaaagtacgtgctcatacgagcaaagggcccgggccatatagtcccagtgtccagttcaggacactgcctgtggatcaagtgtttgcaaaaaattttcatgtcaaagcagtaatgaagacttccgtgttgctgtcttgggagattccagagaattataactccgccatgcctttcaaaattctttatgatgatgggaaaatggtagaagaagtggatggccgagccacacagaagttaattgtcaacctgaagcctgagaaatcatattcatttgtgctgacaaatcgtggaaacagtgctggtgggctgcagcacagggtcacggcaaagactgcaccagatgtattacgtaccaagcctgccttcattgggaagaccaacttggatggcatgattactgtgcaactgcctgaagtacctgcaaatgagaatataaaaggttactacataataattgtgcctttgaagaaatctcgcgggaaatttatcaagccatgggagagtccagatgaaatggaattagatgagctgcttaaggagatatctaggaagcgcagaagcatccgttatgggagagaagttgaattaaagccatatattgccgctcactttgatgtccttcccactgagttcaccctgggggatgacaagcattatggtggatttacaaacaagcaactccaaagtggtcaagaatatgtcttctttgtgttagcagtaatggaacatgcagagtctaagatgtatgcaaccagcccttactccgaccccgtggtgtcaatggatctggatccgcagccaatcacggatgaagaagaaggcttgatctgggttgtaggtcctgtccttgcagtggtctttatcatctgcattgtcattgctattcttctttataaaaggaagagggcagagtccgactctagaaaaagcagcataccgaacaataaggagatcccttcacaccacccaacagaccctgtagaactgaggcgccttaactttcaaacaccgggtatggctagccatcctccaatacccatcttggaacttgcagaccacattgaaagattgaaagcaaatgacaacttgaagttttcccaggaatatgagtcaattgaccctggccagcagttcacttgggaacattcaaacttggaagtaaacaaaccaaagaatagatacgcgaatgtaatcgcatatgatcattcccgggttctcctatcagctatagaagggatcccaggaagtgactatgtgaatgccaactacatagatgggtataggaagcaaaatgcctatattgcaacacagggatctctccccgaaacatttggggacttttggagaatgatatgggaacaacggagtgccacagttgtcatgatgacaaaactagaagaaagatcaagggtgaagtgtgaccagtattggcctagcagaggcacagaaacccacggactcgttcaagtaacgctgcttgatactgtggagctggccacatattgtgttcgaacatttgcactttacaagaatggttcaagtgagaagagagaagtgagacaattccagttcaccgcctggcctgatcatggtgttccagaacaccctacaccttttctagctttcttacgtagagtcaaaacctgtaaccctcccgatgctggtccgatggttgtgcactgcagtgcgggagttggccggactggttgcttcatcgtcatagatgccatgttagaaagaataaagcatgaaaaaactgtagatatttatggccatgtaactttaatgagagcccagaggaactatatggttcaaacagaagaccaatacatctttatccatgatgcactgttagaagcagtgacttgtggaaataccgaagtgccagctagaaacttgtatgcctacattcagaagctgacacaaatagaaacgggagagaatgtcacaggaatggagctcgaatttaagcgtctagccagctcaaaagctcacacctcaaggtttatcagtgccaatcttccatgtaataaattcaaaaatcgccttgttaatattatgccatatgaatccacaagggtatgcctgcagcctatccgtggagtagaaggatctgattacatcaatgccagttttattgatggatacagacaacagaaagcctacatcgctacccaggggcccttggcagagaccactgaagacttctggcggatgctctgggaacacaattccaccatagttgtgatgctcaccaagctgcgtgaaatgggcagagagaaatgtcaccaatactggccagcagaacggtctgcaagataccagtactttgttgtagatcccatggctgagtacaacatgccacagtatatcctaagggaattcaaggtcacagatgccagggacggccagtcccgaacagtaaggcagttccagttcactgactggccagagcaaggagtgccaaagtccggagaaggatttattgacttcatcggccaagtccataaaacaaaagaacagtttggccaagatggacccatttcagtccattgcagcgcgggcgttggaagaactggagtcttcataacgctaagcattgttttggaaagaatgagatatgaaggagttgtagatatcttccagactgtcaaaatgttaagaacacaacgaccagctatggtacagacagaggatcaatatcagttttcctatcgtgccgcactagagtacctgggcagctttgaccactatgcaacgtagaaacccctgacccattctggatttttactacaggcccttcaatatccatggagtctcttctgagccatacagggcacttgagaagtccttcttaacttctagctaacaactacttagtgggactattacacacaaaacaaattaaaaacaaattattccaggtggaccaagaattctttgacatcgccccttcccaccatactgctcataataacattttagggggaaaggggagggaatgtttaaaaagaaagtccttgatttagttttttagtattgtaaagatactgctgacctgtgcttcatttctaactgtgtaaacttttttttaacaaaatgtatcattcgataaagtgaattttaaaaaagttacataactcttcatttttttatttccaaatcgtaggtttttttaagctgtagaactgttatctgtaatatcttgctgtagaaatatcaaatcatttgaaaatttgcacatttttgtgcaaaactcaatctacagtatcagtctcgtcagatatattaattttacacttcagttttgattggtgagaaagtacccattctcttcaaataatcaaagataattattattttgttttgtttttggaatcaacagggaggcgcaaagtataaagttgctgctaacatatatacatatatatccatattttataagggtgtctatgtatatatagacagtgtgtccacacaaaaaatagatacagttatcagtcagtcagttcttccatgatttagtttttttaaacgtagaaaagctattgtaaacatctctttccatttattcttaattttttgacatattggtatttctttaaagggaaatgaggaatgcacatcagtgattgattgtcaaacctcaccccctgatttcctacctaatctacccccacctaaccaatcaatcacatccacaaattgttttgtttgtttgttagtcaggcttccaacaaagttcaatatttctaacactctagtgcaataaaaattattattaaatagctaagaggtgtgcatgtgggaaaggtcagtgcatatccctttaggaggggagaatgttgtaatatatcagctatcgagttgtttaaaaaaagtgtattcaatcgtatattgtctatagtatgtgctatgaaatttgcatttatgatatgtaacaggggcaaagccaaattcatgttactctgttcagtcagaaacattttgtggcatacagcattcctgggaagtgctgtactttgtttcgttttggttttagttttgcatttagagtgccttataattgatgcctattttaatagcatttctttttagcttttggttcgtatttccattcactgttcgtatctgttactttctattaaagcattatctgtttaccacatgtacaaaaactctttgaataatatgcattcctagttttcagccaagtcggggatgttagtgattgtaccagcccaaagcacttggataatcagggcccttcttccttttataatcaatcatcaacatcagaaaaagctacttgttttatttatattcccttccaaatccgctctggaacatgcagtaactgcaccaaacttattttagtaacaaatatcattggcaactttggaatatatttgatattccattaggatttttctaaaaggggaaataaactatatatatatatgtatcttacccccaattcttccaacagaatttctataggaagccatggatgatggcataagtttgccacatattacatgattttaaataatcctcaaaatacccaaggaactcttaaagagttttggtatgagtatactactttggtttaattttagcttcatggatgttctgcatggaaggatttttgttttccacattttcccattgctagcagagtgaaatccaagagaccaaacatttgcaagcattgtatttgagcacttttgtaaaaaacaaagaaaaagaaaaaaaagaaaatatatataatactaaaaaaaagtatctagaaggctacctcagaatgagactctctaacctacatcagaaccagagaagaatgtgcactatgtgggtctgttatcattattttcttttagtttgtatctttttggagatttatccaagtgccagattactcagtgctataattttcttttagttaaacaaagggggtcagacagacattgcatcatccagacatgccttgttggacatgtagaatccgatggagcactgcacaccagaatgattggccaatgagcagcttctctccctgaaacaataactgcccatttggcaaagggaaagatgacaataatcagaagaagaaaatgaatgggatgcataccatagacgaacgaggcggagactattgcgggaatcttactgttcaggagctgttcctagaactaactcccttactgtcattgatgtgcattccactctgtgcttttctgtacaaccattcaagttttaatttcccaggtgaaccatctttatctgccattaccacaagctttcaagtttccagttattttcatcatcataaccagtacggtgctattatttacctatgtacgtgtagttatgtataattttgtaattagttacaatggtaaaaaaaatcaaaatatataaaaagtgatttgtacagaactttattttagctcttttttaaaaatgatttgcatggttagaaaacggcgaggacagccaggggagggaagggcctctagggaactttgcactttctatacctttgtactatgcactgccctattgattctacacccaataatgatattacttgaacccatctgtaagaaactgcttcggaaattcatttgtgtgtatgtaaataacacaacatagaaacaggaagggaaaaaagtctgcagtaatgcacgtattttttttctttcctgtttattttcggttttgctttaagtccttttatttttaattccctttttgtttttctttttgggttttggttccttttgggtttatgggtgccctgatactccagcagagatcagaaggctacagatccattctatccatccgttatgtggctttgccatcccagcttggagtgtctttacaaagataataacagttgtgttctttgctctcgttttggatgcatagactgaaaaattaaaacaaataacttgtaaaatggcttgttaaaaaatacaattacctctaattagtagtacgcgtaaatgttttacagaatgaaaggcgtgctttttattttcttacttcgttacattggtggcgaaagaagtctgtatgaaaatcagttctttgctgacacaagttccatttgttacaaatgaattctaataaaaatgtcagtgttatgcaaaaaaag

SEQ ID NO: 315808 - DNA, 9591 bp, Homo sapiens
cggcggccgctgctccgcgggattaaattggccgcccggaggcggcggcgcggccgtggcggggcgcgaaggcgctggaggaaagtgttggcggcggcgcgggaggcggtggcggcggctgcccggggccaacatgaccaggctctgaaagtgttccagctgaaatttcagatcggacagactcgctgcggctccggaggcagtgattccaagctgctcgcgcacgctgctgccaagctgcaggatggtgcacgtagccaggctgctgctgctgctcctcactttcttcctccgcacggatgctgagacacctccaaggtttacacgaacacccgttgatcagacaggggtctctggcggagttgcctctttcatctgccaagctacgggagacccaagacctaaaattgtctggaacaaaaaaggaaagaaagtcagcaatcagagatttgaggtaatagagtttgacgatgggtctggatcagttctcagaatacaacccttacggactccgagggatgaggccatttatgaatgtgtggcctcaaataatgtgggagaaataagtgtatccaccagactcacagttttgcgggaagatcaaattcccaggggcttccctaccattgacatgggcccacagttgaaggtggttgagcgtactcgcacggccaccatgctttgtgcagccagtggtaatccggatccagaaatcacttggtttaaagatttcttacctgtggacacaagcaacaacaatggtcgtattaagcagttacgatcaggagcccttcagattgagcagagtgaagagtctgaccaaggaaaatatgagtgtgttgccaccaacagcgcgggcactcgctattccgctcctgccaatttatatgtcagagagctgcgagaagttcgccgtgtcccaccaagattctctatcccacccactaatcatgaaatcatgccaggcggaagcgttaatatcacctgtgtggccgtggggtcaccaatgccttatgtaaagtggatgttgggggcagaagatctgacacctgaagatgatatgccaataggaagaaatgtgctagaactgaatgatgtaagacagtcagcaaattacacctgtgttgctatgtcaacactgggtgtcattgaagcaatagcacagatcactgtcaaagccttacccaaacctccaggaactcctgtagtgaccgagagcacagctacaagcatcacactgacgtgggactctgggaaccctgagcctgtttcttattacataattcagcataaacctaaaaactctgaggaactttacaaagaaattgatggggtggcgaccacacgctacagtgtcgctggactaagtccctactcggattatgaattcagggttgttgctgtcaataacattgggcgggggcctcccagcgaacctgtgctaacacaaacctcagagcaagcaccatccagtgccccgagggatgtccaggcacgaatgttgagttcgaccaccattttggtacagtggaaggaacctgaagagccaaatggacagatccaaggatatagagtttattatacaatggatcccactcaacatgtcaacaactggatgaaacacaatgtagctgacagccaaatcactactattggcaacttagtgccccagaaaacatattctgtcaaagtcctggcttttacctcaattggagatggtcccctttcaagtgacatacaagtcatcactcagacaggagtaccagggcagccactaaacttcaaagcagaacctgagtctgaaacaagtattttgctctcttggacacctccacgttcagataccattgccaactatgaactggtctacaaagatggggagcatggagaggagcaacgaattaccattgagccagggacatcatataggctgcaaggactgaaaccaaacagcttatactatttccgtctggctgcacgctcccctcaaggcctgggtgcttctactgcagaaatatcagctagaaccatgcagtcaaagccgtcagctcctcctcaagacattagttgcaccagcccaagttccactagtattttggtaagttggcaacctccaccagtggaaaaacagaatggcattatcactgaatactccatcaagtacactgcagtggatggggaagatgacaagcctcacgagattttgggaattccttcggacactaccaaataccttttggaacagctggaaaaatggactgaataccggatcactgtgacagcccatacagatgtcggccctggccctgagagcttgtccgtgttgattcgaaccaatgaagatgttcctagtggtcctcctcgcaaagtcgaggtagaggctgtcaactcaacatctgttaaagtctcatggcgctcacccgtgcccaataaacagcatggccagataagaggatatcaggtgcattatgtgaggatggaaaatggtgagcccaagggccagcccatgctgaaagatgtcatgctggctgatgcacagtgggaatttgatgatactactgaacatgacatgatcatttctgggctccagcctgaaacttcctactccctcaccgtcacagcctacacaaccaaaggagatggtgctcgcagcaagcccaaactggtgtccaccactggggcagttccagggaaacctcggcttgtgattaaccacactcagatgaatactgctcttattcagtggcaccctccggtggacacatttggacctcttcagggctaccgtctaaaatttggccgcaaggatatggagccacttactactcttgagttctctgaaaaagaagatcactttacagctacagacatccacaagggagcatcatacgtcttcaggctctcagccagaaacaaagtgggctttggggaggagatggtgaaggagatttccattccagaagaagtaccaactggattccctcaaaaccttcactcagaaggcaccacttcaacctccgtccagttatcttggcaaccacctgtcctggcagagagaaatggcattatcaccaagtatacccttctttatagggatatcaacatcccccttctcccgatggagcagcttattgttccagctgacaccactatgacactcactggcttaaaaccagataccacatacgatgtaaaagtacgtgctcatacgagcaaagggcccgggccatatagtcccagtgtccagttcaggacactgcctgtggatcaagtgtttgcaaaaaattttcatgtcaaagcagtaatgaagacttccgtgttgctgtcttgggagattccagagaattataactccgccatgcctttcaaaattctttatgatgatgggaaaatggtagaagaagtggatggccgagccacacagaagttaattgtcaacctgaagcctgagaaatcatattcatttgtgctgacaaatcgtggaaacagtgctggtgggctgcagcacagggtcacggcaaagactgcaccagatgtattacgtaccaagcctgccttcattgggaagaccaacttggatggcatgattactgtgcaactgcctgaagtacctgcaaatgagaatataaaaggttactacataataattgtgcctttgaagaaatctcgcgggaaatttatcaagccatgggagagtccagatgaaatggaattagatgagctgcttaaggagatatctaggaagcgcagaagcatccgttatgggagagaagttgaattaaagccatatattgccgctcactttgatgtccttcccactgagttcaccctgggggatgacaagcattatggtggatttacaaacaagcaactccaaagtggtcaagaatatgtcttctttgtgttagcagtaatggaacatgcagagtctaagatgtatgcaaccagcccttactccgaccccgtggtgtcaatggatctggatccgcagccaatcacggatgaagaagaaggcttgatctgggttgtaggtcctgtccttgcagtggtctttatcatctgcattgtcattgctattcttctttataaaaggaagagggcagagtccgactctagaaaaagcagcataccgaacaataaggagatcccttcacaccacccaacagaccctgtagaactgaggcgccttaactttcaaacaccgggtatggctagccatcctccaatacccatcttggaacttgcagaccacattgaaagattgaaagcaaatgacaacttgaagttttcccaggaatatgagtcaattgaccctggccagcagttcacttgggaacattcaaacttggaagtaaacaaaccaaagaatagatacgcgaatgtaatcgcatatgatcattcccgggttctcctatcagctatagaagggatcccaggaagtgactatgtgaatgccaactacatagatgggtataggaagcaaaatgcctatattgcaacacagggatctctccccgaaacatttggggacttttggagaatgatatgggaacaacggagtgccacagttgtcatgatgacaaaactagaagaaagatcaagggtgaagtgtgaccagtattggcctagcagaggcacagaaacccacggactcgttcaagtaacgctgcttgatactgtggagctggccacatattgtgttcgaacatttgcactttacaagaatggttcaagtgagaagagagaagtgagacaattccagttcaccgcctggcctgatcatggtgttccagaacaccctacaccttttctagctttcttacgtagagtcaaaacctgtaaccctcccgatgctggtccgatggttgtgcactgcagtgcgggagttggccggactggttgcttcatcgtcatagatgccatgttagaaagaataaagcatgaaaaaactgtagatatttatggccatgtaactttaatgagagcccagaggaactatatggttcaaacagaagaccaatacatctttatccatgatgcactgttagaagcagtgacttgtggaaataccgaagtgccagctagaaacttgtatgcctacattcagaagctgacacaaatagaaacgggagagaatgtcacaggaatggagctcgaatttaagcgtctagccagctcaaaagctcacacctcaaggtttatcagtgccaatcttccatgtaataaattcaaaaatcgccttgttaatattatgccatatgaatccacaagggtatgcctgcagcctatccgtggagtagaaggatctgattacatcaatgccagttttattgatggatacagacaacagaaagcctacatcgctacccaggggcccttggcagagaccactgaagacttctggcggatgctctgggaacacaattccaccatagttgtgatgctcaccaagctgcgtgaaatgggcagagagaaatgtcaccaatactggccagcagaacggtctgcaagataccagtactttgttgtagatcccatggctgagtacaacatgccacagtatatcctaagggaattcaaggtcacagatgccagggacggccagtcccgaacagtaaggcagttccagttcactgactggccagagcaaggagtgccaaagtccggagaaggatttattgacttcatcggccaagtccataaaacaaaagaacagtttggccaagatggacccatttcagtccattgcagcgcgggcgttggaagaactggagtcttcataacgctaagcattgttttggaaagaatgagatatgaaggagttgtagatatcttccagactgtcaaaatgttaagaacacaacgaccagctatggtacagacagaggatcaatatcagttttcctatcgtgccgcactagagtacctgggcagctttgaccactatgcaacgtagaaacccctgacccattctggatttttactacaggcccttcaatatccatggagtctcttctgagccatacagggcacttgagaagtccttcttaacttctagctaacaactacttagtgggactattacacacaaaacaaattaaaaacaaattattccaggtggaccaagaattcacagtttaataatctaacctgaaaaataatgaagagaatcctgactgatgaggcatctgaaggattttatttacagatacctcaaggattcaaaatcaagggaagaagaaatcacagcaaagaaccaccatcttattcaggattgcttgaaaggtgcaaggagaaattgccagaatgctgcagttcagcacaagatatgtgctggtgtggcttctcacaatgaaacggactctgctttgacatcgccccttcccaccatactgctcataataacattttagggggaaaggggagggaatgtttaaaaagaaagtccttgatttagttttttagtattgtaaagatactgctgacctgtgcttcatttctaactgtgtaaacttttttttaacaaaatgtatcattcgataaagtgaattttaaaaaagttacataactcttcatttttttatttccaaatcgtaggtttttttaagctgtagaactgttatctgtaatatcttgctgtagaaatatcaaatcatttgaaaatttgcacatttttgtgcaaaactcaatctacagtatcagtctcgtcagatatattaattttacacttcagttttgattggtgagaaagtacccattctcttcaaataatcaaagataattattattttgttttgtttttggaatcaacagggaggcgcaaagtataaagttgctgctaacatatatacatatatatccatattttataagggtgtctatgtatatatagacagtgtgtccacacaaaaaatagatacagttatcagtcagtcagttcttccatgatttagtttttttaaacgtagaaaagctattgtaaacatctctttccatttattcttaattttttgacatattggtatttctttaaagggaaatgaggaatgcacatcagtgattgattgtcaaacctcaccccctgatttcctacctaatctacccccacctaaccaatcaatcacatccacaaattgttttgtttgtttgttagtcaggcttccaacaaagttcaatatttctaacactctagtgcaataaaaattattattaaatagctaagaggtgtgcatgtgggaaaggtcagtgcatatccctttaggaggggagaatgttgtaatatatcagctatcgagttgtttaaaaaaagtgtattcaatcgtatattgtctatagtatgtgctatgaaatttgcatttatgatatgtaacaggggcaaagccaaattcatgttactctgttcagtcagaaacattttgtggcatacagcattcctgggaagtgctgtactttgtttcgttttggttttagttttgcatttagagtgccttataattgatgcctattttaatagcatttctttttagcttttggttcgtatttccattcactgttcgtatctgttactttctattaaagcattatctgtttaccacatgtacaaaaactctttgaataatatgcattcctagttttcagccaagtcggggatgttagtgattgtaccagcccaaagcacttggataatcagggcccttcttccttttataatcaatcatcaacatcagaaaaagctacttgttttatttatattcccttccaaatccgctctggaacatgcagtaactgcaccaaacttattttagtaacaaatatcattggcaactttggaatatatttgatattccattaggatttttctaaaaggggaaataaactatatatatatatgtatcttacccccaattcttccaacagaatttctataggaagccatggatgatggcataagtttgccacatattacatgattttaaataatcctcaaaatacccaaggaactcttaaagagttttggtatgagtatactactttggtttaattttagcttcatggatgttctgcatggaaggatttttgttttccacattttcccattgctagcagagtgaaatccaagagaccaaacatttgcaagcattgtatttgagcacttttgtaaaaaacaaagaaaaagaaaaaaaagaaaatatatataatactaaaaaaaagtatctagaaggctacctcagaatgagactctctaacctacatcagaaccagagaagaatgtgcactatgtgggtctgttatcattattttcttttagtttgtatctttttggagatttatccaagtgccagattactcagtgctataattttcttttagttaaacaaagggggtcagacagacattgcatcatccagacatgccttgttggacatgtagaatccgatggagcactgcacaccagaatgattggccaatgagcagcttctctccctgaaacaataactgcccatttggcaaagggaaagatgacaataatcagaagaagaaaatgaatgggatgcataccatagacgaacgaggcggagactattgcgggaatcttactgttcaggagctgttcctagaactaactcccttactgtcattgatgtgcattccactctgtgcttttctgtacaaccattcaagttttaatttcccaggtgaaccatctttatctgccattaccacaagctttcaagtttccagttattttcatcatcataaccagtacggtgctattatttacctatgtacgtgtagttatgtataattttgtaattagttacaatggtaaaaaaaatcaaaatatataaaaagtgatttgtacagaactttattttagctcttttttaaaaatgatttgcatggttagaaaacggcgaggacagccaggggagggaagggcctctagggaactttgcactttctatacctttgtactatgcactgccctattgattctacacccaataatgatattacttgaacccatctgtaagaaactgcttcggaaattcatttgtgtgtatgtaaataacacaacatagaaacaggaagggaaaaaagtctgcagtaatgcacgtattttttttctttcctgtttattttcggttttgctttaagtccttttatttttaattccctttttgtttttctttttgggttttggttccttttgggtttatgggtgccctgatactccagcagagatcagaaggctacagatccattctatccatccgttatgtggctttgccatcccagcttggagtgtctttacaaagataataacagttgtgttctttgctctcgttttggatgcatagactgaaaaattaaaacaaataacttgtaaaatggcttgttaaaaaatacaattacctctaattagtagtacgcgtaaatgttttacagaatgaaaggcgtgctttttattttcttacttcgttacattggtggcgaaagaagtctgtatgaaaatcagttctttgctgacacaagttccatttgttacaaatgaattctaataaaaatgtcagtgttatgcaaaaaaag

SEQ ID NO: 315809 - DNA, 7606 bp, Homo sapiens
ttattgttcgtttatttatttttgccttttcttttgttttatcattttttttttcaaccactcctgtcctttcacttaaatcctcctttaactcactaccaaaataagagccgtcagctcctcctcaagacattagttgcaccagcccaagttccactagtattttggtaagttggcaacctccaccagtggaaaaacagaatggcattatcactgaatactccatcaagtacactgcagtggatggggaagatgacaagcctcacgagattttgggaattccttcggacactaccaaataccttttggaacagctggaaaaatggactgaataccggatcactgtgacagcccatacagatgtcggccctggccctgagagcttgtccgtgttgattcgaaccaatgaagatgttcctagtggtcctcctcgcaaagtcgaggtagaggctgtcaactcaacatctgttaaagtctcatggcgctcacccgtgcccaataaacagcatggccagataagaggatatcaggtgcattatgtgaggatggaaaatggtgagcccaagggccagcccatgctgaaagatgtcatgctggctgatgcacagtgggaatttgatgatactactgaacatgacatgatcatttctgggctccagcctgaaacttcctactccctcaccgtcacagcctacacaaccaaaggagatggtgctcgcagcaagcccaaactggtgtccaccactggggcagttccagggaaacctcggcttgtgattaaccacactcagatgaatactgctcttattcagtggcaccctccggtggacacatttggacctcttcagggctaccgtctaaaatttggccgcaaggatatggagccacttactactcttgagttctctgaaaaagaagatcactttacagctacagacatccacaagggagcatcatacgtcttcaggctctcagccagaaacaaagtgggctttggggaggagatggtgaaggagatttccattccagaagaagtaccaactggattccctcaaaaccttcactcagaaggcaccacttcaacctccgtccagttatcttggcaaccacctgtcctggcagagagaaatggcattatcaccaagtatacccttctttatagggatatcaacatcccccttctcccgatggagcagcttattgttccagctgacaccactatgacactcactggcttaaaaccagataccacatacgatgtaaaagtacgtgctcatacgagcaaagggcccgggccatatagtcccagtgtccagttcaggacactgcctgtggatcaagtgtttgcaaaaaattttcatgtcaaagcagtaatgaagacttccgtgttgctgtcttgggagattccagagaattataactccgccatgcctttcaaaattctttatgatgatgggaaaatggtagaagaagtggatggccgagccacacagaagttaattgtcaacctgaagcctgagaaatcatattcatttgtgctgacaaatcgtggaaacagtgctggtgggctgcagcacagggtcacggcaaagactgcaccagatgtattacgtaccaagcctgccttcattgggaagaccaacttggatggcatgattactgtgcaactgcctgaagtacctgcaaatgagaatataaaaggttactacataataattgtgcctttgaagaaatctcgcgggaaatttatcaagccatgggagagtccagatgaaatggaattagatgagctgcttaaggagatatctaggaagcgcagaagcatccgttatgggagagaagttgaattaaagccatatattgccgctcactttgatgtccttcccactgagttcaccctgggggatgacaagcattatggtggatttacaaacaagcaactccaaagtggtcaagaatatgtcttctttgtgttagcagtaatggaacatgcagagtctaagatgtatgcaaccagcccttactccgaccccgtggtgtcaatggatctggatccgcagccaatcacggatgaagaagaaggcttgatctgggttgtaggtcctgtccttgcagtggtctttatcatctgcattgtcattgctattcttctttataaaaggaagagggcagagtccgactctagaaaaagcagcataccgaacaataaggagatcccttcacaccacccaacagaccctgtagaactgaggcgccttaactttcaaacaccgggtatggctagccatcctccaatacccatcttggaacttgcagaccacattgaaagattgaaagcaaatgacaacttgaagttttcccaggaatatgagtcaattgaccctggccagcagttcacttgggaacattcaaacttggaagtaaacaaaccaaagaatagatacgcgaatgtaatcgcatatgatcattcccgggttctcctatcagctatagaagggatcccaggaagtgactatgtgaatgccaactacatagatgggtataggaagcaaaatgcctatattgcaacacagggatctctccccgaaacatttggggacttttggagaatgatatgggaacaacggagtgccacagttgtcatgatgacaaaactagaagaaagatcaagggtgaagtgtgaccagtattggcctagcagaggcacagaaacccacggactcgttcaagtaacgctgcttgatactgtggagctggccacatattgtgttcgaacatttgcactttacaagaatggttcaagtgagaagagagaagtgagacaattccagttcaccgcctggcctgatcatggtgttccagaacaccctacaccttttctagctttcttacgtagagtcaaaacctgtaaccctcccgatgctggtccgatggttgtgcactgcagtgcgggagttggccggactggttgcttcatcgtcatagatgccatgttagaaagaataaagcatgaaaaaactgtagatatttatggccatgtaactttaatgagagcccagaggaactatatggttcaaacagaagaccaatacatctttatccatgatgcactgttagaagcagtgacttgtggaaataccgaagtgccagctagaaacttgtatgcctacattcagaagctgacacaaatagaaacgggagagaatgtcacaggaatggagctcgaatttaagcgtctagccagctcaaaagctcacacctcaaggtttatcagtgccaatcttccatgtaataaattcactatccgtggagtagaaggatctgattacatcaatgccagttttattgatggatacagacaacagaaagcctacatcgctacccaggggcccttggcagagaccactgaagacttctggcggatgctctgggaacacaattccaccatagttgtgatgctcaccaagctgcgtgaaatgggcagagagaaatgtcaccaatactggccagcagaacggtctgcaagataccagtactttgttgtagatcccatggctgagtacaacatgccacagtatatcctaagggaattcaaggtcacagatgccagggacggccagtcccgaacagtaaggcagttccagttcactgactggccagagcaaggagtgccaaagtccggagaaggatttattgacttcatcggccaagtccataaaacaaaagaacagtttggccaagatggacccatttcagtccattgcagcgcgggcgttggaagaactggagtcttcataacgctaagcattgttttggaaagaatgagatatgaaggagttgtagatatcttccagactgtcaaaatgttaagaacacaacgaccagctatggtacagacagaggatcaatatcagttttcctatcgtgccgcactagagtacctgggcagctttgaccactatgcaacgtagaaacccctgacccattctggatttttactacaggcccttcaatatccatggagtctcttctgagccatacagggcacttgagaagtccttcttaacttctagctaacaactacttagtgggactattacacacaaaacaaattaaaaacaaattattccaggtggaccaagaattcacagtttaataatctaacctgaaaaataatgaagagaatcctgactgatgaggcatctgaaggattttatttacagatacctcaaggattcaaaatcaagggaagaagaaatcacagcaaagaaccaccatcttattcaggattgcttgaaaggtgcaaggagaaattgccagaatgctgcagttcagcacaagatatgtgctggtgtggcttctcacaatgaaacggactctgctttgacatcgccccttcccaccatactgctcataataacattttagggggaaaggggagggaatgtttaaaaagaaagtccttgatttagttttttagtattgtaaagatactgctgacctgtgcttcatttctaactgtgtaaacttttttttaacaaaatgtatcattcgataaagtgaattttaaaaaagttacataactcttcatttttttatttccaaatcgtaggtttttttaagctgtagaactgttatctgtaatatcttgctgtagaaatatcaaatcatttgaaaatttgcacatttttgtgcaaaactcaatctacagtatcagtctcgtcagatatattaattttacacttcagttttgattggtgagaaagtacccattctcttcaaataatcaaagataattattattttgttttgtttttggaatcaacagggaggcgcaaagtataaagttgctgctaacatatatacatatatatccatattttataagggtgtctatgtatatatagacagtgtgtccacacaaaaaatagatacagttatcagtcagtcagttcttccatgatttagtttttttaaacgtagaaaagctattgtaaacatctctttccatttattcttaattttttgacatattggtatttctttaaagggaaatgaggaatgcacatcagtgattgattgtcaaacctcaccccctgatttcctacctaatctacccccacctaaccaatcaatcacatccacaaattgttttgtttgtttgttagtcaggcttccaacaaagttcaatatttctaacactctagtgcaataaaaattattattaaatagctaagaggtgtgcatgtgggaaaggtcagtgcatatccctttaggaggggagaatgttgtaatatatcagctatcgagttgtttaaaaaaagtgtattcaatcgtatattgtctatagtatgtgctatgaaatttgcatttatgatatgtaacaggggcaaagccaaattcatgttactctgttcagtcagaaacattttgtggcatacagcattcctgggaagtgctgtactttgtttcgttttggttttagttttgcatttagagtgccttataattgatgcctattttaatagcatttctttttagcttttggttcgtatttccattcactgttcgtatctgttactttctattaaagcattatctgtttaccacatgtacaaaaactctttgaataatatgcattcctagttttcagccaagtcggggatgttagtgattgtaccagcccaaagcacttggataatcagggcccttcttccttttataatcaatcatcaacatcagaaaaagctacttgttttatttatattcccttccaaatccgctctggaacatgcagtaactgcaccaaacttattttagtaacaaatatcattggcaactttggaatatatttgatattccattaggatttttctaaaaggggaaataaactatatatatatatgtatcttacccccaattcttccaacagaatttctataggaagccatggatgatggcataagtttgccacatattacatgattttaaataatcctcaaaatacccaaggaactcttaaagagttttggtatgagtatactactttggtttaattttagcttcatggatgttctgcatggaaggatttttgttttccacattttcccattgctagcagagtgaaatccaagagaccaaacatttgcaagcattgtatttgagcacttttgtaaaaaacaaagaaaaagaaaaaaaagaaaatatatataatactaaaaaaaagtatctagaaggctacctcagaatgagactctctaacctacatcagaaccagagaagaatgtgcactatgtgggtctgttatcattattttcttttagtttgtatctttttggagatttatccaagtgccagattactcagtgctataattttcttttagttaaacaaagggggtcagacagacattgcatcatccagacatgccttgttggacatgtagaatccgatggagcactgcacaccagaatgattggccaatgagcagcttctctccctgaaacaataactgcccatttggcaaagggaaagatgacaataatcagaagaagaaaatgaatgggatgcataccatagacgaacgaggcggagactattgcgggaatcttactgttcaggagctgttcctagaactaactcccttactgtcattgatgtgcattccactctgtgcttttctgtacaaccattcaagttttaatttcccaggtgaaccatctttatctgccattaccacaagctttcaagtttccagttattttcatcatcataaccagtacggtgctattatttacctatgtacgtgtagttatgtataattttgtaattagttacaatggtaaaaaaaatcaaaatatataaaaagtgatttgtacagaactttattttagctcttttttaaaaatgatttgcatggttagaaaacggcgaggacagccaggggagggaagggcctctagggaactttgcactttctatacctttgtactatgcactgccctattgattctacacccaataatgatattacttgaacccatctgtaagaaactgcttcggaaattcatttgtgtgtatgtaaataacacaacatagaaacaggaagggaaaaaagtctgcagtaatgcacgtattttttttctttcctgtttattttcggttttgctttaagtccttttatttttaattccctttttgtttttctttttgggttttggttccttttgggtttatgggtgccctgatactccagcagagatcagaaggctacagatccattctatccatccgttatgtggctttgccatcccagcttggagtgtctttacaaagataataacagttgtgttctttgctctcgttttggatgcatagactgaaaaattaaaacaaataacttgtaaaatggcttgttaaaaaatacaattacctctaattagtagtacgcgtaaatgttttacagaatgaaaggcgtgctttttattttcttacttcgttacattggtggcgaaagaagtctgtatgaaaatcagttctttgctgacacaagttccatttgttacaaatgaattctaataaaaatgtcagtgttatgcaaaaaaag

SEQ ID NO: 315810 - DNA, 5775 bp, Homo sapiens
ctggagcgactgaagaagattcgggcccatagagggctgcgtcacttctggggccttcgtgtcttcctcgtgccgaattcggcattatggtggatttacaaacaagcaactccaaagtggtcaagaatatgtcttctttgtgttagcagtaatggaacatgcagagtctaagatgtatgcaaccagcccttactccgaccccgtggtgtcaatggatctggatccgcagccaatcacggatgaagaagaaggcttgatctgggttgtaggtcctgtccttgcagtggtctttatcatctgcattgtcattgctattcttctttataaaagtaaacccgacaggaagagggcagagtccgactctagagtagaactgaggcgccttaactttcaaacaccgggttcagatgattccggttaccctggtaaccttcattcttcaagtatggctagccatcctccaatacccatcttggaacttgcagaccacattgaaagattgaaagcaaatgacaacttgaagttttcccaggaatatgagtcaattgaccctggccagcagttcacttgggaacattcaaacttggaagtaaacaaaccaaagaatagatacgcgaatgtaatcgcatatgatcattcccgggttctcctatcagctatagaagggatcccaggaagtgactatgtgaatgccaactacatagatgggtataggaagcaaaatgcctatattgcaacacagggatctctccccgaaacatttggggacttttggagaatgatatgggaacaacggagtgccacagttgtcatgatgacaaaactagaagaaagatcaagggtgaagtgtgaccagtattggcctagcagaggcacagaaacccacggactcgttcaagtaacgctgcttgatactgtggagctggccacatattgtgttcgaacatttgcactttacaagaatggttcaagtgagaagagagaagtgagacaattccagttcaccgcctggcctgatcatggtgttccagaacaccctacaccttttctagctttcttacgtagagtcaaaacctgtaaccctcccgatgctggtccgatggttgtgcactgcagtgcgggagttggccggactggttgcttcatcgtcatagatgccatgttagaaagaataaagcatgaaaaaactgtagatatttatggccatgtaactttaatgagagcccagaggaactatatggttcaaacagaagaccaatacatctttatccatgatgcactgttagaagcagtgacttgtggaaataccgaagtgccagctagaaacttgtatgcctacattcagaagctgacacaaatagaaacgggagagaatgtcacaggaatggagctcgaatttaagcgtctagccagctcaaaagctcacacctcaaggtttatcagtgccaatcttccatgtaataaattcactatccgtggagtagaaggatctgattacatcaatgccagttttattgatggatacagacaacagaaagcctacatcgctacccaggggcccttggcagagaccactgaagacttctggcggatgctctgggaacacaattccaccatagttgtgatgctcaccaagctgcgtgaaatgggcagagagaaatgtcaccaatactggccagcagaacggtctgcaagataccagtactttgttgtagatcccatggctgagtacaacatgccacagtatatcctaagggaattcaaggtcacagatgccagggacggccagtcccgaacagtaaggcagttccagttcactgactggccagagcaaggagtgccaaagtccggagaaggatttattgacttcatcggccaagtccataaaacaaaagaacagtttggccaagatggacccatttcagtccattgcagcgcgggcgttggaagaactggagtcttcataacgctaagcattgttttggaaagaatgagatatgaaggagttgtagatatcttccagactgtcaaaatgttaagaacacaacgaccagctatggtacagacagaggatcaatatcagttttcctatcgtgccgcactagagtacctgggcagctttgaccactatgcaacgtagaaacccctgacccattctggatttttactacaggcccttcaatatccatggagtctcttctgagccatacagggcacttgagaagtccttcttaacttctagctaacaactacttagtgggactattacacacaaaacaaattaaaaacaaattattccaggtggaccaagaattcacagtttaataatctaacctgaaaaataatgaagagaatcctgactgatgaggcatctgaaggattttatttacagatacctcaaggattcaaaatcaagggaagaagaaatcacagcaaagaaccaccatcttattcaggattgcttgaaaggtgcaaggagaaattgccagaatgctgcagttcagcacaagatatgtgctggtgtggcttctcacaatgaaacggactctgctttgacatcgccccttcccaccatactgctcataataacattttagggggaaaggggagggaatgtttaaaaagaaagtccttgatttagttttttagtattgtaaagatactgctgacctgtgcttcatttctaactgtgtaaacttttttttaacaaaatgtatcattcgataaagtgaattttaaaaaagttacataactcttcatttttttatttccaaatcgtaggtttttttaagctgtagaactgttatctgtaatatcttgctgtagaaatatcaaatcatttgaaaatttgcacatttttgtgcaaaactcaatctacagtatcagtctcgtcagatatattaattttacacttcagttttgattggtgagaaagtacccattctcttcaaataatcaaagataattattattttgttttgtttttggaatcaacagggaggcgcaaagtataaagttgctgctaacatatatacatatatatccatattttataagggtgtctatgtatatatagacagtgtgtccacacaaaaaatagatacagttatcagtcagtcagttcttccatgatttagtttttttaaacgtagaaaagctattgtaaacatctctttccatttattcttaattttttgacatattggtatttctttaaagggaaatgaggaatgcacatcagtgattgattgtcaaacctcaccccctgatttcctacctaatctacccccacctaaccaatcaatcacatccacaaattgttttgtttgtttgttagtcaggcttccaacaaagttcaatatttctaacactctagtgcaataaaaattattattaaatagctaagaggtgtgcatgtgggaaaggtcagtgcatatccctttaggaggggagaatgttgtaatatatcagctatcgagttgtttaaaaaaagtgtattcaatcgtatattgtctatagtatgtgctatgaaatttgcatttatgatatgtaacaggggcaaagccaaattcatgttactctgttcagtcagaaacattttgtggcatacagcattcctgggaagtgctgtactttgtttcgttttggttttagttttgcatttagagtgccttataattgatgcctattttaatagcatttctttttagcttttggttcgtatttccattcactgttcgtatctgttactttctattaaagcattatctgtttaccacatgtacaaaaactctttgaataatatgcattcctagttttcagccaagtcggggatgttagtgattgtaccagcccaaagcacttggataatcagggcccttcttccttttataatcaatcatcaacatcagaaaaagctacttgttttatttatattcccttccaaatccgctctggaacatgcagtaactgcaccaaacttattttagtaacaaatatcattggcaactttggaatatatttgatattccattaggatttttctaaaaggggaaataaactatatatatatatgtatcttacccccaattcttccaacagaatttctataggaagccatggatgatggcataagtttgccacatattacatgattttaaataatcctcaaaatacccaaggaactcttaaagagttttggtatgagtatactactttggtttaattttagcttcatggatgttctgcatggaaggatttttgttttccacattttcccattgctagcagagtgaaatccaagagaccaaacatttgcaagcattgtatttgagcacttttgtaaaaaacaaagaaaaagaaaaaaaagaaaatatatataatactaaaaaaaagtatctagaaggctacctcagaatgagactctctaacctacatcagaaccagagaagaatgtgcactatgtgggtctgttatcattattttcttttagtttgtatctttttggagatttatccaagtgccagattactcagtgctataattttcttttagttaaacaaagggggtcagacagacattgcatcatccagacatgccttgttggacatgtagaatccgatggagcactgcacaccagaatgattggccaatgagcagcttctctccctgaaacaataactgcccatttggcaaagggaaagatgacaataatcagaagaagaaaatgaatgggatgcataccatagacgaacgaggcggagactattgcgggaatcttactgttcaggagctgttcctagaactaactcccttactgtcattgatgtgcattccactctgtgcttttctgtacaaccattcaagttttaatttcccaggtgaaccatctttatctgccattaccacaagctttcaagtttccagttattttcatcatcataaccagtacggtgctattatttacctatgtacgtgtagttatgtataattttgtaattagttacaatggtaaaaaaaatcaaaatatataaaaagtgatttgtacagaactttattttagctcttttttaaaaatgatttgcatggttagaaaacggcgaggacagccaggggagggaagggcctctagggaactttgcactttctatacctttgtactatgcactgccctattgattctacacccaataatgatattacttgaacccatctgtaagaaactgcttcggaaattcatttgtgtgtatgtaaataacacaacatagaaacaggaagggaaaaaagtctgcagtaatgcacgtattttttttctttcctgtttattttcggttttgctttaagtccttttatttttaattccctttttgtttttctttttgggttttggttccttttgggtttatgggtgccctgatactccagcagagatcagaaggctacagatccattctatccatccgttatgtggctttgccatcccagcttggagtgtctttacaaagataataacagttgtgttctttgctctcgttttggatgcatagactgaaaaattaaaacaaataacttgtaaaatggcttgttaaaaaatacaattacctctaattagtagtacgcgtaaatgttttacagaatgaaaggcgtgctttttattttcttacttcgttacattggtggcgaaagaagtctgtatgaaaatcagttctttgctgacacaagttccatttgttacaaatgaattctaataaaaatgtcagtgttatgcaaaaaaag

SEQ ID NO: 315811 - DNA, 2441 bp, Homo sapiens
cggcggccgctgctccgcgggattaaattggccgcccggaggcggcggcgcggccgtggcggggcgcgaaggcgctggaggaaagtgttggcggcggcgcgggaggcggtggcggcggctgcccggggccaacatgaccaggctctgaaagtgttccagctgaaatttcagatcggacagactcgctgcggctccggaggcagtgattccaagctgctcgcgcacgctgctgccaagctgcaggatggtgcacgtagccaggctgctgctgctgctcctcactttcttcctccgcacggatgctgagacacctccaaggtttacacgaacacccgttgatcagacaggggtctctggcggagttgcctctttcatctgccaagctacgggagacccaagacctaaaattgtctggaacaaaaaaggaaagaaagtcagcaatcagagatttgaggtaatagagtttgacgatgggtctggatcagttctcagaatacaacccttacggactccgagggatgaggccatttatgaatgtgtggcctcaaataatgtgggagaaataagtgtatccaccagactcacagttttgcgggaagatcaaattcccaggggcttccctaccattgacatgggcccacagttgaaggtggttgagcgtactcgcacggccaccatgctttgtgcagccagtggtaatccggatccagaaatcacttggtttaaagatttcttacctgtggacacaagcaacaacaatggtcgtattaagcagttacgatcaggagcccttcagattgagcagagtgaagagtctgaccaaggaaaatatgagtgtgttgccaccaacagcgcgggcactcgctattccgctcctgccaatttatatgtcagagagctgcgagaagttcgccgtgtcccaccaagattctctatcccacccactaatcatgaaatcatgccaggcggaagcgttaatatcacctgtgtggccgtggggtcaccaatgccttatgtaaagtggatgttgggggcagaagatctgacacctgaagatgatatgccaataggaagaaatgtgctagaactgaatgatgtaagacagtcagcaaattacacctgtgttgctatgtcaacactgggtgtcattgaagcaatagcacagatcactgtcaaagccttacccaaacctccaggaactcctgtagtgaccgagagcacagctacaagcatcacactgacgtgggactctgggaaccctgagcctgtttcttattacataattcagcataaacctaaaaactctgaggaactttacaaagaaattgatggggtggcgaccacacgctacagtgtcgctggactaagtccctactcggattatgaattcagggttgttgctgtcaataacattgggcgggggcctcccagcgaacctgtgctaacacaaacctcagagcaagcaccatccagtgccccgagggatgtccaggcacgaatgttgagttcgaccaccattttggtacagtggaaggaacctgaagagccaaatggacagatccaaggatatagagtttattatacaatggatcccactcaacatgtcaacaactggatgaaacacaatgtagctgacagccaaatcactactattggcaacttagtgccccagaaaacatattctgtcaaagtcctggcttttacctcaattggagatggtcccctttcaagtgacatacaagtcatcactcagacaggagtaccagggcagccactaaacttcaaagcagaacctgagtctgaaacaagtattttgctctcttggacacctccacgttcagataccattgccaactatgaactggtctacaaagatggggagcatggagaggagcaacgaattaccattgagccagggacatcatataggctgcaaggactgaaaccaaacagcttatactatttccgtctggctgcacgctcccctcaaggcctgggtgcttctactgcagaaatatcagctagaaccatgcagtcaaagccgtcagctcctcctcaagacattagttgcaccagcccaagttccactagtattttggtaagttggcaacctccaccagtggaaaaacagaatggcattatcactgaatactccatcaagtacactgcagtggatggggaagatgacaagcctcacgagattttgggaattccttcggacactaccaaataccttttggaacagctggaaaaatggactgaataccggatcactgtgacagcccatacagatgtcggccctggccctgagagcttgtccgtgttgattcgaaccaatgaagatggtatgttgcctccgctacgtcagtttgcacccttctgacacagtcttgatctgctgtctttcaataggctcacagtaatcttttttctctgctcat

SEQ ID NO: 315812 - DNA, 2762 bp, Homo sapiens
cggcggccgctgctccgcgggattaaattggccgcccggaggcggcggcgcggccgtggcggggcgcgaaggcgctggaggaaagtgttggcggcggcgcgggaggcggtggcggcggctgcccggggccaacatgaccaggctctgaaagtgttccagctgaaatttcagatcggacagactcgctgcggctccggaggcagtgattccaagctgctcgcgcacgctgctgccaagctgcaggatggtgcacgtagccaggctgctgctgctgctcctcactttcttcctccgcacggatgctgagacacctccaaggtttacacgaacacccgttgatcagacaggggtctctggcggagttgcctctttcatctgccaagctacgggagacccaagacctaaaattgtctggaacaaaaaaggaaagaaagtcagcaatcagagatttgaggtaatagagtttgacgatgggtctggatcagttctcagaatacaacccttacggactccgagggatgaggccatttatgaatgtgtggcctcaaataatgtgggagaaataagtgtatccaccagactcacagttttgcgggaagatcaaattcccaggggcttccctaccattgacatgggcccacagttgaaggtggttgagcgtactcgcacggccaccatgctttgtgcagccagtggtaatccggatccagaaatcacttggtttaaagatttcttacctgtggacacaagcaacaacaatggtcgtattaagcagttacgatcaggagcccttcagattgagcagagtgaagagtctgaccaaggaaaatatgagtgtgttgccaccaacagcgcgggcactcgctattccgctcctgccaatttatatgtcagagagctgcgagaagttcgccgtgtcccaccaagattctctatcccacccactaatcatgaaatcatgccaggcggaagcgttaatatcacctgtgtggccgtggggtcaccaatgccttatgtaaagtggatgttgggggcagaagatctgacacctgaagatgatatgccaataggaagaaatgtgctagaactgaatgatgtaagacagtcagcaaattacacctgtgttgctatgtcaacactgggtgtcattgaagcaatagcacagatcactgtcaaagccttacccaaacctccaggaactcctgtagtgaccgagagcacagctacaagcatcacactgacgtgggactctgggaaccctgagcctgtttcttattacataattcagcataaacctaaaaactctgaggaactttacaaagaaattgatggggtggcgaccacacgctacagtgtcgctggactaagtccctactcggattatgaattcagggttgttgctgtcaataacattgggcgggggcctcccagcgaacctgtgctaacacaaacctcagagcaagcaccatccagtgccccgagggatgtccaggcacgaatgttgagttcgaccaccattttggtacagtggaaggaacctgaagagccaaatggacagatccaaggatatagagtttattatacaatggatcccactcaacatgtcaacaactggatgaaacacaatgtagctgacagccaaatcactactattggcaacttagtgccccagaaaacatattctgtcaaagtcctggcttttacctcaattggagatggtcccctttcaagtgacatacaagtcatcactcagacaggagtaccagggcagccactaaacttcaaagcagaacctgagtctgaaacaagtattttgctctcttggacacctccacgttcagataccattgccaactatgaactggtctacaaagatggggagcatggagaggagcaacgaattaccattgagccagggacatcatataggctgcaaggactgaaaccaaacagcttatactatttccgtctggctgcacgctcccctcaaggcctgggtgcttctactgcagaaatatcagctagaaccatgcagtcaaagccgtcagctcctcctcaagacattagttgcaccagcccaagttccactagtattttggtaagttggcaacctccaccagtggaaaaacagaatggcattatcactgaatactccatcaagtacactgcagtggatggggaagatgacaagcctcacgagattttgggaattccttcggacactaccaaataccttttggaacagctggaaaaatggactgaataccggatcactgtgacagcccatacagatgtcggccctggccctgagagcttgtccgtgttgattcgaaccaatgaagatgttcctagtggtcctcctcgcaaagtcgaggtagaggctgtcaactcaacatctgttaaagtctcatggcgctcacccgtgcccaataaacagcatggccagataagaggatatcaggtgcattatgtgaggatggaaaatggtgagcccaagggccagcccatgctgaaagatgtcatgctggctgatgcacaggtaagcctctgaaattatgtacctctgtttttatataataagtttatcttagttcatatcctgaaattgctcttattttagtttttcgacatttaaaaaatcctatacaaaattctagttttcatttcacattgatgtatattgatcttttcaatcagagttactatcaagtgaggaagggaattgtaatgaaatgacactcaagtctgattaaaaacatgtt

SEQ ID NO: 315813 - DNA, 219 bp, Homo sapiens
aaagtttcactaggtaagtatgcaaattcttattctaaaaatacttctttaagtgcatgaagcttcatgtattttgcaatattcttggcctcaatatctaccccctagtgaaacttttctagaattatttttcactctaagtcatgtatgtttctctttgattatttgcatgttatgtttaataagctactagcaaaataaaacatagcaaatggcatc

SEQ ID NO: 315814 - DNA, 1802 bp, Homo sapiens
aaaaaaaaaaaaaaaaaaaaaaaaaaaaaaaaaaaaaaaaaaaaaaaaaattccgtcctgacagagttcacagcatatattggtggattcttgtccatagtgcatctgctttaagaattaacgaaagcagtgtcaagacagtaaggattcaaaccatttgccaaaaatgagtctaagtgcatttactctcttcctggcattgattggtggtaccagtggccagtactatgattatgattttcccctatcaatttatgggcaatcatcaccaaactgtgcaccagaatgtaactgccctgaaagctacccaagtgccatgtactgtgatgagctgaaattgaaaagtgtaccaatggtgcctcctggaatcaagtatctttaccttaggaataaccagattgaccatattgatgaaaaggcctttgagaatgtaactgatctgcagtggctcattctagatcacaaccttctagaaaactccaagataaaagggagagttttctctaaattgaaacaactgaagaagctgcatataaaccacaacaacctgacagagtctgtgggcccacttcccaaatctctggaggatctgcagcttactcataacaagatcacaaagctgggctcttttgaaggattggtaaacctgaccttcatccatctccagcacaatcggctgaaagaggatgctgtttcagctgcttttaaaggtcttaaatcactcgaataccttgacttgagcttcaatcagatagccagactgccttctggtctccctgtctctcttctaactctctacttagacaacaataagatcagcaacatccctgatgagtatttcaagcgttttaatgcattgcagtatctgcgtttatctcacaacgaactggctgatagtggaatacctggaaattctttcaatgtgtcatccctggttgagctggatctgtcctataacaagcttaaaaacataccaactgtcaatgaaaaccttgaaaactattacctggaggtcaatcaacttgagaagtttgacataaagagcttctgcaagatcctggggccattatcctactccaagatcaagcatttgcgtttggatggcaatcgcatctcagaaaccagtcttccaccggatatgtatgaatgtctacgtgttgctaacgaagtcactcttaattaatatctgtatcctggaacaatattttatggttatgtttttctgtgtgtcagttttcatagtatccatattttattactgtttattacttccatgaattttaaaatctgagggaaatgttttgtaaacatttattttttttaaagaaaagatgaaaggcaggcctatttcatcacaagaacacacacatatacacgaatagacatcaaactcaatgctttatttgtaaatttagtgtttttttatttctactgtcaaatgatgtgcaaaaccttttactggttgcatggaaatcagccaagttttataatccttaaatcttaatgttcctcaaagcttggattaaatacatatggatgttactctcttgcaccaaattatcttgatacattcaaatttgtctggttaaaaaataggtggtagatattgaggccaagaatattgcaaaatacatgaagcttcatgcacttaaagaagtatttttagaataagaatttgcatacttacctagtgaaacttttctagaattatttttcactctaagtcatgtatgtttctctttgattatttgcatgttatgtttaataagctactagcaaaataaaacatagcaaatggcatc

SEQ ID NO: 315815 - DNA, 1773 bp, Homo sapiens
aaaaaaaaaaaaaaaaaaaaattccgtcctgacagagttcacagcatatattggtggattcttgtccatagtgcatctgctttaagaattaacgaaagcagtgtcaagacagtaaggattcaaaccatttgccaaaaatgagtctaagtgcatttactctcttcctggcattgattggtggtaccagtggccagtactatgattatgattttcccctatcaatttatgggcaatcatcaccaaactgtgcaccagaatgtaactgccctgaaagctacccaagtgccatgtactgtgatgagctgaaattgaaaagtgtaccaatggtgcctcctggaatcaagtatctttaccttaggaataaccagattgaccatattgatgaaaaggcctttgagaatgtaactgatctgcagtggctcattctagatcacaaccttctagaaaactccaagataaaagggagagttttctctaaattgaaacaactgaagaagctgcatataaaccacaacaacctgacagagtctgtgggcccacttcccaaatctctggaggatctgcagcttactcataacaagatcacaaagctgggctcttttgaaggattggtaaacctgaccttcatccatctccagcacaatcggctgaaagaggatgctgtttcagctgcttttaaaggtcttaaatcactcgaataccttgacttgagcttcaatcagatagccagactgccttctggtctccctgtctctcttctaactctctacttagacaacaataagatcagcaacatccctgatgagtatttcaagcgttttaatgcattgcagtatctgcgtttatctcacaacgaactggctgatagtggaatacctggaaattctttcaatgtgtcatccctggttgagctggatctgtcctataacaagcttaaaaacataccaactgtcaatgaaaaccttgaaaactattacctggaggtcaatcaacttgagaagtttgacataaagagcttctgcaagatcctggggccattatcctactccaagatcaagcatttgcgtttggatggcaatcgcatctcagaaaccagtcttccaccggatatgtatgaatgtctacgtgttgctaacgaagtcactcttaattaatatctgtatcctggaacaatattttatggttatgtttttctgtgtgtcagttttcatagtatccatattttattactgtttattacttccatgaattttaaaatctgagggaaatgttttgtaaacatttattttttttaaagaaaagatgaaaggcaggcctatttcatcacaagaacacacacatatacacgaatagacatcaaactcaatgctttatttgtaaatttagtgtttttttatttctactgtcaaatgatgtgcaaaaccttttactggttgcatggaaatcagccaagttttataatccttaaatcttaatgttcctcaaagcttggattaaatacatatggatgttactctcttgcaccaaattatcttgatacattcaaatttgtctggttaaaaaataggtggtagatattgaggccaagaatattgcaaaatacatgaagcttcatgcacttaaagaagtatttttagaataagaatttgcatacttacctagtgaaacttttctagaattatttttcactctaagtcatgtatgtttctctttgattatttgcatgttatgtttaataagctactagcaaaataaaacatagcaaatggcatc

SEQ ID NO: 315816 - DNA, 3395 bp, Homo sapiens
ggctgagcacattgcacttaattgttgccacagccacagatgtaaagaggcttgtaagaaaaatgttctcacagtgagcttccttatttgaagcaggactcaattcttggttaaaagctatggtatttgagctagttaaacacatatctctctcccattccatagggaatgagctgggctgtcctttctccccacgttcacctgcacttcgttagagagcagtgttcacatgccacaccacaagatccccacaatgacataactccattcagagactggcgtgactgggctgggtctccccaccccccccttcagctcttgtatcactcagaatctggcagccagttccgtcctgacagagttcacagcatatattggtggattcttgtccatagtgcatctgctttaagaattaacgaaagcagtgtcaagacagtaaggattcaaaccatttgccaaaaatgagtctaagtgcatttactctcttcctggcattgattggtggtaccagtggccagtactatgattatgattttcccctatcaatttatgggcaatcatcaccaaactgtgcaccagaatgtaactgccctgaaagctacccaagtgccatgtactgtgatgagctgaaattgaaaagtgtaccaatggtgcctcctggaatcaagtatctttaccttaggaataaccagattgaccatattgatgaaaaggcctttgagaatgtaactgatctgcagtggctcattctagatcacaaccttctagaaaactccaagataaaagggagagttttctctaaattgaaacaactgaagaagctgcatataaaccacaacaacctgacagagtctgtgggcccacttcccaaatctctggaggatctgcagcttactcataacaagatcacaaagctgggctcttttgaaggattggtaaacctgaccttcatccatctccagcacaatcggctgaaagaggatgctgtttcagctgcttttaaaggtcttaaatcactcgaataccttgacttgagcttcaatcagatagccagactgccttctggtctccctgtctctcttctaactctctacttagacaacaataagatcagcaacatccctgatgagtatttcaagcgttttaatgcattgcagtatctgcgtttatctcacaacgaactggctgatagtggaatacctggaaattctttcaatgtgtcatccctggttgagctggatctgtcctataacaagcttaaaaacataccaactgtcaatgaaaaccttgaaaactattacctggaggtcaatcaacttgagaagtttgacataaagagcttctgcaagatcctggggccattatcctactccaagatcaagcatttgcgtttggatggcaatcgcatctcagaaaccagtcttccaccggatatgtatgaatgtctacgtgttgctaacgaagtcactcttaattaatatctgtatcctggaacaatattttatggttatgtttttctgtgtgtcagttttcatagtatccatattttattactgtttattacttccatgaattttaaaatctgagggaaatgttttgtaaacatttattttttttaaagaaaagatgaaaggcaggcctatttcatcacaagaacacacacatatacacgaatagacatcaaactcaatgctttatttgtaaatttagtgtttttttatttctactgtcaaatgatgtgcaaaaccttttactggttgcatggaaatcagccaagttttataatccttaaatcttaatgttcctcaaagcttggattaaatacatatggatgttactctcttgcaccaaattatcttgatacattcaaatttgtctggttaaaaaataggtggtagatattgaggccaagaatattgcaaaatacatgaagcttcatgcacttaaagaagtatttttagaataagaatttgcatacttacctagtgaaacttttctagaattatttttcactctaagtcatgtatgtttctctttgattatttgcatgttatgtttaataagctactagcaaaataaaacatagcaaatggcatcactgtgtttgacttcttgtgaaatttctgtactttgtatataaaatacataaaacaatagattagaaatcaaaagatatctctggcctgcaatattttactgatgtgaacataggattttccactaaataatttgtctacttctagcattcacttacaaagagttcttaaaaacacctataataggtacttagatttcacaacttacttagatatttgtcattattcccattcctggtgtttttactggttcatatacaatggtattctattagataagaagctgctatgtgatctcagcactcactccttggttgtcaagaaatggtggataactcacaggattaaaaatgaatgaatataaaattttctgaaatagatatttaaaaaatcattttagcttgaagccaatatgtctggatcataggttttgagttcataatccagtaataacagctttcagctttctatgagtatatacaattctatacaatgataaatactctgcatataatttataaaaataacttctgttttacctagttaacaataaaacctatgtgtggagccaaatgttatgcagacaaaggtctgctcatcccataccagtgtatatatagtcaaatatgtgtctagtacaaataaaatgtatctctaaggcataaaatgttttaacacaccacttttagtgaactctatcttatggtacagcggcctttcatcaaaggatcatcattgagactgagttgactggcagatatgtgcgatggatattacattaggtacaatgtgtatttttgattttcatgagttttctacattaaggtaaattccttagagtgtgatagcagcctcagtttatttgttggtttaaacttgaaatctactttttctcgataaaactataatgtagatgaattgaaaatgaattttcttttccctgtctacaaaagtcactatcaagccttggaaacctattctcaaatagagggtagataatgtgccataaattctcttttagaaagaatgtgatggaattaaatgagctttgtctctatactacttagaggaaacatcttctcagcagacagtctgtctgcatctttaaaagcctttgatttctctctatccaaagtcctatgttattctcatgcctaagaagcaaaactatgacttttaaaacagcagttccctttgtagttaatgttggttgacaaagacaaagttaagcacttagtgacactttgttgtagaagcatctgggaaaggaatataccctgtttaggaacaactcctctt

SEQ ID NO: 315817 - DNA, 2168 bp, Homo sapiens
ggctgagcacattgcacttaattgttgccacagccacagatgtaaagaggcttgtaagaaaaatgttctcacagtgagcttccttatttgaagcaggactcaattcttggttaaaagctatggtatttgagctagttaaacacatatctctctcccattccatagggaatgagctgggctgtcctttctccccacgttcacctgcacttcgttagagagcagtgttcacatgccacaccacaagatccccacaatgacataactccattcagagactggcgtgactgggctgggtctccccaccccccccttcagctcttgtatcactcagaatctggcagccagttccgtcctgacagagttcacagcatatattggtggattcttgtccatagtgcatctgctttaagaattaacgaaagcagtgtcaagacagtaaggattcaaaccatttgccaaaaatgagtctaagtgcatttactctcttcctggcattgattggtggtaccagtggccagtactatgattatgattttcccctatcaatttatgggcaatcatcaccaaactgtgcaccagaatgtaactgccctgaaagctacccaagtgccatgtactgtgatgagctgaaattgaaaagtgtaccaatggtgcctcctggaatcaagtatctttaccttaggaataaccagattgaccatattgatgaaaaggcctttgagaatgtaactgatctgcagtggctcattctagatcacaaccttctagaaaactccaagataaaagggagagttttctctaaattgaaacaactgaagaagctgcatataaaccacaacaacctgacagagtctgtgggcccacttcccaaatctctggaggatctgcagcttactcataacaagatcacaaagctgggctcttttgaaggattggtaaacctgaccttcatccatctccagcacaatcggctgaaagaggatgctgtttcagctgcttttaaaggtcttaaatcactcgaataccttgacttgagcttcaatcagatagccagactgccttctggtctccctgtctctcttctaactctctacttagacaacaataagatcagcaacatccctgatgagtatttcaagcgttttaatgcattgcagtatctgcgtttatctcacaacgaactggctgatagtggaatacctggaaattctttcaatgtgtcatccctggttgagctggatctgtcctataacaagcttaaaaacataccaactgtcaatgaaaaccttgaaaactattacctggaggtcaatcaacttgagaagtttgacataaagagcttctgcaagatcctggggccattatcctactccaagatcaagcatttgcgtttggatggcaatcgcatctcagaaaccagtcttccaccggatatgtatgaatgtctacgtgttgctaacgaagtcactcttaattaatatctgtatcctggaacaatattttatggttatgtttttctgtgtgtcagttttcatagtatccatattttattactgtttattacttccatgaattttaaaatctgagggaaatgttttgtaaacatttattttttttaaagaaaagatgaaaggcaggcctatttcatcacaagaacacacacatatacacgaatagacatcaaactcaatgctttatttgtaaatttagtgtttttttatttctactgtcaaatgatgtgcaaaaccttttactggttgcatggaaatcagccaagttttataatccttaaatcttaatgttcctcaaagcttggattaaatacatatggatgttactctcttgcaccaaattatcttgatacattcaaatttgtctggttaaaaaataggtggtagatattgaggccaagaatattgcaaaatacatgaagcttcatgcacttaaagaagtatttttagaataagaatttgcatacttacctagtgaaacttttctagaattatttttcactctaagtcatgtatgtttctctttgattatttgcatgttatgtttaataagctactagcaaaataaaacatagcaaatggcatcactgtgtttgacttcttgtgaaatttctgtactttgtatataaaatacataaaacaatagattagaaatca

SEQ ID NO: 315818 - DNA, 2971 bp, Homo sapiens
  misc_feature (2518)..(2518): n is a, c, g, or t
ggctgagcacattgcacttaattgttgccacagccacagatgtaaagaggcttgtaagaaaaatgttctcacagtgagcttccttatttgaagcaggactcaattcttggttaaaagctatggtatttgagctagttaaacacatatctctctcccattccatagggaatgagctgggctgtcctttctccccacgttcacctgcacttcgttagagagcagtgttcacatgccacaccacaagatccccacaatgacataactccattcagagactggcgtgactgggctgggtctccccaccccccccttcagctcttgtatcactcagaatctggcagccagttccgtcctgacagagttcacagcatatattggtggattcttgtccatagtgcatctgctttaagaattaacgaaagcagtgtcaagacagtaaggattcaaaccatttgccaaaaatgagtctaagtgcatttactctcttcctggcattgattggtggtaccagtggccagtactatgattatgattttcccctatcaatttatgggcaatcatcaccaaactgtgcaccagaatgtaactgccctgaaagctacccaagtgccatgtactgtgatgagctgaaattgaaaagtgtaccaatggtgcctcctggaatcaagtatctttaccttaggaataaccagattgaccatattgatgaaaaggcctttgagaatgtaactgatctgcagtggctcattctagatcacaaccttctagaaaactccaagataaaagggagagttttctctaaattgaaacaactgaagaagctgcatataaaccacaacaacctgacagagtctgtgggcccacttcccaaatctctggaggatctgcagcttactcataacaagatcacaaagctgggctcttttgaaggattggtaaacctgaccttcatccatctccagcacaatcggctgaaagaggatgctgtttcagctgcttttaaaggtcttaaatcactcgaataccttgacttgagcttcaatcagatagccagactgccttctggtctccctgtctctcttctaactctctacttagacaacaataagatcagcaacatccctgatgagtatttcaagcgttttaatgcattgcagtatctgcgtttatctcacaacgaactggctgatagtggaatacctggaaattctttcaatgtgtcatccctggttgagctggatctgtcctataacaagcttaaaaacataccaactgtcaatgaaaaccttgaaaactattacctggaggtcaatcaacttgagaagtttgacataaagagcttctgcaagatcctggggccattatcctactccaagatcaagcatttgcgtttggatggcaatcgcatctcagaaaccagtcttccaccggatatgtatgaatgtctacgtgttgctaacgaagtcactcttaattaatatctgtatcctggaacaatattttatggttatgtttttctgtgtgtcagttttcatagtatccatattttattactgtttattacttccatgaattttaaaatctgagggaaatgttttgtaaacatttattttttttaaagaaaagatgaaaggcaggcctatttcatcacaagaacacacacatatacacgaatagacatcaaactcaatgctttatttgtaaatttagtgtttttttatttctactgtcaaatgatgtgcaaaaccttttactggttgcatggaaatcagccaagttttataatccttaaatcttaatgttcctcaaagcttggattaaatacatatggatgttactctcttgcaccaaattatcttgatacattcaaatttgtctggttaaaaaataggtggtagatattgaggccaagaatattgcaaaatacatgaagcttcatgcacttaaagaagtatttttagaataagaatttgcatacttacctagtgaaacttttctagaattatttttcactctaagtcatgtatgtttctctttgattatttgcatgttatgtttaataagctactagcaaaataaaacatagcaaatggcatcaaaaaaaaaaaaaaaaaaaaaaaaaaaaaaaaaaatttggggggggcatgggcccagaaaagttttttaaaacctttcgttgtggccaccggggccccacaaagtgacaatgtacaacaaggtggctcaaaaagagggttcccaagaggaaaacccgggagacgacagaaacaagggcgcgggaaatcacatccaacacaatataaaaaagacgcgcccgggggtgaaacacaccagatgagttttcgtaaaacaacaactccaacaaaagggagagatctctagaacgaggacacactcaagcgggagggccatatctctaccaacagcgcggaggcgcgcaacaaagcaccaaaagagcccaagaagaacaaagacacagtatatctagcagccccccacgcagccctcaggcggggcnccaacccgacacagcgcagcaacaaaacgacaagaggaaaaggatgaacacagcgaaacgaaaacacgaaggaacagacacgcaacgaaaaagaacaggaaagaagaacacaaagaaagagaaaggaaaacacgaaagaaacgaacaaaaaagagaaagaaatagaaacaagaagaaacaagcaaaaaagaaagaagaacagaagcaacgaacaagaaacagacaagaaagaaaaacaaacaaagaaaagaagagaacagaaaagagagaaaaagaacaggaaacaaaaaacaatacaaaacaacaaagaagaaaaaagaagaaggaagacaagaagaagagagaagagagaagaaggcagaagaggaaaagaaaaacagagaagaaaaggaagaagagaagaaacaaaaaaaatagaagcacgaagacaagaaagaagaacaagacagaaat

SEQ ID NO: 315819 - DNA, 1872 bp, Homo sapiens
ggctgagcacattgcacttaattgttgccacagccacagatgtaaagaggcttgtaagaaaaatgttctcacagtgagcttccttatttgaagcaggactcaattcttggttaaaagctatggtatttgagctagttaaacacatatctctctcccattccatagggaatgagctgggctgtcctttctccccacgttcacctgcacttcgttagagagcagtgttcacatgccacaccacaagatccccacaatgacataactccattcagagactggcgtgactgggctgggtctccccaccccccccttcagctcttgtatcactcagaatctggcagccagttccgtcctgacagagttcacagcatatattggtggattcttgtccatagtgcatctgctttaagaattaacgaaagcagtgtcaagacagtaaggattcaaaccatttgccaaaaatgagtctaagtgcatttactctcttcctggcattgattggtggtaccagtggccagtactatgattatgattttcccctatcaatttatgggcaatcatcaccaaactgtgcaccagaatgtaactgccctgaaagctacccaagtgccatgtactgtgatgagctgaaattgaaaagtgtaccaatggtgcctcctggaatcaagtatctttaccttaggaataaccagattgaccatattgatgaaaaggcctttgagaatgtaactgatctgcagtggctcattctagatcacaaccttctagaaaactccaagataaaagggagagttttctctaaattgaaacaactgaagaagctgcatataaaccacaacaacctgacagagtctgtgggcccacttcccaaatctctggaggatctgcagcttactcataacaagatcacaaagctgggctcttttgaaggattggtaaacctgaccttcatccatctccagcacaatcggctgaaagaggatgctgtttcagctgcttttaaaggtcttaaatcactcgaataccttgacttgagcttcaatcagatagccagactgccttctggtctccctgtctctcttctaactctctacttagacaacaataagatcagcaacatccctgatgagtatttcaagcgttttaatgcattgcagcatttgcgtttggatggcaatcgcatctcagaaaccagtcttccaccggatatgtatgaatgtctacgtgttgctaacgaagtcactcttaattaatatctgtatcctggaacaatattttatggttatgtttttctgtgtgtcagttttcatagtatccatattttattactgtttattacttccatgaattttaaaatctgagggaaatgttttgtaaacatttattttttttaaagaaaagatgaaaggcaggcctatttcatcacaagaacacacacatatacacgaatagacatcaaactcaatgctttatttgtaaatttagtgtttttttatttctactgtcaaatgatgtgcaaaaccttttactggttgcatggaaatcagccaagttttataatccttaaatcttaatgttcctcaaagcttggattaaatacatatggatgttactctcttgcaccaaattatcttgatacattcaaatttgtctggttaaaaaataggtggtagatattgaggccaagaatattgcaaaatacatgaagcttcatgcacttaaagaagtatttttagaataagaatttgcatacttacctagtgaaacttttctagaattatttttcactctaagtcatgtatgtttctctttgattatttgcatgttatgtttaataagctactagcaaaataaaacatagcaaatggcatc

SEQ ID NO: 315820 - DNA, 1749 bp, Homo sapiens
aaaaaaaaaaaaaaaaaaaaaaaaaaaaaaaaaaaaaaaaaaaaaaaaaaatctgctttaagaattaacgaaagcagtgtcaagacagtaaggattcaaaccatttgccaaaaatgagtctaagtgcatttactctcttcctggcattgattggtggtaccagtggccagtactatgattatgattttcccctatcaatttatgggcaatcatcaccaaactgtgcaccagaatgtaactgccctgaaagctacccaagtgccatgtactgtgatgagctgaaattgaaaagtgtaccaatggtgcctcctggaatcaagtatctttaccttaggaataaccagattgaccatattgatgaaaaggcctttgagaatgtaactgatctgcagtggctcattctagatcacaaccttctagaaaactccaagataaaagggagagttttctctaaattgaaacaactgaagaagctgcatataaaccacaacaacctgacagagtctgtgggcccacttcccaaatctctggaggatctgcagcttactcataacaagatcacaaagctgggctcttttgaaggattggtaaacctgaccttcatccatctccagcacaatcggctgaaagaggatgctgtttcagctgcttttaaaggtcttaaatcactcgaataccttgacttgagcttcaatcagatagccagactgccttctggtctccctgtctctcttctaactctctacttagacaacaataagatcagcaacatccctgatgagtatttcaagcgttttaatgcattgcagtatctgcgtttatctcacaacgaactggctgatagtggaatacctggaaattctttcaatgtgtcatccctggttgagctggatctgtcctataacaagcttaaaaacataccaactgtcaatgaaaaccttgaaaactattacctggaggtcaatcaacttgagaagtttgacataaagagcttctgcaagatcctggggccattatcctactccaagatcaagcatttgcgtttggatggcaatcgcatctcagaaaccagtcttccaccggatatgtatgaatgtctacgtgttgctaacgaagtcactcttaattaatatctgtatcctggaacaatattttatggttatgtttttctgtgtgtcagttttcatagtatccatattttattactgtttattacttccatgaattttaaaatctgagggaaatgttttgtaaacatttattttttttaaagaaaagatgaaaggcaggcctatttcatcacaagaacacacacatatacacgaatagacatcaaactcaatgctttatttgtaaatttagtgtttttttatttctactgtcaaatgatgtgcaaaaccttttactggttgcatggaaatcagccaagttttataatccttaaatcttaatgttcctcaaagcttggattaaatacatatggatgttactctcttgcaccaaattatcttgatacattcaaatttgtctggttaaaaaataggtggtagatattgaggccaagaatattgcaaaatacatgaagcttcatgcacttaaagaagtatttttagaataagaatttgcatacttacctagtgaaacttttctagaattatttttcactctaagtcatgtatgtttctctttgattatttgcatgttatgtttaataagctactagcaaaataaaacatagcaaatggcatc

SEQ ID NO: 315821 - DNA, 1787 bp, Homo sapiens
  misc_feature (1771)..(1771): n is a, c, g, or t
ggctgagcacattgcacttaattgttgccacagccacagatgtaaagaggcttgtaagaaaaatgttctcacagtgagcttccttatttgaagcaggactcaattcttggttaaaagctatggtatttgagctagttaaacacatatctctctcccattccatagggaatgagctgggctgtcctttctccccacgttcacctgcacttcgttagagagcagtgttcacatgccacaccacaagatccccacaatgacataactccattcagagactggcgtgactgggctgggtctccccaccccccccttcagctcttgtatcactcagaatctggcagccagttccgtcctgacagagttcacagcatatattggtggattcttgtccatagtgcatctgctttaagaattaacgaaagcagtgtcaagacagtaaggattcaaaccatttgccaaaaatgagtctaagtgcatttactctcttcctggcattgattggtggtaccagtggccagtactatgattatgattttcccctatcaatttatgggcaatcatcaccaaactgtgcaccagaatgtaactgccctgaaagctacccaagtgccatgtactgtgatgagctgaaattgaaaagtgtaccaatggtgcctcctggaatcaagtatctttaccttaggaataaccagattgaccatattgatgaaaaggcctttgagaatgtaactgatctgcagtggctcattctagatcacaaccttctagaaaactccaagataaaagggagagttttctctaaattgaaacaactgaagaagctgcatataaaccacaacaacctgacagagtctgtgggcccacttcccaaatctctggaggatctgcagcttactcataacaagatcacaaagctgggctcttttgaaggattggtaaacctgaccttcatccatctccagcacaatcggctgaaagaggatgctgtttcagctgcttttaaaggtcttaaatcactcgaataccttgacttgagcttcaatcagatagccagactgccttctggtctccctgtctctcttctaactctctacttagacaacaataagatcagcaacatccctgatgagtatttcaagcgttttaatgcattgcagtatctgcgtttatctcacaacgaactggctgatagtggaatacctggaaattctttcaatgtgtcatccctggttgagctggatctgtcctataacaagcttaaaaacataccaactgtcaatgaaaaccttgaaaactattacctggaggtcaatcaacttgagaagtttgacataaagagcttctgcaagatcctggggccattatcctactccaagatcaagcatttgcgtttggatggcaatcgcatctcagaaaccagtcttccaccggatatgtatgaatgtctacgtgttgctaacgaagtcactcttaattaatatctgtatcctggaacaatattttatggttatgtttttctgtgtgtcagttttcatagtatccatattttattactgtttattacttccatgaattttaaaatctgagggaaatgttttgtaaacatttattttttttaaagaaaagatgaaaggcaggcctatttcatcacaagaacacacacatatacacgaatagacatcaaactcaatgctttatttgtaaatttagtggggggggatgtcgactggcaaatgatgggcaaagcgtgtgacgggtggcagggaaggcngccgggggtgagaagc

SEQ ID NO: 315822 - DNA, 1962 bp, Homo sapiens
ggctgagcacattgcacttaattgttgccacagccacagatgtaaagaggcttgtaagaaaaatgttctcacagtgagcttccttatttgaagcaggactcaattcttggttaaaagctatggtatttgagctagttaaacacatatctctctcccattccatagggaatgagctgggctgtcctttctccccacgttcacctgcacttcgttagagagcagtgttcacatgccacaccacaagatccccacaatgacataactccattcagagactggcgtgactgggctgggtctccccaccccccccttcagctcttgtatcactcagaatctggcagccagttccgtcctgacagagttcacagcatatattggtggattcttgtccatagtgcatctgctttaagaattaacgaaagcagtgtcaagacagtaaggattcaaaccatttgccaaaaatgagtccaagtgccatgtactgtgatgagctgaaattgaaaagtgtaccaatggtgcctcctggaatcaagtatctttaccttaggaataaccagattgaccatattgatgaaaaggcctttgagaatgtaactgatctgcagtggctcattctagatcacaaccttctagaaaactccaagataaaagggagagttttctctaaattgaaacaactgaagaagctgcatataaaccacaacaacctgacagagtctgtgggcccacttcccaaatctctggaggatctgcagcttactcataacaagatcacaaagctgggctcttttgaaggattggtaaacctgaccttcatccatctccagcacaatcggctgaaagaggatgctgtttcagctgcttttaaaggtcttaaatcactcgaataccttgacttgagcttcaatcagatagccagactgccttctggtctccctgtctctcttctaactctctacttagacaacaataagatcagcaacatccctgatgagtatttcaagcgttttaatgcattgcagtatctgcgtttatctcacaacgaactggctgatagtggaatacctggaaattctttcaatgtgtcatccctggttgagctggatctgtcctataacaagcttaaaaacataccaactgtcaatgaaaaccttgaaaactattacctggaggtcaatcaacttgagaagtttgacataaagagcttctgcaagatcctggggccattatcctactccaagatcaagcatttgcgtttggatggcaatcgcatctcagaaaccagtcttccaccggatatgtatgaatgtctacgtgttgctaacgaagtcactcttaattaatatctgtatcctggaacaatattttatggttatgtttttctgtgtgtcagttttcatagtatccatattttattactgtttattacttccatgaattttaaaatctgagggaaatgttttgtaaacatttattttttttaaagaaaagatgaaaggcaggcctatttcatcacaagaacacacacatatacacgaatagacatcaaactcaatgctttatttgtaaatttagtgtttttttatttctactgtcaaatgatgtgcaaaaccttttactggttgcatggaaatcagccaagttttataatccttaaatcttaatgttcctcaaagcttggattaaatacatatggatgttactctcttgcaccaaattatcttgatacattcaaatttgtctggttaaaaaataggtggtagatattgaggccaagaatattgcaaaatacatgaagcttcatgcacttaaagaagtatttttagaataagaatttgcatacttacctagtgaaacttttctagaattatttttcactctaagtcatgtatgtttctctttgattatttgcatgttatgtttaataagctactagcaaaataaaacatagcaaatggcatc

SEQ ID NO: 315823 - DNA, 1489 bp, Homo sapiens
aaaaaaaaaaaaaaaaaaaaaaaaaaaaaaaaaaaaaaaaaaaaaaaaaattccgtcctgacagagttcacagcatatattggtggattcttgtccatagtgcatctgctttaagaattaacgaaagcagtgtcaagacagtaagatcacaaccttctagaaaactccaagataaaagggagagttttctctaaattgaaacaactgaagaagctgcatataaaccacaacaacctgacagagtctgtgggcccacttcccaaatctctggaggatctgcagcttactcataacaagatcacaaagctgggctcttttgaaggattggtaaacctgaccttcatccatctccagcacaatcggctgaaagaggatgctgtttcagctgcttttaaaggtcttaaatcactcgaataccttgacttgagcttcaatcagatagccagactgccttctggtctccctgtctctcttctaactctctacttagacaacaataagatcagcaacatccctgatgagtatttcaagcgttttaatgcattgcagtatctgcgtttatctcacaacgaactggctgatagtggaatacctggaaattctttcaatgtgtcatccctggttgagctggatctgtcctataacaagcttaaaaacataccaactgtcaatgaaaaccttgaaaactattacctggaggtcaatcaacttgagaagtttgacataaagagcttctgcaagatcctggggccattatcctactccaagatcaagcatttgcgtttggatggcaatcgcatctcagaaaccagtcttccaccggatatgtatgaatgtctacgtgttgctaacgaagtcactcttaattaatatctgtatcctggaacaatattttatggttatgtttttctgtgtgtcagttttcatagtatccatattttattactgtttattacttccatgaattttaaaatctgagggaaatgttttgtaaacatttattttttttaaagaaaagatgaaaggcaggcctatttcatcacaagaacacacacatatacacgaatagacatcaaactcaatgctttatttgtaaatttagtgtttttttatttctactgtcaaatgatgtgcaaaaccttttactggttgcatggaaatcagccaagttttataatccttaaatcttaatgttcctcaaagcttggattaaatacatatggatgttactctcttgcaccaaattatcttgatacattcaaatttgtctggttaaaaaataggtggtagatattgaggccaagaatattgcaaaatacatgaagcttcatgcacttaaagaagtatttttagaataagaatttgcatacttacctagtgaaacttttctagaattatttttcactctaagtcatgtatgtttctctttgattatttgcatgttatgtttaataagctactagcaaaataaaacatagcaaatggcatc

SEQ ID NO: 315824 - DNA, 1735 bp, Homo sapiens
  misc_feature (8)..(8): n is a, c, g, or t
  misc_feature (75)..(75): n is a, c, g, or t
  misc_feature (365)..(365): n is a, c, g, or t
  misc_feature (467)..(467): n is a, c, g, or t
tgtctctnttggcagtttgttcctttcgccggctggtccggtccggatttcccgggttgccgtgtcaagacagtngggattcaaaccatttgccaaaaatgagtctaagtgcatttactctcttcctggcattgattggtggtaccagtggccagtactatgattatgattttcccctatcaatttatgggcaatcatcaccaaactgtgcaccagaatgtaactgccctgaaagctacccaagtgccatgtactgtgatgagctgaaattgaaaagtgtaccaatggtgcctcctggaatcaagtatctttaccttggggttccccggtttgccccttttggtggccgggcctttgggattgtngctggtctgccgtggctctttctgggtcccccccttctgggcccctcccgggttcccgggggggttttctcttccttggcacccctgacgaggctgcctttngcccgccaccgccctgacagagtctgtgggcccacttcccaaatctctggaggatctgcagcttactcataacaagatcacaaagctgggctcttttgaaggattggtaaacctgaccttcatccatctccagcacaatcggctgaaagaggatgctgtttcagctgcttttaaaggtcttaaatcactcgaataccttgacttgagcttcaatcagatagccagactgccttctggtctccctgtctctcttctaactctctacttagacaacaataagatcagcaacatccctgatgagtatttcaagcgttttaatgcattgcagtatctgcgtttatctcacaacgaactggctgatagtggaatacctggaaattctttcaatgtgtcatccctggttgagctggatctgtcctataacaagcttaaaaacataccaactgtcaatgaaaaccttgaaaactattacctggaggtcaatcaacttgagaagtttgacataaagagcttctgcaagatcctggggccattatcctactccaagatcaagcatttgcgtttggatggcaatcgcatctcagaaaccagtcttccaccggatatgtatgaatgtctacgtgttgctaacgaagtcactcttaattaatatctgtatcctggaacaatattttatggttatgtttttctgtgtgtcagttttcatagtatccatattttattactgtttattacttccatgaattttaaaatctgagggaaatgttttgtaaacatttattttttttaaagaaaagatgaaaggcaggcctatttcatcacaagaacacacacatatacacgaatagacatcaaactcaatgctttatttgtaaatttagtgtttttttatttctactgtcaaatgatgtgcaaaaccttttactggttgcatggaaatcagccaagttttataatccttaaatcttaatgttcctcaaagcttggattaaatacatatggatgttactctcttgcaccaaattatcttgatacattcaaatttgtctggttaaaaaataggtggtagatattgaggccaagaatattgcaaaatacatgaagcttcatgcacttaaagaagtatttttagaataagaatttgcatacttacctagtgaaacttttctagaattatttttcactctaagtcatgtatgtttctctttgattatttgcatgttatgtttaataagctactagcaaaataaaacatagcaaatggcatc

SEQ ID NO: 315825 - DNA, 760 bp, Homo sapiens
  misc_feature (37)..(37): n is a, c, g, or t
  misc_feature (43)..(43): n is a, c, g, or t
gcgacttagaggatcccctgattcggttgcactactncaaganagcatttgcgtttggatggcaatcgcatctcagaaaccagtcttccaccggatatgtatgaatgtctacgtgttgctaacgaagtcactcttaattaatatctgtatcctggaacaatattttatggttatgtttttctgtgtgtcagttttcatagtatccatattttattactgtttattacttccatgaattttaaaatctgagggaaatgttttgtaaacatttattttttttaaagaaaagatgaaaggcaggcctatttcatcacaagaacacacacatatacacgaatagacatcaaactcaatgctttatttgtaaatttagtgtttttttatttctactgtcaaatgatgtgcaaaaccttttactggttgcatggaaatcagccaagttttataatccttaaatcttaatgttcctcaaagcttggattaaatacatatggatgttactctcttgcaccaaattatcttgatacattcaaatttgtctggttaaaaaataggtggtagatattgaggccaagaatattgcaaaatacatgaagcttcatgcacttaaagaagtatttttagaataagaatttgcatacttacctagtgaaacttttctagaattatttttcactctaagtcatgtatgtttctctttgattatttgcatgttatgtttaataagctactagcaaaataaaacatagcaaatggcatc

SEQ ID NO: 315826 - DNA, 2097 bp, Homo sapiens
ggctgagcacattgcacttaattgttgccacagccacagatgtaaagaggcttgtaagaaaaatgttctcacagtgagcttccttatttgaagcaggactcaattcttggttaaaagctatggtatttgagctagttaaacacatatctctctcccattccatagggaatgagctgggctgtcctttctccccacgttcacctgcacttcgttagagagcagtgttcacatgccacaccacaagatccccacaatgacataactccattcagagactggcgtgactgggctgggtctccccaccccccccttcagctcttgtatcactcagaatctggcagccagttccgtcctgacagagttcacagcatatattggtggattcttgtccatagtgcatctgctttaagaattaacgaaagcagtgtcaagacagtaaggattcaaaccatttgccaaaaatgagtctaagtgcatttactctcttcctggcattgattggtggtaccagtggccagtactatgattatgattttcccctatcaatttatgggcaatcatcaccaaactgtgcaccagaatgtaactgccctgaaagctacccaagtgccatgtactgtgatgagctgaaattgaaaagtgtaccaatggtgcctcctggaatcaagtatctttaccttaggaataaccagattgaccatattgatgaaaaggcctttgagaatgtaactgatctgcagtggctcattctagatcacaaccttctagaaaactccaagataaaagggagagttttctctaaattgaaacaactgaagaagctgcatataaaccacaacaacctgacagagtctgtgggcccacttcccaaatctctggaggatctgcagcttactcataacaagatcacaaagctgggctcttttgaaggattggtaaacctgaccttcatccatctccagcacaatcggctgaaagaggatgctgtttcagctgcttttaaaggtcttaaatcactcgaataccttgacttgagcttcaatcagatagccagactgccttctggtctccctgtctctcttctaactctctacttagacaacaataagatcagcaacatccctgatgagtatttcaagcgttttaatgcattgcagtatctgcgtttatctcacaacgaactggctgatagtggaatacctggaaattctttcaatgtgtcatccctggttgagctggatctgtcctataacaagcttaaaaacataccaactgtcaatgaaaaccttgaaaactattacctggaggtcaatcaacttgagaagtttgacataaagagcttctgcaagatcctggggccattatcctactccaagatcaagcatttgcgtttggatggcaatcgcatctcagaaaccagtcttccaccggatatgtatgaatgtctacgtgttgctaacgaagtcactcttaattaatatctgtatcctggaacaatattttatggttatgtttttctgtgtgtcagttttcatagtatccatattttattactgtttattacttccatgaattttaaaatctgagggaaatgttttgtaaacatttattttttttaaagaaaagatgaaaggcaggcctatttcatcacaagaacacacacatatacacgaatagacatcaaactcaatgctttatttgtaaatttagtgtttttttatttctactgtcaaatgatgtgcaaaaccttttactggttgcatggaaatcagccaagttttataatccttaaatcttaatgttcctcaaagcttggattaaatacatatggatgttactctcttgcaccaaattatcttgatacattcaaatttgtctggttaaaaaataggtggtagatattgaggccaagaatattgcaaaatacatgaagcttcatgcacttaaagaagtatttttagaataagaatttgcatacttacctagtgaaacttttctagaattatttttcactctaagtcatgtatgtttctctttgattatttgcatgttatgtttaataagctactagcaaaataaaacatagcaaatggcatc

SEQ ID NO: 315827 - DNA, 1779 bp, Homo sapiens
aaaaaaaaaaaaaaaaaaaaaaaaaaaaaaaaaaaaaaaaaaaaaaaaaacatatattggtggattcttgtccatagtgcatctgctttaagaattaacgaaagcagtgtcaagacagtaaggattcaaaccatttgccaaaaatgagtctaagtgcatttactctcttcctggcattgattggtggtaccagtggccagtactatgattatgattttcccctatcaatttatgggcaatcatcaccaaactgtgcaccagaatgtaactgccctgaaagctacccaagtgccatgtactgtgatgagctgaaattgaaaagtgtaccaatggtgcctcctggaatcaagtatctttaccttaggaataaccagattgaccatattgatgaaaaggcctttgagaatgtaactgatctgcagtggctcattctagatcacaaccttctagaaaactccaagataaaagggagagttttctctaaattgaaacaactgaagaagctgcatataaaccacaacaacctgacagagtctgtgggcccacttcccaaatctctggaggatctgcagcttactcataacaagatcacaaagctgggctcttttgaaggattggtaaacctgaccttcatccatctccagcacaatcggctgaaagaggatgctgtttcagctgcttttaaaggtcttaaatcactcgaataccttgacttgagcttcaatcagatagccagactgccttctggtctccctgtctctcttctaactctctacttagacaacaataagatcagcaacatccctgatgagtatttcaagcgttttaatgcattgcagtatctgcgtttatctcacaacgaactggctgatagtggaatacctggaaattctttcaatgtgtcatccctggttgagctggatctgtcctataacaagcttaaaaacataccaactgtcaatgaaaaccttgaaaactattacctggaggtcaatcaacttgagaagtttgacataaagagcttctgcaagatcctggggccattatcctactccaagatcaagcatttgcgtttggatggcaatcgcatctcagaaaccagtcttccaccggatatgtatgaatgtctacgtgttgctaacgaagtcactcttaattaatatctgtatcctggaacaatattttatggttatgtttttctgtgtgtcagttttcatagtatccatattttattactgtttattacttccatgaattttaaaatctgagggaaatgttttgtaaacatttattttttttaaagaaaagatgaaaggcaggcctatttcatcacaagaacacacacatatacacgaatagacatcaaactcaatgctttatttgtaaatttagtgtttttttatttctactgtcaaatgatgtgcaaaaccttttactggttgcatggaaatcagccaagttttataatccttaaatcttaatgttcctcaaagcttggattaaatacatatggatgttactctcttgcaccaaattatcttgatacattcaaatttgtctggttaaaaaataggtggtagatattgaggccaagaatattgcaaaatacatgaagcttcatgcacttaaagaagtatttttagaataagaatttgcatacttacctagtgaaacttttctagaattatttttcactctaagtcatgtatgtttctctttgattatttgcatgttatgtttaataagctactagcaaaataaaacatagcaaatggcatc

SEQ ID NO: 315828 - DNA, 2190 bp, Homo sapiens
ggctgagcacattgcacttaattgttgccacagccacagatgtaaagaggcttgtaagaaaaatgttctcacagtgagcttccttatttgaagcaggactcaattcttggttaaaagctatggtatttgagctagttaaacacatatctctctcccattccatagggaatgagctgggctgtcctttctccccacgttcacctgcacttcgttagagagcagtgttcacatgccacaccacaagatccccacaatgacataactccattcagagactggcgtgactgggctgggtctccccaccccccccttcagctcttgtatcactcagaatctggcagccagttccgtcctgacagagttcacagcatatattggtggattcttgtccatagtgcatctgctttaagaattaacgaaagcagtgtcaagacagtaaggattcaaaccatttgccaaaaatgagtctaagtgcatttactctcttcctggcattgattggtggtaccagtggccagtactatgattatgattttcccctatcaatttatgggcaatcatcaccaaactgtgcaccagaatgtaactgccctgaaagctacccaagtgccatgtactgtgatgagctgaaattgaaaagtgtaccaatggtgcctcctggaatcaagtatctttaccttaggaataaccagattgaccatattgatgaaaaggcctttgagaatgtaactgatctgcagtggctcattctagatcacaaccttctagaaaactccaagataaaagggagagttttctctaaattgaaacaactgaagaagctgcatataaaccacaacaacctgacagagtctgtgggcccacttcccaaatctctggaggatctgcagcttactcataacaagatcacaaagctgggctcttttgaaggattggtaaacctgaccttcatccatctccagcacaatcggctgaaagaggatgctgtttcagctgcttttaaaggtcttaaatcactcgaataccttgacttgagcttcaatcagatagccagactgccttctggtctccctgtctctcttctaactctctacttagacaacaataagatcagcaacatccctgatgagtatttcaagcgttttaatgcattgcagtatctgcgtttatctcacaacgaactggctgatagtggaatacctggaaattctttcaatgtgtcatccctggttgagctggatctgtcctataacaagcttaaaaacataccaactgtcaatgaaaaccttgaaaactattacctggaggtcaatcaacttgagaagtttgacataaagagcttctgcaagatcctggggccattatcctactccaagatcaagcatttgcgtttggatggcaatcgcatctcagaaaccagtcttccaccggatatgtatgaatgtctacgtgttgctaacgaagtcactcttaattaatatctgtatcctggaacaatattttatggttatgtttttctgtgtgtcagttttcatagtatccatattttattactgtttattacttccatgaattttaaaatctgagggaaatgttttgtaaacatttattttttttaaagaaaagatgaaaggcaggcctatttcatcacaagaacacacacatatacacgaatagacatcaaactcaatgctttatttgtaaatttagtgtttttttatttctactgtcaaatgatgtgcaaaaccttttactggttgcatggaaatcagccaagttttataatccttaaatcttaatgttcctcaaagcttggattaaatacatatggatgttactctcttgcaccaaattatcttgatacattcaaatttgtctggttaaaaaataggtggtagatattgaggccaagaatattgcaaaatacatgaagcttcatgcacttaaagaagtatttttagaataagaatttgcatacttacctagtgaaacttttctagaattatttttcactctaagtcatgtatgtttctctttgattatttgcatgttatgtttaataagctactagcaaaataaaacatagcaaatggcatcaaaaaaatttctgcaagtgtaaatgtgatgcagtttaacaaaacccattgttctgtacctatgaatagattttcaaaatgtcataaaaagtgc

SEQ ID NO: 315829 - DNA, 1910 bp, Homo sapiens
ggctgagcacattgcacttaattgttgccacagccacagatgtaaagaggcttgtaagaaaaatgttctcacagtgagcttccttatttgaagcaggactcaattcttggttaaaagctatggtatttgagctagttaaacacatatctctctcccattccatagggaatgagctgggctgtcctttctccccacgttcacctgcacttcgttagagagcagtgttcacatgccacaccacaagatccccacaatgacataactccattcagagactggcgtgactgggctgggtctccccaccccccccttcagctcttgtatcactcagaatctggcagccagttccgtcctgacagagttcacagcatatattggtggattcttgtccatagtgcatctgctttaagaattaacgaaagcagtgtcaagacagtaaggattcaaaccatttgccaaaaatgagtctaagtgcatttactctcttcctggcattgattggtggtaccagtggccagtactatgattatgattttcccctatcaatttatgggcaatcatcaccaaactgtgcaccagaatgtaactgccctgaaagctacccaagtgccatgtactgtgatgagctgaaattgaaaagtgtaccaatggtgcctcctggaatcaagtatctttaccttaggaataaccagattgaccatattgatgaaaaggcctttgagaatgtaactgatctgcagtggctcattctagatcacaaccttctagaaaactccaagataaaagggagagttttctctaaattgaaacaactgaagaagctgcatataaaccacaacaacctgacagagtctgtgggcccacttcccaaatctctggaggatctgcagcttactcataacaagatcacaaagctgggctcttttgaaggattggtaaacctgaccttcatccatctccagcacaatcggctgaaagaggatgctgtttcagctgcttttaaaggtcttaaatcactcgaataccttgacttgagcttcaatcagatagccagactgccttctggtctccctgtctctcttctaactctctacttagacaacaataagatcagcaacatccctgatgagtatttcaagcgttttaatgcattgcagtatctgcgtttatctcacaacgaactggctgatagtggaatacctggaaattctttcaatgtgtcatccctggttgagctggatctgtcctataacaagcttaaaaacataccaactgtcaatgaaaaccttgaaaactattacctggaggtcaatcaacttgagaagtttgacataaagagcttctgcaagatcctggggccattatcctactccaagatcaagcatttgcgtttggatggcaatcgcatctcagaaaccagtcttccaccggatatgtatgaatgtctacgtgttgctaacgaagtcactcttaattaatatctgtatcctggaacaatattttatggttatgtttttctgtgtgtcagttttcatagtatccatattttattactgtttattacttccatgaattttaaaatctgagggaaatgttttgtaaacatttattttttttaaagaaaagatgaaaggcaggcctatttcatcacaagaacacacacatatacacgaatagacatcaaactcaatgctttatttgtaaatttagtgtttttttatttctactgtcaaatgatgtgcaaaaccttttactggttgcatggaaatcagccaagttttataatccttaaatcttaatgttcctgtgggtaataaatggggtgctctggccattttgatattcaatggggtacaagggcggttggcgcaatgggaataggagggaaaattaaaaaggagtcgggtaaa

SEQ ID NO: 315830 - DNA, 1974 bp, Homo sapiens
  misc_feature (1808)..(1808): n is a, c, g, or t
  misc_feature (1812)..(1812): n is a, c, g, or t
  misc_feature (1820)..(1820): n is a, c, g, or t
  misc_feature (1833)..(1836): n is a, c, g, or t
  misc_feature (1849)..(1849): n is a, c, g, or t
  misc_feature (1852)..(1852): n is a, c, g, or t
  misc_feature (1856)..(1856): n is a, c, g, or t
  misc_feature (1860)..(1860): n is a, c, g, or t
  misc_feature (1869)..(1869): n is a, c, g, or t
  misc_feature (1873)..(1873): n is a, c, g, or t
  misc_feature (1875)..(1875): n is a, c, g, or t
  misc_feature (1881)..(1881): n is a, c, g, or t
ggctgagcacattgcacttaattgttgccacagccacagatgtaaagaggcttgtaagaaaaatgttctcacagtgagcttccttatttgaagcaggactcaattcttggttaaaagctatggtatttgagctagttaaacacatatctctctcccattccatagggaatgagctgggctgtcctttctccccacgttcacctgcacttcgttagagagcagtgttcacatgccacaccacaagatccccacaatgacataactccattcagagactggcgtgactgggctgggtctccccaccccccccttcagctcttgtatcactcagaatctggcagccagttccgtcctgacagagttcacagcatatattggtggattcttgtccatagtgcatctgctttaagaattaacgaaagcagtgtcaagacagtaaggattcaaaccatttgccaaaaatgagtctaagtgcatttactctcttcctggcattgattggtggtaccagtggccagtactatgattatgattttcccctatcaatttatgggcaatcatcaccaaactgtgcaccagaatgtaactgccctgaaagctacccaagtgccatgtactgtgatgagctgaaattgaaaagtgtaccaatggtgcctcctggaatcaagtatctttaccttaggaataaccagattgaccatattgatgaaaaggcctttgagaatgtaactgatctgcagtggctcattctagatcacaaccttctagaaaactccaagataaaagggagagttttctctaaattgaaacaactgaagaagctgcatataaaccacaacaacctgacagagtctgtgggcccacttcccaaatctctggaggatctgcagcttactcataacaagatcacaaagctgggctcttttgaaggattggtaaacctgaccttcatccatctccagcacaatcggctgaaagaggatgctgtttcagctgcttttaaaggtcttaaatcactcgaataccttgacttgagcttcaatcagatagccagactgccttctggtctccctgtctctcttctaactctctacttagacaacaataagatcagcaacatccctgatgagtatttcaagcgttttaatgcattgcagtatctgcgtttatctcacaacgaactggctgatagtggaatacctggaaattctttcaatgtgtcatccctggttgagctggatctgtcctataacaagcttaaaaacataccaactgtcaatgaaaaccttgaaaactattacctggaggtcaatcaacttgagaagtttgacataaagagcttctgcaagatcctggggccattatcctactccaagatcaagcatttgcgtttggatggcaatcgcatctcagaaaccagtcttccaccggatatgtatgaatgtctacgtgttgctaacgaagtcactcttaattaatatctgtatcctggaacaatattttatggttatgtttttctgtgtgtcagttttcatagtatccatattttattactgtttattacttccatgaattttaaaatctgagggaaatgttttgtaaacatttattttttttaaagaaaagatgaaaggcaggcctatttcatcacaagaacacacacatatacacgaatagacatcaaactcaatgctttatttgtaaatttagtgtttttttatttctactgtcaaatgatgtgcaaaaccttttactggttgcatggaaatcagccaagttttataatccttaaatcttaatgttcctangtcncaaagtgnttaattcttggtnnnnctctggccaattntgnactnaatngtggtaaangggnanttgggnattgatagagatgctagagttagaagatggtacggagtagattaaacgtttgttgtgttgaaaaagggaaaaaggcatagggaatattatagc

SEQ ID NO: 315831 - DNA, 1735 bp, Homo sapiens
tatcatagaggagtccatagcgagctcgtagtatcatagattacgccaccgcaccgaaagcagtgtcaagacagtaaggattcaaaccatttgccaaaaatgagtctaagtgcatttactctcttcctggcattgattggtggtaccagtggccagtactatgattatgattttcccctatcaatttatgggcaatcatcaccaaactgtgcaccagaatgtaactgccctgaaagctacccaagtgccatgtactgtgatgagctgaaattgaaaagtgtaccaatggtgcctcctggaatcaagtatctttaccttaggaataaccagattgaccatattgatgaaaaggcctttgagaatgtaactgatctgcagtggctcattctagatcacaaccttctagaaaactccaagataaaagggagagttttctctaaattgaaacaactgaagaagctgcatataaaccacaacaacctgacagagtctgtgggcccacttcccaaatctctggaggatctgcagcttactcataacaagatcacaaagctgggctcttttgaaggattggtaaacctgaccttcatccatctccagcacaatcggctgaaagaggatgctgtttcagctgcttttaaaggtcttaaatcactcgaataccttgacttgagcttcaatcagatagccagactgccttctggtctccctgtctctcttctaactctctacttagacaacaataagatcagcaacatccctgatgagtatttcaagcgttttaatgcattgcagtatctgcgtttatctcacaacgaactggctgatagtggaatacctggaaattctttcaatgtgtcatccctggttgagctggatctgtcctataacaagcttaaaaacataccaactgtcaatgaaaaccttgaaaactattacctggaggtcaatcaacttgagaagtttgacataaagagcttctgcaagatcctggggccattatcctactccaagatcaagcatttgcgtttggatggcaatcgcatctcagaaaccagtcttccaccggatatgtatgaatgtctacgtgttgctaacgaagtcactcttaattaatatctgtatcctggaacaatattttatggttatgtttttctgtgtgtcagttttcatagtatccatattttattactgtttattacttccatgaattttaaaatctgagggaaatgttttgtaaacatttattttttttaaagaaaagatgaaaggcaggcctatttcatcacaagaacacacacatatacacgaatagacatcaaactcaatgctttatttgtaaatttagtgtttttttatttctactgtcaaatgatgtgcaaaaccttttactggttgcatggaaatcagccaagttttataatccttaaatcttaatgttcctcaaagcttggattaaatacatatggatgttactctcttgcaccaaattatcttgatacattcaaatttgtctggttaaaaaataggtggtagatattgaggccaagaatattgcaaaatacatgaagcttcatgcacttaaagaagtatttttagaataagaatttgcatacttacctagtgaaacttttctagaattatttttcactctaagtcatgtatgtttctctttgattatttgcatgttatgtttaataagctactagcaaaataaaacatagcaaatggcatc

SEQ ID NO: 315832 - DNA, 2038 bp, Homo sapiens
ggctgagcacattgcacttaattgttgccacagccacagatgtaaagaggcttgtaagaaaaatgttctcacagtgagcttccttatttgaagcaggactcaattcttggttaaaagctatggtatttgagctagttaaacacatatctctctcccattccatagggaatgagctgggctgtcctttctccccacgttcacctgcacttcgttagagagcagtgttcacatgccacaccacaagatccccacaatgacataactccattcagagactggcgtgactgggctgggtctccccaccccccccttcagctcttgtatcactcagaatctggcagccagttccgtcctgacagagttcacagcatatattggtggattcttgtccatagtgcatctgctttaagaattaacgaaagcagtgtcaagacagtaaggattcaaaccatttgccaaaaatgagtctaagtgcatttactctcttcctggcattgattggtggtaccagtggccagtactatgattatgattttcccctatcaatttatgggcaatcatcaccaaactgtgcaccagaatgtaactgccctgaaagctacccaagtgccatgtactgtgatgagctgaaattgaaaagtgtaccaatggtgcctcctggaatcaagtatctttaccttaggaataaccagattgaccatattgatgaaaaggcctttgagaatgtaactgatctgcagtggctcattctagatcacaaccttctagaaaactccaagatacctgacagagtctgtgggcccacttcccaaatctctggaggatctgcagcttactcataacaagatcacaaagctgggctcttttgaaggattggtaaacctgaccttcatccatctccagcacaatcggctgaaagaggatgctgtttcagctgcttttaaaggtcttaaatcactcgaataccttgacttgagcttcaatcagatagccagactgccttctggtctccctgtctctcttctaactctctacttagacaacaataagatcagcaacatccctgatgagtatttcaagcgttttaatgcattgcagtatctgcgtttatctcacaacgaactggctgatagtggaatacctggaaattctttcaatgtgtcatccctggttgagctggatctgtcctataacaagcttaaaaacataccaactgtcaatgaaaaccttgaaaactattacctggaggtcaatcaacttgagaagtttgacataaagagcttctgcaagatcctggggccattatcctactccaagatcaagcatttgcgtttggatggcaatcgcatctcagaaaccagtcttccaccggatatgtatgaatgtctacgtgttgctaacgaagtcactcttaattaatatctgtatcctggaacaatattttatggttatgtttttctgtgtgtcagttttcatagtatccatattttattactgtttattacttccatgaattttaaaatctgagggaaatgttttgtaaacatttattttttttaaagaaaagatgaaaggcaggcctatttcatcacaagaacacacacatatacacgaatagacatcaaactcaatgctttatttgtaaatttagtgtttttttatttctactgtcaaatgatgtgcaaaaccttttactggttgcatggaaatcagccaagttttataatccttaaatcttaatgttcctcaaagcttggattaaatacatatggatgttactctcttgcaccaaattatcttgatacattcaaatttgtctggttaaaaaataggtggtagatattgaggccaagaatattgcaaaatacatgaagcttcatgcacttaaagaagtatttttagaataagaatttgcatacttacctagtgaaacttttctagaattatttttcactctaagtcatgtatgtttctctttgattatttgcatgttatgtttaataagctactagcaaaataaaacatagcaaatggcatc

SEQ ID NO: 315833 - DNA, 1048 bp, Homo sapiens
agcttattacagccaatacgttttgcacagccctggccctgctatggtaagtgtccgtgttcatctctgataccctatgagatccttggtgcattacttgtgcttgctttctctgcgttatccctggcccgggcgtggaatcctgatccgttatatgcaaacgacatattccaagaactgttacgctaccttgatcggtctagtaaacatcgcgtttcatatcattactatgagccgttgccagagtcgaagtctacagcattgtcgaaagtttagtttgacataaagagcttctgcaagatcctggggccattatcctactccaagatcaagcatttgcgtttggatggcaatcgcatctcagaaaccagtcttccaccggatatgtatgaatgtctacgtgttgctaacgaagtcactcttaattaatatctgtatcctggaacaatattttatggttatgtttttctgtgtgtcagttttcatagtatccatattttattactgtttattacttccatgaattttaaaatctgagggaaatgttttgtaaacatttattttttttaaagaaaagatgaaaggcaggcctatttcatcacaagaacacacacatatacacgaatagacatcaaactcaatgctttatttgtaaatttagtgtttttttatttctactgtcaaatgatgtgcaaaaccttttactggttgcatggaaatcagccaagttttataatccttaaatcttaatgttcctcaaagcttggattaaatacatatggatgttactctcttgcaccaaattatcttgatacattcaaatttgtctggttaaaaaataggtggtagatattgaggccaagaatattgcaaaatacatgaagcttcatgcacttaaagaagtatttttagaataagaatttgcatacttacctagtgaaacttttctagaattatttttcactctaagtcatgtatgtttctctttgattatttgcatgttatgtttaataagctactagcaaaataaaacatagcaaatggcatc

SEQ ID NO: 315834 - DNA, 5541 bp, Homo sapiens
taagtaactgggcctctagttacaatttcccccatttttcagaagcaggagctcagcgtaggtaggtggcctgtctgaagttcacaggtcaatctgcagtcgcctccgcagcccgtccgctttaattttatgtccgcgccgggttttccaaggcggccccgggggcaggctctggtccggtggccgagactccggcgccagggtttgggcggcgccgcggccggctccggcgggcgggcaggcgggcggggccagtcggggcggggcgggcgtggggagggaagttgtggaagttaggggagacgcccgaccgcccgccccggcctcgcctgcggccgctccctccgcctcctccccgccccgagccccagtcagcccgtcttccttcccctcccttgcatgatggaaacaccatggctgcggcggcccagctctctctgacacagttatcaagtgggaatcctgtatatgaaaaatactatagacaggttgatacaggcaatactggaagggtgttggcttctgatgctgctgctttcctgaaaaaatcagggcttccagacttgatacttggaaagatttgggatttagccgacacagatggcaaaggtatcctgaacaaacaagaattctttgttgctttgcgtcttgtggcatgtgcccagaatggattggaagtttcactaagtagtttgaacctggctgttcctccaccaagatttcatgataccagtagtcctttgctaatcagtggaacctctgcagctgagctcccatgggctgtaaaacctgaagataaggccaaatatgatgcaatatttgatagtttaagcccagtgaatggatttctgtctggtgataaagtgaaaccagtgttgctcaactctaagttacctgtggatatccttggaagagtttgggagttgagtgatattgaccatgatggaatgcttgacagagatgagtttgcagttgccatgtttttggtatactgtgcactggagaaagaacctgtgccaatgtccttgcctccagccttggtgccaccatctaagagaaaaacgtgggttgtatcccctgcagaaaaagctaaatatgatgaaatcttcctgaaaactgataaagatatggacggatttgtgtctggattggaggtccgtgaaatattcttgaaaacaggtttaccttctaccttactagcccatatatggtcattatgcgacacaaaggactgtgggaagctttcaaaggatcagtttgccttggcttttcacttaatcagtcagaagttaatcaagggcattgatcctcctcacgttcttactcctgaaatgattccaccatcagacagggccagtttacaaaagaacatcataggatcaagtcctgttgcagatttctctgctattaaggaactagatactcttaacaatgaaatagttgacctacagagggaaaagaataatgtggaacaggaccttaaggagaaggaagatactattaaacagaggacaagtgaggttcaggatcttcaagatgaagttcaaagggagaatactaatctgcaaaaactacaggcccagaaacagcaggtacaggaactccttgatgaactggatgagcagaaagcccagctggaggagcaactcaaggaagtcagaaagaaatgtgctgaggaggcccaactgatctcttctctgaaagctgaattaactagtcaggaatcgcagatctccacttatgaagaagaattggcaaaagctagagaagagctgagccgtctacagcaagaaacagcagaattggaggagagtgtagagtcagggaaggctcagttggaacctcttcagcagcacctacaagattcacaacaggaaattagttcaatgcaaatgaaactgatggaaatgaaagatttggaaaatcataatagtcagttaaattggtgcagtagcccacacagcattcttgtaaacggagctacagattattgcagcctcagcaccagcagcagtgaaacagccaaccttaatgaacatgttgaaggccagagcaacctagagtctgagcccatacaccaggaatctccagcaagaagtagtcctgaactactgccttctggtgtgactgatgaaaatgaggtgactacagctgttactgaaaaagtttgttctgaactcgacaataatagacattcaaaagaggaagatccatttaatgtagactcaagttcgctgacaggtccagttgcagatacaaacttggattttttccagtctgatccttttgttggcagtgatcctttcaaggatgatccttttggaaaaatcgatccatttggtggtgatcctttcaaaggttcagatccatttgcatcagactgtttcttcaggcaatctactgatccttttgccacttcaagcactgaccctttcagtgcagccaacaatagcagtattacatcggtagaaacgttgaagcacaatgatccttttgctcctggtggaacagttgttgcagcaagcgattcagccacagacccctttgcttctgtttttgggaatgaatcatttggaggtggatttgctgacttcagcacattgtcaaaggtcaacaatgaagatccttttcgttcagccacatcgagctctgtcagcaacgtagtgattacaaaaaatgtatttgaggaaacatcggtcaaaagtgaagatgaacccccagcactgccaccaaagatcggaactccaacaagaccctgccctctaccacctgggaaaagatccatcaacaaattggattctcctgatccctttaaactgaatgatccatttcagcctttcccaggcaacgatagccccaaagaaaaagatcctgaaatattttgtgatccattcacttctgctactaccactaccaataaagaggctgatccaagcaattttgccaacttcagtgcttatccctctgaagaagatatgatcgaatgggccaagagggaaagtgagagagaggaagagcagaggcttgcccgactaaatcagcaggaacaagaagacttagaactggctattgcactcagcaaatctgagatatcagaagcatgaagaattctcttgttctttggcaacaatatagtattcttcttcctgaatactgaaactatttacaatgtgtatcaaaactacctgtgagcatgggaatacaaaaggtttgagattcctgtaaatgtgacaaaattttaggattttttttttttcttcattacagattcgtctttttttttttttcttataaaagccgtaacccagtcagacaaattcaccttcacttaggcccctgttctggtatacatttactgtgagcttttgcctgcctgtgctattttacttgtaaagctagagcacccaagcttctgccttctggaatatagagaaatagtttcaccctgcactaccctgttctgtagttattctgatgatagccagtgaggttcttaaagtttgcagtattctcccctgattggaatggttgagtgagggtaagggaaagaatatcttatttcttttatgattggtgcaaattggctaaagtgcatttttaaatttcctctacttaatttgtttttcagagataaggaaaaatattttgcacagatttactccactatggaaaagggatgctgtaggttgaaccattatagcctcagattcgatcttttcctaactaaaaatattaaagcctcatgtgtgaaataaatttttaaaaagatttatctggatttagagaattttagatcaacagatacctctcagtgtgtttgctaattaataaaaatcagtttcttacaaataaagtttgtaagaaaatgttcattttaagtgatagatagtggagaaaatttatcacctaaaatatacccatcagtataaggcaagcaaaagtcttaacatggcagccattctgcctttgccgtggccctgtcctgtttagttcttagtgggttaatttttgtacttttgcagaagaaacttcagcaagctagaactggaaggtactttaatttttcatatatatttgtttttttttttttaatgaaggctcatttacttgaaatgtaaaaactttcactgaatacaaatagaaaaagtgatgtgttttatatcatattgctttttgtccatctttgtggtttagtttatttactcacttcatgtttttcacctataaaattgtcaagctagcaaaaaaactcttgtttttttaattgggagagaagagacctgccagattatcagacctcttcatgttaaaagaccatctcctgtaaaactgacctagtggacaagctgaatttgaaatagactgtgaagtaagctgtaacttgtcattttaattttgtttaacacggttactgacttagatgatgtattaaataccaagataaagaaaaatgcacctaaaatctaattagaattctctgggtcaacaagtcaaggtggtattgatctgtgttaatctgagtaacttattgcctagcctataaataaattccaaaatatccaattcatttcttcttgaaatggtgcttgttttgttttctttccattacacaattagactcctacagtttaaaacaaactttaaaccactatcttgcactgctaacttttttctacctttgtaaatagaaacatttctgcataaaagtcatacatatgaagcaagggctgaatcataatcacaaggcttaattttgataaacgaatccagtgacctaaggattttctgcaaaatttgactgggagttgtgataggtggtatttttgtttattttcttcctcttactccttaggataaaggtaagttgacttgaacaactttcttttgcactgggaaaataagcaaatgtttaaatgcttcaaaaaaattttcaattaaactcaaatattaaatatctataacttataaacaccaactttcaatgtaataaatgtatcctaatcttatgtatgtttaactggattacatagatttttatcttttgttaaaatgtgtataccccgtggaccaacataatattaaagtatgtatatattatataaatatatatgtatatgtgctcgcttgtgtaggatgaatgtcttagagtcgtttgtggtattttatgttgttgactctggctccagggcctgtgcttgaaaaggacagataagtattgcccagagctaagtggcactacttacaaagttttaaatgtcttctacatactgattcatgtttatttgagctctctttatagaattttctcttaaagtttcaaacctctaagttgtagcctgtaattatgagaacagtaaactttaagtaataataaagaatcccatccatatatccaatttgcaattgagttttgcatggttctctgattatgtccatgctgtgtccaaggaggagtaggtacatacaatcagcacagattaatatatgtaaagggtttgggacagcacctggtatagaataaataataaatgtaaactatta

SEQ ID NO: 315835 - DNA, 4324 bp, Homo sapiens
atctatcctcttttcaccacattttagtgagaaagcaattttttttttacaaatggagcttatattgatttttatttcataaataattgaaagagggtagaaaaatctgcccttcatttaaaaattgaatgtttcactatgtatttaaaaagcgattcaggattaggaggatggataaccataccagctgtagctgatgttctaaaatattcttgcattgtttgctggtcttctagggaaaagaataatgtggaacaggaccttaaggagaaggaagatactattaaacagaggacaagtgaggttcaggatcttcaagatgaagttcaaagggagaatactaatctgcaaaaactacaggcccagaaacagcaggtacaggaactccttgatgaactggatgagcagaaagcccagctggaggagcaactcaaggaagtcagaaagaaatgtgctgaggaggcccaactgatctcttctctgaaagctgaattaactagtcaggaatcgcagatctccacttatgaagaagaattggcaaaagctagagaagagctgagccgtctacagcaagaaacagcagaattggaggagagtgtagagtcagggaaggctcagttggaacctcttcagcagcacctacaagattcacaacaggaaattagttcaatgcaaatgaaactgatggaaatgaaagatttggaaaatcataatagtcagttaaattggtgcagtagcccacacagcattcttgtaaacggagctacagattattgcagcctcagcaccagcagcagtgaaacagccaaccttaatgaacatgttgaaggccagagcaacctagagtctgagcccatacaccaggaatctccagcaagaagtagtcctgaactactgccttctggtgtgactgatgaaaatgaggtgactacagctgttactgaaaaagtttgttctgaactcgacaataatagacattcaaaagaggaagatccatttaatgtagactcaagttcgctgacaggtccagttgcagatacaaacttggattttttccagtctgatccttttgttggcagtgatcctttcaaggatgatccttttggaaaaatcgatccatttggtggtgatcctttcaaaggttcagatccatttgcatcagactgtttcttcaggcaatctactgatccttttgccacttcaagcactgaccctttcagtgcagccaacaatagcagtattacatcggtagaaacgttgaagcacaatgatccttttgctcctggtggaacagttgttgcagcaagcgattcagccacagacccctttgcttctgtttttgggaatgaatcatttggaggtggatttgctgacttcagcacattgtcaaaggtcaacaatgaagatccttttcgttcagccacatcgagctctgtcagcaacgtagtgattacaaaaaatgtatttgaggaaacatcggtcaaaagtgaagatgaacccccagcactgccaccaaagatcggaactccaacaagaccctgccctctaccacctgggaaaagatccatcaacaaattggattctcctgatccctttaaactgaatgatccatttcagcctttcccaggcaacgatagccccaaagaaaaagatcctgaaatattttgtgatccattcacttctgctactaccactaccaataaagaggctgatccaagcaattttgccaacttcagtgcttatccctctgaagaagatatgatcgaatgggccaagagggaaagtgagagagaggaagagcagaggcttgcccgactaaatcagcaggaacaagaagacttagaactggctattgcactcagcaaatctgagatatcagaagcatgaagaattctcttgttctttggcaacaatatagtattcttcttcctgaatactgaaactatttacaatgtgtatcaaaactacctgtgagcatgggaatacaaaaggtttgagattcctgtaaatgtgacaaaattttaggattttttttttttcttcattacagattcgtctttttttttttttcttataaaagccgtaacccagtcagacaaattcaccttcacttaggcccctgttctggtatacatttactgtgagcttttgcctgcctgtgctattttacttgtaaagctagagcacccaagcttctgccttctggaatatagagaaatagtttcaccctgcactaccctgttctgtagttattctgatgatagccagtgaggttcttaaagtttgcagtattctcccctgattggaatggttgagtgagggtaagggaaagaatatcttatttcttttatgattggtgcaaattggctaaagtgcatttttaaatttcctctacttaatttgtttttcagagataaggaaaaatattttgcacagatttactccactatggaaaagggatgctgtaggttgaaccattatagcctcagattcgatcttttcctaactaaaaatattaaagcctcatgtgtgaaataaatttttaaaaagatttatctggatttagagaattttagatcaacagatacctctcagtgtgtttgctaattaataaaaatcagtttcttacaaataaagtttgtaagaaaatgttcattttaagtgatagatagtggagaaaatttatcacctaaaatatacccatcagtataaggcaagcaaaagtcttaacatggcagccattctgcctttgccgtggccctgtcctgtttagttcttagtgggttaatttttgtacttttgcagaagaaacttcagcaagctagaactggaaggtactttaatttttcatatatatttgtttttttttttttaatgaaggctcatttacttgaaatgtaaaaactttcactgaatacaaatagaaaaagtgatgtgttttatatcatattgctttttgtccatctttgtggtttagtttatttactcacttcatgtttttcacctataaaattgtcaagctagcaaaaaaactcttgtttttttaattgggagagaagagacctgccagattatcagacctcttcatgttaaaagaccatctcctgtaaaactgacctagtggacaagctgaatttgaaatagactgtgaagtaagctgtaacttgtcattttaattttgtttaacacggttactgacttagatgatgtattaaataccaagataaagaaaaatgcacctaaaatctaattagaattctctgggtcaacaagtcaaggtggtattgatctgtgttaatctgagtaacttattgcctagcctataaataaattccaaaatatccaattcatttcttcttgaaatggtgcttgttttgttttctttccattacacaattagactcctacagtttaaaacaaactttaaaccactatcttgcactgctaacttttttctacctttgtaaatagaaacatttctgcataaaagtcatacatatgaagcaagggctgaatcataatcacaaggcttaattttgataaacgaatccagtgacctaaggattttctgcaaaatttgactgggagttgtgataggtggtatttttgtttattttcttcctcttactccttaggataaaggtaagttgacttgaacaactttcttttgcactgggaaaataagcaaatgtttaaatgcttcaaaaaaattttcaattaaactcaaatattaaatatctataacttataaacaccaactttcaatgtaataaatgtatcctaatcttatgtatgtttaactggattacatagatttttatcttttgttaaaatgtgtataccccgtggaccaacataatattaaagtatgtatatattatataaatatatatgtatatgtgctcgcttgtgtaggatgaatgtcttagagtcgtttgtggtattttatgttgttgactctggctccagggcctgtgcttgaaaaggacagataagtattgcccagagctaagtggcactacttacaaagttttaaatgtcttctacatactgattcatgtttatttgagctctctttatagaattttctcttaaagtttcaaacctctaagttgtagcctgtaattatgagaacagtaaactttaagtaataataaagaatcccatccatatatccaatttgcaattgagttttgcatggttctctgattatgtccatgctgtgtccaaggaggagtaggtacatacaatcagcacagattaatatatgtaaagggtttgggacagcacctggtatagaataaataataaatgtaaactatta

SEQ ID NO: 315836 - DNA, 3946 bp, Homo sapiens
aaactaaacaaataaatgtattgcattttggaacattttaatgacatctcttcttttaatccccatttcttctcattcactttcacattatagatctcttctctgaaagctgaattaactagtcaggaatcgcagatctccacttatgaagaagaattggcaaaagctagagaagagctgagccgtctacagcaagaaacagcagaattggaggagagtgtagagtcagggaaggctcagttggaacctcttcagcagcacctacaagattcacaacaggaaattagttcaatgcaaatgaaactgatggaaatgaaagatttggaaaatcataatagtcagttaaattggtgcagtagcccacacagcattcttgtaaacggagctacagattattgcagcctcagcaccagcagcagtgaaacagccaaccttaatgaacatgttgaaggccagagcaacctagagtctgagcccatacaccaggaatctccagcaagaagtagtcctgaactactgccttctggtgtgactgatgaaaatgaggtgactacagctgttactgaaaaagtttgttctgaactcgacaataatagacattcaaaagaggaagatccatttaatgtagactcaagttcgctgacaggtccagttgcagatacaaacttggattttttccagtctgatccttttgttggcagtgatcctttcaaggatgatccttttggaaaaatcgatccatttggtggtgatcctttcaaaggttcagatccatttgcatcagactgtttcttcaggcaatctactgatccttttgccacttcaagcactgaccctttcagtgcagccaacaatagcagtattacatcggtagaaacgttgaagcacaatgatccttttgctcctggtggaacagttgttgcagcaagcgattcagccacagacccctttgcttctgtttttgggaatgaatcatttggaggtggatttgctgacttcagcacattgtcaaaggtcaacaatgaagatccttttcgttcagccacatcgagctctgtcagcaacgtagtgattacaaaaaatgtatttgaggaaacatcggtcaaaagtgaagatgaacccccagcactgccaccaaagatcggaactccaacaagaccctgccctctaccacctgggaaaagatccatcaacaaattggattctcctgatccctttaaactgaatgatccatttcagcctttcccaggcaacgatagccccaaagaaaaagatcctgaaatattttgtgatccattcacttctgctactaccactaccaataaagaggctgatccaagcaattttgccaacttcagtgcttatccctctgaagaagatatgatcgaatgggccaagagggaaagtgagagagaggaagagcagaggcttgcccgactaaatcagcaggaacaagaagacttagaactggctattgcactcagcaaatctgagatatcagaagcatgaagaattctcttgttctttggcaacaatatagtattcttcttcctgaatactgaaactatttacaatgtgtatcaaaactacctgtgagcatgggaatacaaaaggtttgagattcctgtaaatgtgacaaaattttaggattttttttttttcttcattacagattcgtctttttttttttttcttataaaagccgtaacccagtcagacaaattcaccttcacttaggcccctgttctggtatacatttactgtgagcttttgcctgcctgtgctattttacttgtaaagctagagcacccaagcttctgccttctggaatatagagaaatagtttcaccctgcactaccctgttctgtagttattctgatgatagccagtgaggttcttaaagtttgcagtattctcccctgattggaatggttgagtgagggtaagggaaagaatatcttatttcttttatgattggtgcaaattggctaaagtgcatttttaaatttcctctacttaatttgtttttcagagataaggaaaaatattttgcacagatttactccactatggaaaagggatgctgtaggttgaaccattatagcctcagattcgatcttttcctaactaaaaatattaaagcctcatgtgtgaaataaatttttaaaaagatttatctggatttagagaattttagatcaacagatacctctcagtgtgtttgctaattaataaaaatcagtttcttacaaataaagtttgtaagaaaatgttcattttaagtgatagatagtggagaaaatttatcacctaaaatatacccatcagtataaggcaagcaaaagtcttaacatggcagccattctgcctttgccgtggccctgtcctgtttagttcttagtgggttaatttttgtacttttgcagaagaaacttcagcaagctagaactggaaggtactttaatttttcatatatatttgtttttttttttttaatgaaggctcatttacttgaaatgtaaaaactttcactgaatacaaatagaaaaagtgatgtgttttatatcatattgctttttgtccatctttgtggtttagtttatttactcacttcatgtttttcacctataaaattgtcaagctagcaaaaaaactcttgtttttttaattgggagagaagagacctgccagattatcagacctcttcatgttaaaagaccatctcctgtaaaactgacctagtggacaagctgaatttgaaatagactgtgaagtaagctgtaacttgtcattttaattttgtttaacacggttactgacttagatgatgtattaaataccaagataaagaaaaatgcacctaaaatctaattagaattctctgggtcaacaagtcaaggtggtattgatctgtgttaatctgagtaacttattgcctagcctataaataaattccaaaatatccaattcatttcttcttgaaatggtgcttgttttgttttctttccattacacaattagactcctacagtttaaaacaaactttaaaccactatcttgcactgctaacttttttctacctttgtaaatagaaacatttctgcataaaagtcatacatatgaagcaagggctgaatcataatcacaaggcttaattttgataaacgaatccagtgacctaaggattttctgcaaaatttgactgggagttgtgataggtggtatttttgtttattttcttcctcttactccttaggataaaggtaagttgacttgaacaactttcttttgcactgggaaaataagcaaatgtttaaatgcttcaaaaaaattttcaattaaactcaaatattaaatatctataacttataaacaccaactttcaatgtaataaatgtatcctaatcttatgtatgtttaactggattacatagatttttatcttttgttaaaatgtgtataccccgtggaccaacataatattaaagtatgtatatattatataaatatatatgtatatgtgctcgcttgtgtaggatgaatgtcttagagtcgtttgtggtattttatgttgttgactctggctccagggcctgtgcttgaaaaggacagataagtattgcccagagctaagtggcactacttacaaagttttaaatgtcttctacatactgattcatgtttatttgagctctctttatagaattttctcttaaagtttcaaacctctaagttgtagcctgtaattatgagaacagtaaactttaagtaataataaagaatcccatccatatatccaatttgcaattgagttttgcatggttctctgattatgtccatgctgtgtccaaggaggagtaggtacatacaatcagcacagattaatatatgtaaagggtttgggacagcacctggtatagaataaataataaatgtaaactatta

SEQ ID NO: 315837 - DNA, 5487 bp, Homo sapiens
taagtaactgggcctctagttacaatttcccccatttttcagaagcaggagctcagcgtaggtaggtggcctgtctgaagttcacaggtcaatctgcagtcgcctccgcagcccgtccgctttaattttatgtccgcgccgggttttccaaggcggccccgggggcaggctctggtccggtggccgagactccggcgccagggtttgggcggcgccgcggccggctccggcgggcgggcaggcgggcggggccagtcggggcggggcgggcgtggggagggaagttgtggaagttaggggagacgcccgaccgcccgccccggcctcgcctgcggccgctccctccgcctcctccccgccccgagccccagtcagcccgtcttccttcccctcccttgcatgatggaaacaccatggctgcggcggcccagctctctctgacacagttatcaagtgggaatcctgtatatgaaaaatactatagacaggttgatacaggcaatactggaagggtgttggcttctgatgctgctgctttcctgaaaaaatcagggcttccagacttgatacttggaaagatttgggatttagccgacacagatggcaaaggtatcctgaacaaacaagaattctttgttgctttgcgtcttgtggcatgtgcccagaatggattggaagtttcactaagtagtttgaacctggctgttcctccaccaagatttcatgataccagtagtcctttgctaatcagtggaacctctgcagctgagctcccatgggctgtaaaacctgaagataaggccaaatatgatgcaatatttgatagtttaagcccagtgaatggatttctgtctggtgataaagtgaaaccagtgttgctcaactctaagttacctgtggatatccttggaagagtttgggagttgagtgatattgaccatgatggaatgcttgacagagatgagtttgcagttgccatgtttttggtatactgtgcactggagaaagaacctgtgccaatgtccttgcctccagccttggtgccaccatctaagagaaaaacgtgggttgtatcccctgcagaaaaagctaaatatgatgaaatcttcctgaaaactgataaagatatggacggatttgtgtctggattggaggtccgtgaaatattcttgaaaacaggtttaccttctaccttactagcccatatatggtcattatgcgacacaaaggactgtgggaagctttcaaaggatcagtttgccttggcttttcacttaatcagtcagaagttaatcaagggcattgatcctcctcacgttcttactcctgaaatgattccaccatcagacagggccagtttacaaaagaacatcataggatcaagtcctgttgcagatttctctgctattaaggaactagatactcttaacaatgaaatagttgacctacagagggaaaagaataatgtggaacaggaccttaaggagaaggaagatactattaaacagaggacaagtgaggttcaggatcttcaagatgaagttcaaagggagaatactaatctgcaaaaactacaggcccagaaacagcaggtacaggaactccttgatgaactggatgagcagaaagcccagctggaggagcaactcaaggaagtcagaaagaaatgtgctgaggaggcccaactgatctcttctctgaaagctgaattaactagtcaggaatcgcagatctccacttatgaagaagaattggcaaaagctagagaagagctgagccgtctacagcaagaaacagcagaattggaggagagtgtagagtcagggaaggctcagttggaacctcttcagcagcacctacaagattcacaacaggaaattagttcaatgcaaatgaaactgatggaaatgaaagatttggaaaatcataatagtcagttaaattggtgcagtagcccacacagcattcttgtaaacggagctacagattattgcagcctcagcaccagcagcagtgaaacagccaaccttaatgaacatgttgaaggccagagcaacctagagtctgagcccatacaccaggaatctccagcaagaagtagtcctgaactactgccttctggtgtgactgatgaaaatgaggtgactacagctgttactgaaaaagtttgttctgaactcgacaataatagacattcaaaagaggaagatccatttaatgtagactcaagttcgctgacaggtccagttgcagatacaaacttggattttttccagtctgatccttttgttggcagtgatcctttcaaggatgatccttttggaaaaatcgatccatttggtggtgatcctttcaaaggttcagatccatttgcatcagactgtttcttcaggcaatctactgatccttttgccacttcaagcactgaccctttcagtgcagccaacaatagcagtattacatcggtagaaacgttgaagcacaatgatccttttgctcctggtggaacagttgttgcagcaagcgattcagccacagacccctttgcttctgtttttgggaatgaatcatttggaggtggatttgctgacttcagcacattgtcaaaggtcaacaatgaagatccttttcgttcagccacatcgagctctgtcagcaacgtagtgattacaaaaaatgtatttgaggaaacatcggtcaaaagtgaagatgaacccccagcactgccaccaaagatcggaactccaacaagaccctgccctctaccacctgggaaaagatccatcaacaaattggattctcctgatccctttaaactgaatgatccatttcagcctttcccaggcaacgatagccccaaagaaaaagatcctgaaatattttgtgatccattcacttctgctactaccactaccaataaagaggctgatccaagcaattttgccaacttcagtgcttatccctctgaagaagatatgatcgaatgggccaagagggaaagtgagagagaggaagagcagaggcttgcccgactaaatcagcaggaacaagaagacttagaactggctattgcactcagcaaatctgagatatcagaagcatgaagaattctcttgttctttggcaacaatatagtattcttcttcctgaatactgaaactatttacaatgtgtatcaaaactacctgtgagcatgggaatacaaaaggtttgagattcctgtaaatgtgacaaaattttaggattttttttttttcttcattacagattcgtctttttttttttttcttataaaagccgtaacccagtcagacaaattcaccttcacttaggcccctgttctggtatacatttactgtgagcttttgcctgcctgtgctattttacttgtaaagctagagcacccaagcttctgccttctggaatatagagaaatagtttcaccctgcactaccctgttctgtagttattctgatgatagccagtgaggttcttaaagtttgcagtattctcccctgattggaatggttgagtgagggtaagggaaagaatatcttatttcttttatgattggtgcaaattggctaaagtgcatttttaaatttcctctacttaatttgtttttcagagataaggaaaaatattttgcacagatttactccactatggaaaagggatgctgtaggttgaaccattatagcctcagattcgatcttttcctaactaaaaatattaaagcctcatgtgtgaaataaatttttaaaaagatttatctggatttagagaattttagatcaacagatacctctcagtgtgtttgctaattaataaaaatcagtttcttacaaataaagtttgtaagaaaatgttcattttaagtgatagatagtggagaaaatttatcacctgcctttgccgtggccctgtcctgtttagttcttagtgggttaatttttgtacttttgcagaagaaacttcagcaagctagaactggaaggtactttaatttttcatatatatttgtttttttttttttaatgaaggctcatttacttgaaatgtaaaaactttcactgaatacaaatagaaaaagtgatgtgttttatatcatattgctttttgtccatctttgtggtttagtttatttactcacttcatgtttttcacctataaaattgtcaagctagcaaaaaaactcttgtttttttaattgggagagaagagacctgccagattatcagacctcttcatgttaaaagaccatctcctgtaaaactgacctagtggacaagctgaatttgaaatagactgtgaagtaagctgtaacttgtcattttaattttgtttaacacggttactgacttagatgatgtattaaataccaagataaagaaaaatgcacctaaaatctaattagaattctctgggtcaacaagtcaaggtggtattgatctgtgttaatctgagtaacttattgcctagcctataaataaattccaaaatatccaattcatttcttcttgaaatggtgcttgttttgttttctttccattacacaattagactcctacagtttaaaacaaactttaaaccactatcttgcactgctaacttttttctacctttgtaaatagaaacatttctgcataaaagtcatacatatgaagcaagggctgaatcataatcacaaggcttaattttgataaacgaatccagtgacctaaggattttctgcaaaatttgactgggagttgtgataggtggtatttttgtttattttcttcctcttactccttaggataaaggtaagttgacttgaacaactttcttttgcactgggaaaataagcaaatgtttaaatgcttcaaaaaaattttcaattaaactcaaatattaaatatctataacttataaacaccaactttcaatgtaataaatgtatcctaatcttatgtatgtttaactggattacatagatttttatcttttgttaaaatgtgtataccccgtggaccaacataatattaaagtatgtatatattatataaatatatatgtatatgtgctcgcttgtgtaggatgaatgtcttagagtcgtttgtggtattttatgttgttgactctggctccagggcctgtgcttgaaaaggacagataagtattgcccagagctaagtggcactacttacaaagttttaaatgtcttctacatactgattcatgtttatttgagctctctttatagaattttctcttaaagtttcaaacctctaagttgtagcctgtaattatgagaacagtaaactttaagtaataataaagaatcccatccatatatccaatttgcaattgagttttgcatggttctctgattatgtccatgctgtgtccaaggaggagtaggtacatacaatcagcacagattaatatatgtaaagggtttgggacagcacctggtatagaataaataataaatgtaaactatta

SEQ ID NO: 315838 - DNA, 3023 bp, Homo sapiens
gtgcctcaccctcccaagtagctgggattacaggcaccaccaccatgcccagctaatttttgtatttttagttgagagcgagttttgccatgttggccaagctggtctcgaactcctgacctcaggtgatccacctgcctcagcctccaaagtgctgggattacaggcatgagccaccacatctagcctagtggcatttttaacatttagttttatagactttctatctatagattgaattaattttttaaattaaactatagcttaataactggttaatattaaacatgttttcagggggaaaaaaaaaagaattaacaagtaaccagactatttccagagtccttcaggtgtccttttggtaaaaactatttttccttctttttacttgctttactcatttatttattcgtttgttcatcgatcttttaaatggcagtatccctctgaagaagatatgatcgaatgggccaagagggaaagtgagagagaggaagagcagaggcttgcccgactaaatcagcaggaacaagaagacttagaactggctattgcactcagcaaatctgagatatcagaagcatgaagaattctcttgttctttggcaacaatatagtattcttcttcctgaatactgaaactatttacaatgtgtatcaaaactacctgtgagcatgggaatacaaaaggtttgagattcctgtaaatgtgacaaaattttaggattttttttttttcttcattacagattcgtctttttttttttttcttataaaagccgtaacccagtcagacaaattcaccttcacttaggcccctgttctggtatacatttactgtgagcttttgcctgcctgtgctattttacttgtaaagctagagcacccaagcttctgccttctggaatatagagaaatagtttcaccctgcactaccctgttctgtagttattctgatgatagccagtgaggttcttaaagtttgcagtattctcccctgattggaatggttgagtgagggtaagggaaagaatatcttatttcttttatgattggtgcaaattggctaaagtgcatttttaaatttcctctacttaatttgtttttcagagataaggaaaaatattttgcacagatttactccactatggaaaagggatgctgtaggttgaaccattatagcctcagattcgatcttttcctaactaaaaatattaaagcctcatgtgtgaaataaatttttaaaaagatttatctggatttagagaattttagatcaacagatacctctcagtgtgtttgctaattaataaaaatcagtttcttacaaataaagtttgtaagaaaatgttcattttaagtgatagatagtggagaaaatttatcacctaaaatatacccatcagtataaggcaagcaaaagtcttaacatggcagccattctgcctttgccgtggccctgtcctgtttagttcttagtgggttaatttttgtacttttgcagaagaaacttcagcaagctagaactggaaggtactttaatttttcatatatatttgtttttttttttttaatgaaggctcatttacttgaaatgtaaaaactttcactgaatacaaatagaaaaagtgatgtgttttatatcatattgctttttgtccatctttgtggtttagtttatttactcacttcatgtttttcacctataaaattgtcaagctagcaaaaaaactcttgtttttttaattgggagagaagagacctgccagattatcagacctcttcatgttaaaagaccatctcctgtaaaactgacctagtggacaagctgaatttgaaatagactgtgaagtaagctgtaacttgtcattttaattttgtttaacacggttactgacttagatgatgtattaaataccaagataaagaaaaatgcacctaaaatctaattagaattctctgggtcaacaagtcaaggtggtattgatctgtgttaatctgagtaacttattgcctagcctataaataaattccaaaatatccaattcatttcttcttgaaatggtgcttgttttgttttctttccattacacaattagactcctacagtttaaaacaaactttaaaccactatcttgcactgctaacttttttctacctttgtaaatagaaacatttctgcataaaagtcatacatatgaagcaagggctgaatcataatcacaaggcttaattttgataaacgaatccagtgacctaaggattttctgcaaaatttgactgggagttgtgataggtggtatttttgtttattttcttcctcttactccttaggataaaggtaagttgacttgaacaactttcttttgcactgggaaaataagcaaatgtttaaatgcttcaaaaaaattttcaattaaactcaaatattaaatatctataacttataaacaccaactttcaatgtaataaatgtatcctaatcttatgtatgtttaactggattacatagatttttatcttttgttaaaatgtgtataccccgtggaccaacataatattaaagtatgtatatattatataaatatatatgtatatgtgctcgcttgtgtaggatgaatgtcttagagtcgtttgtggtattttatgttgttgactctggctccagggcctgtgcttgaaaaggacagataagtattgcccagagctaagtggcactacttacaaagttttaaatgtcttctacatactgattcatgtttatttgagctctctttatagaattttctcttaaagtttcaaacctctaagttgtagcctgtaattatgagaacagtaaactttaagtaataataaagaatcccatccatatatccaatttgcaattgagttttgcatggttctctgattatgtccatgctgtgtccaaggaggagtaggtacatacaatcagcacagattaatatatgtaaagggtttgggacagcacctggtatagaataaataataaatgtaaactatta

SEQ ID NO: 315839 - DNA, 2141 bp, Homo sapiens
cgagcggccgcccgggcaggtacgcgggagagaaatagtttcaccctgcactaccctgttctgtagttattctgatgatagccagtgaggttcttaaagtttgcagtattctcccctgattggaatggttgagtgagggtaagggaaagaatatcttatttcttttatgattggtgcaaattggctaaagtgcatttttaaatttcctctacttaatttgtttttcagagataaggaaaaatattttgcacagatttactccactatggaaaagggatgctgtaggttgaaccattatagcctcagattcgatcttttcctaactaaaaatattaaagcctcatgtgtgaaataaatttttaaaaagatttatctggatttagagaattttagatcaacagatacctctcagtgtgtttgctaattaataaaaatcagtttcttacaaataaagtttgtaagaaaatgttcattttaagtgatagatagtggagaaaatttatcacctaaaatatacccatcagtataaggcaagcaaaagtcttaacatggcagccattctgcctttgccgtggccctgtcctgtttagttcttagtgggttaatttttgtacttttgcagaagaaacttcagcaagctagaactggaaggtactttaatttttcatatatatttgtttttttttttttaatgaaggctcatttacttgaaatgtaaaaactttcactgaatacaaatagaaaaagtgatgtgttttatatcatattgctttttgtccatctttgtggtttagtttatttactcacttcatgtttttcacctataaaattgtcaagctagcaaaaaaactcttgtttttttaattgggagagaagagacctgccagattatcagacctcttcatgttaaaagaccatctcctgtaaaactgacctagtggacaagctgaatttgaaatagactgtgaagtaagctgtaacttgtcattttaattttgtttaacacggttactgacttagatgatgtattaaataccaagataaagaaaaatgcacctaaaatctaattagaattctctgggtcaacaagtcaaggtggtattgatctgtgttaatctgagtaacttattgcctagcctataaataaattccaaaatatccaattcatttcttcttgaaatggtgcttgttttgttttctttccattacacaattagactcctacagtttaaaacaaactttaaaccactatcttgcactgctaacttttttctacctttgtaaatagaaacatttctgcataaaagtcatacatatgaagcaagggctgaatcataatcacaaggcttaattttgataaacgaatccagtgacctaaggattttctgcaaaatttgactgggagttgtgataggtggtatttttgtttattttcttcctcttactccttaggataaaggtaagttgacttgaacaactttcttttgcactgggaaaataagcaaatgtttaaatgcttcaaaaaaattttcaattaaactcaaatattaaatatctataacttataaacaccaactttcaatgtaataaatgtatcctaatcttatgtatgtttaactggattacatagatttttatcttttgttaaaatgtgtataccccgtggaccaacataatattaaagtatgtatatattatataaatatatatgtatatgtgctcgcttgtgtaggatgaatgtcttagagtcgtttgtggtattttatgttgttgactctggctccagggcctgtgcttgaaaaggacagataagtattgcccagagctaagtggcactacttacaaagttttaaatgtcttctacatactgattcatgtttatttgagctctctttatagaattttctcttaaagtttcaaacctctaagttgtagcctgtaattatgagaacagtaaactttaagtaataataaagaatcccatccatatatccaatttgcaattgagttttgcatggttctctgattatgtccatgctgtgtccaaggaggagtaggtacatacaatcagcacagattaatatatgtaaagggtttgggacagcacctggtatagaataaataataaatgtaaactatta

SEQ ID NO: 315840 - DNA, 1424 bp, Homo sapiens
  misc_feature (37)..(37): n is a, c, g, or t
  misc_feature (50)..(50): n is a, c, g, or t
tttccgctacacaattatttgaacaacccgcctgtgntgtttattaaaangcaggcgtcgtcgaatccggatgtggttagttaaactcacttcatgtttttcacctataaaattgtcaagctagcaaaaaaactcttgtttttttaattgggagagaagagacctgccagattatcagacctcttcatgttaaaagaccatctcctgtaaaactgacctagtggacaagctgaatttgaaatagactgtgaagtaagctgtaacttgtcattttaattttgtttaacacggttactgacttagatgatgtattaaataccaagataaagaaaaatgcacctaaaatctaattagaattctctgggtcaacaagtcaaggtggtattgatctgtgttaatctgagtaacttattgcctagcctataaataaattccaaaatatccaattcatttcttcttgaaatggtgcttgttttgttttctttccattacacaattagactcctacagtttaaaacaaactttaaaccactatcttgcactgctaacttttttctacctttgtaaatagaaacatttctgcataaaagtcatacatatgaagcaagggctgaatcataatcacaaggcttaattttgataaacgaatccagtgacctaaggattttctgcaaaatttgactgggagttgtgataggtggtatttttgtttattttcttcctcttactccttaggataaaggtaagttgacttgaacaactttcttttgcactgggaaaataagcaaatgtttaaatgcttcaaaaaaattttcaattaaactcaaatattaaatatctataacttataaacaccaactttcaatgtaataaatgtatcctaatcttatgtatgtttaactggattacatagatttttatcttttgttaaaatgtgtataccccgtggaccaacataatattaaagtatgtatatattatataaatatatatgtatatgtgctcgcttgtgtaggatgaatgtcttagagtcgtttgtggtattttatgttgttgactctggctccagggcctgtgcttgaaaaggacagataagtattgcccagagctaagtggcactacttacaaagttttaaatgtcttctacatactgattcatgtttatttgagctctctttatagaattttctcttaaagtttcaaacctctaagttgtagcctgtaattatgagaacagtaaactttaagtaataataaagaatcccatccatatatccaatttgcaattgagttttgcatggttctctgattatgtccatgctgtgtccaaggaggagtaggtacatacaatcagcacagattaatatatgtaaagggtttgggacagcacctggtatagaataaataataaatgtaaactatta

SEQ ID NO: 315841 - DNA, 4191 bp, Homo sapiens
taagtaactgggcctctagttacaatttcccccatttttcagaagcaggagctcagcgtaggtaggtggcctgtctgaagttcacaggtcaatctgcagtcgcctccgcagcccgtccgctttaattttatgtccgcgccgggttttccaaggcggccccgggggcaggctctggtccggtggccgagactccggcgccagggtttgggcggcgccgcggccggctccggcgggcgggcaggcgggcggggccagtcggggcggggcgggcgtggggagggaagttgtggaagttaggggagacgcccgaccgcccgccccggcctcgcctgcggccgctccctccgcctcctccccgccccgagccccagtcagcccgtcttccttcccctcccttgcatgatggaaacaccatggctgcggcggcccagctctctctgacacagttatcaagtgggaatcctgtatatgaaaaatactatagacaggttgatacaggcaatactggaagggtgttggcttctgatgctgctgctttcctgaaaaaatcagggcttccagacttgatacttggaaagatttgggatttagccgacacagatggcaaaggtatcctgaacaaacaagaattctttgttgctttgcgtcttgtggcatgtgcccagaatggattggaagtttcactaagtagtttgaacctggctgttcctccaccaagatttcatgataccagtagtcctttgctaatcagtggaacctctgcagctgagctcccatgggctgtaaaacctgaagataaggccaaatatgatgcaatatttgatagtttaagcccagtgaatggatttctgtctggtgataaagtgaaaccagtgttgctcaactctaagttacctgtggatatccttggaagagtttgggagttgagtgatattgaccatgatggaatgcttgacagagatgagtttgcagttgccatgtttttggtatactgtgcactggagaaagaacctgtgccaatgtccttgcctccagccttggtgccaccatctaagagaaaaacgtgggttgtatcccctgcagaaaaagctaaatatgatgaaatcttcctgaaaactgataaagatatggacggatttgtgtctggattggaggtccgtgaaatattcttgaaaacaggtttaccttctaccttactagcccatatatggtcattatgcgacacaaaggactgtgggaagctttcaaaggatcagtttgccttggcttttcacttaatcagtcagaagttaatcaagggcattgatcctcctcacgttcttactcctgaaatgattccaccatcagacagggccagtttacaaaagaacatcataggatcaagtcctgttgcagatttctctgctattaaggaactagatactcttaacaatgaaatagttgacctacagagggaaaagaataatgtggaacaggaccttaaggagaaggaagatactattaaacagaggacaagtgaggttcaggatcttcaagatgaagttcaaagggagaatactaatctgcaaaaactacaggcccagaaacagcaggtacaggaactccttgatgaactggatgagcagaaagcccagctggaggagcaactcaaggaagtcagaaagaaatgtgctgaggaggcccaactgatctcttctctgaaagctgaattaactagtcaggaatcgcagatctccacttatgaagaagaattggcaaaagctagagaagagctgagccgtctacagcaagaaacagcagaattggaggagagtgtagagtcagggaaggctcagttggaacctcttcagcagcacctacaagattcacaacaggaaattagttcaatgcaaatgaaactgatggaaatgaaagatttggaaaatcataatagtcagttaaattggtgcagtagcccacacagcattcttgtaaacggagctacagattattgcagcctcagcaccagcagcagtgaaacagccaaccttaatgaacatgttgaaggccagagcaacctagagtctgagcccatacaccaggaatctccagcaagaagtagtcctgaactactgccttctggtgtgactgatgaaaatgaggtgactacagctgttactgaaaaagtttgttctgaactcgacaataatagacattcaaaagaggaagatccatttaatgtagactcaagttcgctgacaggtccagttgcagatacaaacttggattttttccagtctgatccttttgttggcagtgatcctttcaaggatgatccttttggaaaaatcgatccatttggtggtgatcctttcaaaggttcagatccatttgcatcagactgtttcttcaggcaatctactgatccttttgccacttcaagcactgaccctttcagtgcagccaacaatagcagtattacatcggtagaaacgttgaagcacaatgatccttttgctcctggtggaacagttgttgcagcaagcgattcagccacagacccctttgcttctgtttttgggaatgaatcatttggaggtggatttgctgacttcagcacattgtcaaaggtcaacaatgaagatccttttcgttcagccacatcgagctctgtcagcaacgtagtgattacaaaaaatgtatttgaggaaacatcggtcaaaagtgaagatgaacccccagcactgccaccaaagatcggaactccaacaagaccctgccctctaccacctgggaaaagatccatcaacaaattggattctcctgatccctttaaactgaatgatccatttcagcctttcccaggcaacgatagccccaaagaaaaagatcctgaaatattttgtgatccattcacttctgctactaccactaccaataaagaggctgatccaagcaattttgccaacttcagtgcttatccctctgaagaagatatgatcgaatgggccaagagggaaagtgagagagaggaagagcagaggcttgcccgactaaatcagcaggaacaagaagacttagaactggctattgcactcagcaaatctgagatatcagaagcatgaagaattctcttgttctttggcaacaatatagtattcttcttcctgaatactgaaactatttacaatgtgtatcaaaactacctgtgagcatgggaatacaaaaggtttgagattcctgtaaatgtgacaaaattttaggattttttttttttcttcattacagattcgtctttttttttttttcttataaaagccgtaacccagtcagacaaattcaccttcacttaggcccctgttctggtatacattttacctggtgagaccgctttaggcctggcctggtggctactttacacttggtaaaggtctaggaggcaccacaaggctttctggcctttcgggagaatattagagagagaatatcatgttctaccctctggaatctaacctctgggttctctgggtgatgtatatctcctgggatgagatagcgcctatgtgagaggtgtcttctcaaaacagtgtttccgcgcaggtatatttctccccgctctgagtatggagcaaatggggtctgagatgtgagaggcgtgtaacgggagaacaacagaacacctacctgcataaaagtctcgcgtctttacatctgacgatctgcgggcgtgcagcacacattctgcgtggcgcataaaagaggtgggcgcgtcttttccaaacaatctttcctccccttgctacaagcattaaaatctcggggcggcttctccacgaggagaagagacatctccatgggggacacaacaaatatatttctctgtcggggcccacaagcagtatttttatacctcctccccaatcttattggggcgacacacacgggggagtatgcgtctgtgcatagtgtttggggaccccccttttttaatccacgcctctcgcgcgaatattcccgggaatcactttatagaccccatacaacctctccacacaatcttatttccacagggggccatcccttgctgtgttgtgtgccgacacactctaaaaagctttcttcacagcacagaacagacatttctaccactcggggggaggattctcaacgaagaacaagctttcgtgagggcactcccacaagagagttaaa

SEQ ID NO: 315842 - DNA, 2904 bp, Homo sapiens
taagtaactgggcctctagttacaatttcccccatttttcagaagcaggagctcagcgtaggtaggtggcctgtctgaagttcacaggtcaatctgcagtcgcctccgcagcccgtccgctttaattttatgtccgcgccgggttttccaaggcggccccgggggcaggctctggtccggtggccgagactccggcgccagggtttgggcggcgccgcggccggctccggcgggcgggcaggcgggcggggccagtcggggcggggcgggcgtggggagggaagttgtggaagttaggggagacgcccgaccgcccgccccggcctcgcctgcggccgctccctccgcctcctccccgccccgagccccagtcagcccgtcttccttcccctcccttgcatgatggaaacaccatggctgcggcggcccagctctctctgacacagttatcaagtgggaatcctgtatatgaaaaatactatagacaggttgatacaggcaatactggaagggtgttggcttctgatgctgctgctttcctgaaaaaatcagggcttccagacttgatacttggaaagatttgggatttagccgacacagatggcaaaggtatcctgaacaaacaagaattctttgttgctttgcgtcttgtggcatgtgcccagaatggattggaagtttcactaagtagtttgaacctggctgttcctccaccaagatttcatgataccagtagtcctttgctaatcagtggaacctctgcagctgagctcccatgggctgtaaaacctgaagataaggccaaatatgatgcaatatttgatagtttaagcccagtgaatggatttctgtctggtgataaagtgaaaccagtgttgctcaactctaagttacctgtggatatccttggaagagtttgggagttgagtgatattgaccatgatggaatgcttgacagagatgagtttgcagttgccatgtttttggtatactgtgcactggagaaagaacctgtgccaatgtccttgcctccagccttggtgccaccatctaagagaaaaacgtgggttgtatcccctgcagaaaaagctaaatatgatgaaatcttcctgaaaactgataaagatatggacggatttgtgtctggattggaggtccgtgaaatattcttgaaaacaggtttaccttctaccttactagcccatatatggtcattatgcgacacaaaggactgtgggaagctttcaaaggatcagtttgccttggcttttcacttaatcagtcagaagttaatcaagggcattgatcctcctcacgttcttactcctgaaatgattccaccatcagacagggccagtttacaaaagaacatcataggatcaagtcctgttgcagatttctctgctattaaggaactagatactcttaacaatgaaatagttgacctacagagggaaaagaataatgtggaacaggaccttaaggagaaggaagatactattaaacagaggacaagtgaggttcaggatcttcaagatgaagttcaaagggagaatactaatctgcaaaaactacaggcccagaaacagcaggtacaggaactccttgatgaactggatgagcagaaagcccagctggaggagcaactcaaggaagtcagaaagaaatgtgctgaggaggcccaactgatctcttctctgaaagctgaattaactagtcaggaatcgcagatctccacttatgaagaagaattggcaaaagctagagaagagctgagccgtctacagcaagaaacagcagaattggaggagagtgtagagtcagggaaggctcagttggaacctcttcagcagcacctacaagattcacaacaggaaattagttcaatgcaaatgaaactgatggaaatgaaagatttggaaaatcataatagtcagttaaattggtgcagtagcccacacagcattcttgtaaacggagctacagattattgcagcctcagcaccagcagcagtgaaacagccaaccttaatgaacatgttgaaggccagagcaacctagagtctgagcccatacaccaggaatctccagcaagaagtagtcctgaactactgccttctggtgtgactgatgaaaatgaggtgactacagctgttactgaaaaagtttgttctgaactcgacaataatagacattcaaaagaggaagatccatttaatgtagactcaagttcgctgacaggtccagttgcagatacaaacttggattttttccagtctgatccttttgttggcagtgatcctttcaaggatgatccttttggaaaaatcgatccatttggtggtgatcctttcaaaggttcagatccatttgcatcagactgtttcttcaggcaatctactgatccttttgccacttcaagcactgaccctttcagtgcagccaacaatagcagtattacatcgtaatcctatgaggtttacgtaggttaagttgaggccaggtgtggtggctcccacctctaattccagcacttcaggaggccaaggcaggaggatcacttgaggtagaaacgttgaagcacaatgatccttttgctcctggtggaacagttgttgcagcaagcgattcaggtaaataaataatttatcaacttcattgaacattaaacattttttttaagattcttttttctttgtctctaaatatatttgtcctgttatttatagctttaaaattattgcataattatatccaatagtaatttaccaataataagcatttgtatatcactttctacttatctttcattctttcatttattattcatgttgaatattacactagaatatgaactctacccagtatcagtaaaccaataaaaatgttttgctttataaaatg

SEQ ID NO: 315843 - DNA, 1535 bp, Homo sapiens
taagtaactgggcctctagttacaatttcccccatttttcagaagcaggagctcagcgtaggtaggtggcctgtctgaagttcacaggtcaatctgcagtcgcctccgcagcccgtccgctttaattttatgtccgcgccgggttttccaaggcggccccgggggcaggctctggtccggtggccgagactccggcgccagggtttgggcggcgccgcggccggctccggcgggcgggcaggcgggcggggccagtcggggcggggcgggcgtggggagggaagttgtggaagttaggggagacgcccgaccgcccgccccggcctcgcctgcggccgctccctccgcctcctccccgccccgagccccagtcagcccgtcttccttcccctcccttgcatgatggaaacaccatggctgcggcggcccagctctctctgacacagttatcaagtgggaatcctgtatatgaaaaatactatagacaggttgatacaggcaatactggaagggtgttggcttctgatgctgctgctttcctgaaaaaatcagggcttccagacttgatacttggaaagatttgggatttagccgacacagatggcaaaggtatcctgaacaaacaagaattctttgttgctttgcgtcttgtggcatgtgcccagaatggattggaagtttcactaagtagtttgaacctggctgttcctccaccaagatttcatgataccagtagtcctttgctaatcagtggaacctctgcagctgagctcccatgggctgtaaaacctgaagataaggccaaatatgatgcaatatttgatagtttaagcccagtgaatggatttctgtctggtgataaagtgaaaccagtgttgctcaactctaagttacctgtggatatccttggaagagtttgggagttgagtgatattgaccatgatggaatgcttgacagagatgagtttgcagttgccatgtttttggtatactgtgcactggagaaagaacctgtgccaatgtccttgcctccagccttggtgccaccatctaagagaaaaacgtgggttgtatcccctgcagaaaaagctaaatatgatgaaatcttcctgaaaactgataaagatatggacggatttgtgtctggattggaggtccgtgaaatattcttgaaaacaggtttaccttctaccttactagcccatatatggtcattatgcgacacaaaggactgtgggaagctttcaaaggatcagtttgccttggcttttcacttaatcagtcagaagttaatcaagggcattgatcctcctcacgttcttactcctgaaatgattccaccatcagacagggccagtttacaaaagaacatcataggatcaagtcctgttgcagatttctctgctattaaggaactagatactcttaacaatgaaatagttgacctacagagggcacaagaataatgtgggacaggatcatgaaggtgccgggagataaatatgacaccgaggtaaaccgatagtttcaggtta

SEQ ID NO: 315844 - DNA, 4573 bp, Homo sapiens
taagtaactgggcctctagttacaatttcccccatttttcagaagcaggagctcagcgtaggtaggtggcctgtctgaagttcacaggtcaatctgcagtcgcctccgcagcccgtccgctttaattttatgtccgcgccgggttttccaaggcggccccgggggcaggctctggtccggtggccgagactccggcgccagggtttgggcggcgccgcggccggctccggcgggcgggcaggcgggcggggccagtcggggcggggcgggcgtggggagggaagttgtggaagttaggggagacgcccgaccgcccgccccggcctcgcctgcggccgctccctccgcctcctccccgccccgagccccagtcagcccgtcttccttcccctcccttgcatgatggaaacaccatggctgcggcggcccagctctctctgacacagttatcaagtgggaatcctgtatatgaaaaatactatagacaggttgatacaggcaatactggaagggtgttggcttctgatgctgctgctttcctgaaaaaatcagggcttccagacttgatacttggaaagatttgggatttagccgacacagatggcaaaggtatcctgaacaaacaagaattctttgttgctttgcgtcttgtggcatgtgcccagaatggattggaagtttcactaagtagtttgaacctggctgttcctccaccaagatttcatgataccagtagtcctttgctaatcagtggaacctctgcagctgagctcccatgggctgtaaaacctgaagataaggccaaatatgatgcaatatttgatagtttaagcccagtgaatggatttctgtctggtgataaagtgaaaccagtgttgctcaactctaagttacctgtggatatccttggaagagtttgggagttgagtgatattgaccatgatggaatgcttgacagagatgagtttgcagttgccatgtttttggtatactgtgcactggagaaagaacctgtgccaatgtccttgcctccagccttggtgccaccatctaagagaaaaacgtgggttgtatcccctgcagaaaaagctaaatatgatgaaatcttcctgaaaactgataaagatatggacggatttgtgtctggattggaggtccgtgaaatattcttgaaaacaggtttaccttctaccttactagcccatatatggtcattatgcgacacaaaggactgtgggaagctttcaaaggatcagtttgccttggcttttcacttaatcagtcagaagttaatcaagggcattgatcctcctcacgttcttactcctgaaatgattccaccatcagacagggccagtttacaaaagaacatcataggatcaagtcctgttgcagatttctctgctattaaggaactagatactcttaacaatgaaatagttgacctacagagggaaaagaataatgtggaacaggaccttaaggagaaggaagatactattaaacagaggacaagtgaggttcaggatcttcaagatgaagttcaaagggagaatactaatctgcaaaaactacaggcccagaaacagcaggtacaggaactccttgatgaactggatgagcagaaagcccagctggaggagcaactcaaggaagtcagaaagaaatgtgctgaggaggcccaactgatctcttctctgaaagctgaattaactagtcaggaatcgcagatctccacttatgaagaagaattggcaaaagctagagaagagctgagccgtctacagcaagaaacagcagaattggaggagagtgtagagtcagggaaggctcagttggaacctcttcagcagcacctacaagattcacaacaggaaattagttcaatgcaaatgaaactgatggaaatgaaagatttggaaaatcataatagtcagttaaattggtgcagtagcccacacagcattcttgtaaacggagctacagattattgcagcctcagcaccagcagcagtgaaacagccaaccttaatgaacatgttgaaggccagagcaacctagagtctgagcccatacaccaggaatctccagcaagaagtagtcctgaactactgccttctggtgtgactgatgaaaatgaggtgactacagctgttactgaaaaagtttgttctgaactcgacaataatagacattcaaaagaggaagatccatttaatgtagactcaagttcgctgacaggtccagttgcagatacaaacttggattttttccagtctgatccttttgttggcagtgatcctttcaaggatgatccttttggaaaaatcgatccatttggtggtgatcctttcaaaggttcagatccatttgcatcagactgtttcttcaggcaatctactgatccttttgccacttcaagcactgaccctttcagtgcagccaacaatagcagtattacatcggtagaaacgttgaagcacaatgatccttttgctcctggtggaacagttgttgcagcaagcgattcagccacagacccctttgcttctgtttttgggaatgaatcatttggaggtggatttgctgacttcagcacattgtcaaaggtcaacaatgaagatccttttcgttcagccacatcgagctctgtcagcaacgtagtgattacaaaaaatgtatttgaggaaacatcggtcaaaagtgaagatgaacccccagcactgccaccaaagatcggaactccaacaagaccctgccctctaccacctgggaaaagatccatcaacaaattggattctcctgatccctttaaactgaatgatccatttcagcctttcccaggcaacgatagccccaaagaaaaagatcctgaaatattttgtgatccattcacttctgctactaccactaccaataaagaggctgatccaagcaattttgccaacttcagtgcttatccctctgaagaagatatgatcgaatgggccaagagggaaagtgagagagaggaagagcagaggcttgcccgactaaatcagcaggaacaagaagacttagaactggctattgcactcagcaaatctgagatatcagaagcatgaagaattctcttgttctttggcaacaatatagtattcttcttcctgaatactgaaactatttacaatgtgtatcaaaactacctgtgagcatgggaatacaaaaggtttgagattcctgtaaatgtgacaaaattttaggattttttttttttcttcattacagattcgtctttttttttttttcttataaaagccgtaacccagtcagacaaattcaccttcacttaggcccctgttctggtatacatttactgtgagcttttgcctgcctgtgctattttacttgtaaagctagagcacccaagcttctgccttctggaatatagagaaatagtttcaccctgcactaccctgttctgtagttattctgatgatagccagtgaggttcttaaagtttgcagtattctcccctgattggaatggttgagtgagggtaagggaaagaatatcttatttcttttatgattggtgcaaattggctaaagtgcatttttaaatttcctctacttaatttgtttttcagagataaggaaaaatattttgcacagatttactccactatggaaaagggatgctgtaggttgaaccattatagcctcagattcgatcttttcctaactaaaaatattaaagcctcatgtgtgaaataaatttttaaaaagatttatctggatttagagaattttagatcaacagatacctctcagtgtgtttgctaattaataaaaatcagtttcttacaaataaagtttgtaagaaaatgttcattttaagtgatagatagtggagaaaatttatcacctaaaatatacccatcagtataaggcaagcaaaagtcttaacatggcagccattctgcctttgccgtggccctgtcctgtttagttcttagtgggttaatttttgtacttttgcagaagaaacttcagcaagctagaactggaaggtactttaatttttcatatatatttgtttttttttttttaatgaaggctcatttacttgaaatgtaaaaactttcactgaatacaaatagaaaaagtgatgtgttttatatcatattgctttttgtccatctttgtggtttagtttatttactcacttcatgtttttcacctataaaattgtcaagctagcaaaaaaactcttgtttttttaattgggagagaagagacctgccagattatcagacctcttcatgttaaaagaccatctcctgtaaaactgacctagtggacaagctgaatttgaaatagactgtgaagtaagctgtaacttgtcattttaattttgtttaacacggttactgacttagatgatgtattaaataccaagataaagaaaaatgcacctaaaatctaattagaattctctgggtcaacaagtcaaggtggtattgatctgtgttaatctgagtaacttattgcctagcctataaataaattccaaaatatccaattcatttctt

SEQ ID NO: 315845 - DNA, 5396 bp, Homo sapiens
taagtaactgggcctctagttacaatttcccccatttttcagaagcaggagctcagcgtaggtaggtggcctgtctgaagttcacaggtcaatctgcagtcgcctccgcagcccgtccgctttaattttatgtccgcgccgggttttccaaggcggccccgggggcaggctctggtccggtggccgagactccggcgccagggtttgggcggcgccgcggccggctccggcgggcgggcaggcgggcggggccagtcggggcggggcgggcgtggggagggaagttgtggaagttaggggagacgcccgaccgcccgccccggcctcgcctgcggccgctccctccgcctcctccccgccccgagccccagtcagcccgtcttccttcccctcccttgcatgatggaaacaccatggctgcggcggcccagctctctctgacacagttatcaagtgggaatcctgtatatgaaaaatactatagacaggttgatacaggcaatactggaagggtgttggcttctgatgctgctgctttcctgaaaaaatcagggcttccagacttgatacttggaaagatttgggatttagccgacacagatggcaaaggtatcctgaacaaacaacatgataccagtagtcctttgctaatcagtggaacctctgcagctgagctcccatgggctgtaaaatgaatggatttctgtctggtgataaagtgaaaccagtgttgctcaactctaagttacctgtggatatccttggaagagtttgggagttgagtgatattgaccatgatggaatgcttgacagagatgagtttgcagttgccatgtttttggtatactgtgcactggagaaagaacctgtgccaatgtccttgcctccagccttggtgccaccatctaagagaaaaacgtgggttgtatcccctgcagaaaaagctaaatatgatgaaatcttcctgaaaactgataaagatatggacggatttgtgtctggattggaggtccgtgaaatattcttgaaaacaggtttaccttctaccttactagcccatatatggtcattatgcgacacaaaggactgtgggaagctttcaaaggatcagtttgccttggcttttcacttaatcagtcagaagttaatcaagggcattgatcctcctcacgttcttactcctgaaatgattccaccatcagacagggccagtttacaaaagaacatcataggatcaagtcctgttgcagatttctctgctattaaggaactagatactcttaacaatgaaatagttgacctacagagggaaaagaataatgtggaacaggaccttaaggagaaggaagatactattaaacagaggacaagtgaggttcaggatcttcaagatgaagttcaaagggagaatactaatctgcaaaaactacaggcccagaaacagcaggtacaggaactccttgatgaactggatgagcagaaagcccagctggaggagcaactcaaggaagtcagaaagaaatgtgctgaggaggcccaactgatctcttctctgaaagctgaattaactagtcaggaatcgcagatctccacttatgaagaagaattggcaaaagctagagaagagctgagccgtctacagcaagaaacagcagaattggaggagagtgtagagtcagggaaggctcagttggaacctcttcagcagcacctacaagattcacaacaggaaattagttcaatgcaaatgaaactgatggaaatgaaagatttggaaaatcataatagtcagttaaattggtgcagtagcccacacagcattcttgtaaacggagctacagattattgcagcctcagcaccagcagcagtgaaacagccaaccttaatgaacatgttgaaggccagagcaacctagagtctgagcccatacaccaggaatctccagcaagaagtagtcctgaactactgccttctggtgtgactgatgaaaatgaggtgactacagctgttactgaaaaagtttgttctgaactcgacaataatagacattcaaaagaggaagatccatttaatgtagactcaagttcgctgacaggtccagttgcagatacaaacttggattttttccagtctgatccttttgttggcagtgatcctttcaaggatgatccttttggaaaaatcgatccatttggtggtgatcctttcaaaggttcagatccatttgcatcagactgtttcttcaggcaatctactgatccttttgccacttcaagcactgaccctttcagtgcagccaacaatagcagtattacatcggtagaaacgttgaagcacaatgatccttttgctcctggtggaacagttgttgcagcaagcgattcagccacagacccctttgcttctgtttttgggaatgaatcatttggaggtggatttgctgacttcagcacattgtcaaaggtcaacaatgaagatccttttcgttcagccacatcgagctctgtcagcaacgtagtgattacaaaaaatgtatttgaggaaacatcggtcaaaagtgaagatgaacccccagcactgccaccaaagatcggaactccaacaagaccctgccctctaccacctgggaaaagatccatcaacaaattggattctcctgatccctttaaactgaatgatccatttcagcctttcccaggcaacgatagccccaaagaaaaagatcctgaaatattttgtgatccattcacttctgctactaccactaccaataaagaggctgatccaagcaattttgccaacttcagtgcttatccctctgaagaagatatgatcgaatgggccaagagggaaagtgagagagaggaagagcagaggcttgcccgactaaatcagcaggaacaagaagacttagaactggctattgcactcagcaaatctgagatatcagaagcatgaagaattctcttgttctttggcaacaatatagtattcttcttcctgaatactgaaactatttacaatgtgtatcaaaactacctgtgagcatgggaatacaaaaggtttgagattcctgtaaatgtgacaaaattttaggattttttttttttcttcattacagattcgtctttttttttttttcttataaaagccgtaacccagtcagacaaattcaccttcacttaggcccctgttctggtatacatttactgtgagcttttgcctgcctgtgctattttacttgtaaagctagagcacccaagcttctgccttctggaatatagagaaatagtttcaccctgcactaccctgttctgtagttattctgatgatagccagtgaggttcttaaagtttgcagtattctcccctgattggaatggttgagtgagggtaagggaaagaatatcttatttcttttatgattggtgcaaattggctaaagtgcatttttaaatttcctctacttaatttgtttttcagagataaggaaaaatattttgcacagatttactccactatggaaaagggatgctgtaggttgaaccattatagcctcagattcgatcttttcctaactaaaaatattaaagcctcatgtgtgaaataaatttttaaaaagatttatctggatttagagaattttagatcaacagatacctctcagtgtgtttgctaattaataaaaatcagtttcttacaaataaagtttgtaagaaaatgttcattttaagtgatagatagtggagaaaatttatcacctaaaatatacccatcagtataaggcaagcaaaagtcttaacatggcagccattctgcctttgccgtggccctgtcctgtttagttcttagtgggttaatttttgtacttttgcagaagaaacttcagcaagctagaactggaaggtactttaatttttcatatatatttgtttttttttttttaatgaaggctcatttacttgaaatgtaaaaactttcactgaatacaaatagaaaaagtgatgtgttttatatcatattgctttttgtccatctttgtggtttagtttatttactcacttcatgtttttcacctataaaattgtcaagctagcaaaaaaactcttgtttttttaattgggagagaagagacctgccagattatcagacctcttcatgttaaaagaccatctcctgtaaaactgacctagtggacaagctgaatttgaaatagactgtgaagtaagctgtaacttgtcattttaattttgtttaacacggttactgacttagatgatgtattaaataccaagataaagaaaaatgcacctaaaatctaattagaattctctgggtcaacaagtcaaggtggtattgatctgtgttaatctgagtaacttattgcctagcctataaataaattccaaaatatccaattcatttcttcttgaaatggtgcttgttttgttttctttccattacacaattagactcctacagtttaaaacaaactttaaaccactatcttgcactgctaacttttttctacctttgtaaatagaaacatttctgcataaaagtcatacatatgaagcaagggctgaatcataatcacaaggcttaattttgataaacgaatccagtgacctaaggattttctgcaaaatttgactgggagttgtgataggtggtatttttgtttattttcttcctcttactccttaggataaaggtaagttgacttgaacaactttcttttgcactgggaaaataagcaaatgtttaaatgcttcaaaaaaattttcaattaaactcaaatattaaatatctataacttataaacaccaactttcaatgtaataaatgtatcctaatcttatgtatgtttaactggattacatagatttttatcttttgttaaaatgtgtataccccgtggaccaacataatattaaagtatgtatatattatataaatatatatgtatatgtgctcgcttgtgtaggatgaatgtcttagagtcgtttgtggtattttatgttgttgactctggctccagggcctgtgcttgaaaaggacagataagtattgcccagagctaagtggcactacttacaaagttttaaatgtcttctacatactgattcatgtttatttgagctctctttatagaattttctcttaaagtttcaaacctctaagttgtagcctgtaattatgagaacagtaaactttaagtaataataaagaatcccatccatatatccaatttgcaattgagttttgcatggttctctgattatgtccatgctgtgtccaaggaggagtaggtacatacaatcagcacagattaatatatgtaaagggtttgggacagcacctggtatagaataaataataaatgtaaactatta

SEQ ID NO: 315846 - DNA, 4200 bp, Homo sapiens
tcactcggtattgcatacattatacgcaaagttactgcgatcacgggccaacatccggggcccggagccgtcgcacattccgctctgaacgagccagcggacgtgctgcacaaagcaattttttttttacaaatggagcttatattgatttttatttcataaataattgaaagagggtagaaaaatctgcccttcatttaaaaattgaatgtttcactatgtatttaaaaagcgattcaggattaggaggatggataaccataccagctgtagctgatgttctaaaatattcttgcattgtttgctggtcttctagggaaaagaataatgtggaacaggaccttaaggagaaggaagatactattaaacagaggacaagtgaggttcaggatcttcaagatgaagttcaaagggagaatactaatctgcaaaaactacaggcccagaaacagcaggtacaggaactccttgatgaactggatgagcagaaagcccagctggaggagcaactcaaggaagtcagaaagaaatgtgctgaggaggcccaactgatctcttctctgaaagctgaattaactagtcaggaatcgcagatctccacttatgaagaagaattggcaaaagctagagaagagctgagccgtctacagcaagaaacagcagaattggaggagagtgtagagtcagggaaggctcagttggaacctcttcagcagcacctacaagattcacaacaggaaattagttcagcaagaagtagtcctgaactactgccttctggtgtgactgatgaaaatgaggtgactacagctgttactgaaaaagtttgttctgaactcgacaataatagacattcaaaagaggaagatccatttaatgtagactcaagttcgctgacaggtccagttgcagatacaaacttggattttttccagtctgatccttttgttggcagtgatcctttcaaggatgatccttttggaaaaatcgatccatttggtggtgatcctttcaaaggttcagatccatttgcatcagactgtttcttcaggcaatctactgatccttttgccacttcaagcactgaccctttcagtgcagccaacaatagcagtattacatcggtagaaacgttgaagcacaatgatccttttgctcctggtggaacagttgttgcagcaagcgattcagccacagacccctttgcttctgtttttgggaatgaatcatttggaggtggatttgctgacttcagcacattgtcaaaggtcaacaatgaagatccttttcgttcagccacatcgagctctgtcagcaacgtagtgattacaaaaaatgtatttgaggaaacatcggtcaaaagtgaagatgaacccccagcactgccaccaaagatcggaactccaacaagaccctgccctctaccacctgggaaaagatccatcaacaaattggattctcctgatccctttaaactgaatgatccatttcagcctttcccaggcaacgatagccccaaagaaaaagatcctgaaatattttgtgatccattcacttctgctactaccactaccaataaagaggctgatccaagcaattttgccaacttcagtgcttatccctctgaagaagatatgatcgaatgggccaagagggaaagtgagagagaggaagagcagaggcttgcccgactaaatcagcaggaacaagaagacttagaactggctattgcactcagcaaatctgagatatcagaagcatgaagaattctcttgttctttggcaacaatatagtattcttcttcctgaatactgaaactatttacaatgtgtatcaaaactacctgtgagcatgggaatacaaaaggtttgagattcctgtaaatgtgacaaaattttaggattttttttttttcttcattacagattcgtctttttttttttttcttataaaagccgtaacccagtcagacaaattcaccttcacttaggcccctgttctggtatacatttactgtgagcttttgcctgcctgtgctattttacttgtaaagctagagcacccaagcttctgccttctggaatatagagaaatagtttcaccctgcactaccctgttctgtagttattctgatgatagccagtgaggttcttaaagtttgcagtattctcccctgattggaatggttgagtgagggtaagggaaagaatatcttatttcttttatgattggtgcaaattggctaaagtgcatttttaaatttcctctacttaatttgtttttcagagataaggaaaaatattttgcacagatttactccactatggaaaagggatgctgtaggttgaaccattatagcctcagattcgatcttttcctaactaaaaatattaaagcctcatgtgtgaaataaatttttaaaaagatttatctggatttagagaattttagatcaacagatacctctcagtgtgtttgctaattaataaaaatcagtttcttacaaataaagtttgtaagaaaatgttcattttaagtgatagatagtggagaaaatttatcacctaaaatatacccatcagtataaggcaagcaaaagtcttaacatggcagccattctgcctttgccgtggccctgtcctgtttagttcttagtgggttaatttttgtacttttgcagaagaaacttcagcaagctagaactggaaggtactttaatttttcatatatatttgtttttttttttttaatgaaggctcatttacttgaaatgtaaaaactttcactgaatacaaatagaaaaagtgatgtgttttatatcatattgctttttgtccatctttgtggtttagtttatttactcacttcatgtttttcacctataaaattgtcaagctagcaaaaaaactcttgtttttttaattgggagagaagagacctgccagattatcagacctcttcatgttaaaagaccatctcctgtaaaactgacctagtggacaagctgaatttgaaatagactgtgaagtaagctgtaacttgtcattttaattttgtttaacacggttactgacttagatgatgtattaaataccaagataaagaaaaatgcacctaaaatctaattagaattctctgggtcaacaagtcaaggtggtattgatctgtgttaatctgagtaacttattgcctagcctataaataaattccaaaatatccaattcatttcttcttgaaatggtgcttgttttgttttctttccattacacaattagactcctacagtttaaaacaaactttaaaccactatcttgcactgctaacttttttctacctttgtaaatagaaacatttctgcataaaagtcatacatatgaagcaagggctgaatcataatcacaaggcttaattttgataaacgaatccagtgacctaaggattttctgcaaaatttgactgggagttgtgataggtggtatttttgtttattttcttcctcttactccttaggataaaggtaagttgacttgaacaactttcttttgcactgggaaaataagcaaatgtttaaatgcttcaaaaaaattttcaattaaactcaaatattaaatatctataacttataaacaccaactttcaatgtaataaatgtatcctaatcttatgtatgtttaactggattacatagatttttatcttttgttaaaatgtgtataccccgtggaccaacataatattaaagtatgtatatattatataaatatatatgtatatgtgctcgcttgtgtaggatgaatgtcttagagtcgtttgtggtattttatgttgttgactctggctccagggcctgtgcttgaaaaggacagataagtattgcccagagctaagtggcactacttacaaagttttaaatgtcttctacatactgattcatgtttatttgagctctctttatagaattttctcttaaagtttcaaacctctaagttgtagcctgtaattatgagaacagtaaactttaagtaataataaagaatcccatccatatatccaatttgcaattgagttttgcatggttctctgattatgtccatgctgtgtccaaggaggagtaggtacatacaatcagcacagattaatatatgtaaagggtttgggacagcacctggtatagaataaataataaatgtaaactatta

SEQ ID NO: 315847 - DNA, 4974 bp, Homo sapiens
taagtaactgggcctctagttacaatttcccccatttttcagaagcaggagctcagcgtaggtaggtggcctgtctgaagttcacaggtcaatctgcagtcgcctccgcagcccgtccgctttaattttatgtccgcgccgggttttccaaggcggccccgggggcaggctctggtccggtggccgagactccggcgccagggtttgggcggcgccgcggccggctccggcgggcgggcaggcgggcggggccagtcggggcggggcgggcgtggggagggaagttgtggaagttaggggagacgcccgaccgcccgccccggcctcgcctgcggccgctccctccgcctcctccccgccccgagccccagtcagcccgtcttccttcccctcccttgcatgatggaaacaccatggctgcggcggcccagctctctctgacacagttatcaagtgggaatcctgtatatgaaaaatactatagacaggttgatacaggcaatactggaagggtgttggcttctgatgctgctgctttcctgaaaaaatcagggcttccagacttgatacttggaaagatttgggatttagccgacacagatggcaaaggtatcctgaacaaacaagaattctttgttgctttgcgtcttgtggcatgtgcccagaatggattggaagtttcactaagtagtttgaacctggctgttcctccaccaagatttcatgataccagtagtcctttgctaatcagtggaacctctgcagctgagctcccatgggctgtaaaacctgaagataaggccaaatatgatgcaatatttgatagtttaagcccagtgaatggatttctgtctggtgataaagtgaaaccagtgttgctcaactctaagttacctgtggatatccttggaagagtttgggagttgagtgatattgaccatgatggaatgcttgacagagatgagtttgcagttgccatgtttttggtatactgtgcactggagaaagaacctgtgccaatgtccttgcctccagccttggtgccaccatctaagagaaaaacgtgggttgtatcccctgcagaaaaagctaaatatgatgaaatcttcctgaaaactgataaagatatggacggatttgtgtctggattggaggtccgtgaaatattcttgaaaacaggtttaccttctaccttactagcccatatatggtcattatgcgacacaaaggactgtgggaagctttcaaaggatcagtttgccttggcttttcacttaatcagtcagaagttaatcaagggcattgatcctcctcacgttcttactcctgaaatgattccaccatcagacagggccagtttacaaaagaacatcataggatcaagtcctgttgcagatttctctgctattaaggaactagatactcttaacaatgaaatagttgacctacagagggaaaagaataatgtggaacaggaccttaaggagaaggaagatactattaaacagaggacaagtgaggttcaggatcttcaagatgaagttcaaagggagaatactaatctgcaaaaactacaggcccagaaacagcaggtacaggaactccttgatgaactggatgagcagaaagcccagctggaggagcaactcaaggaagtcagaaagaaatgtgctgaggaggcccaactgatctcttctctgaaagctgaattaactagtcaggaatcgcagatctccacttatgaagaagaattggcaaaagctagagaagagctgagccgtctacagcaagaaacagcagaattggaggagagtgtagagtcagggaaggctcagttggaacctcttcagcagcacctacaagattcacaacaggaaattagttcaatgcaaatgaaactgatggaaatgaaagatttggaaaatcataatagtcagttaaattggtgcagtagcccacacagcattcttgtaaacggagctacagattattgcagcctcagcaccagcagcagtgaaacagccaaccttaatgaacatgttgaaggccagagcaacctagagtctgagcccatacaccaggaatctccagcaagaagtagtcctgaactactgccttctggtgtgactgatgaaaatgaggtgactacagctgttactgaaaaagtttgttctgaactcgacaataatagacattcaaaagaggaagatccatttaatgtagactcaagttcgctgacaggtccagttgcagatacaaacttggattttttccagtctgatccttttgttggcagtgatcctttcaaggatgatccttttggaaaaatcgatccatttggtggtgatcctttcaaaggttcagatccatttgcatcagactgtttcttcaggcaatctactgatccttttgccacttcaagcactgaccctttcagtgcagccaacaatagcagtattacatcggtagaaacgttgaagcacaatgatccttttgctcctggtggaacagttgttgcagcaagcgattcagccacagacccctttgcttctgtttttgggaatgaatcatttggaggtggatttgctgacttcagcacattgtcaaaggtcaacaatgaagatccttttcgttcagccacatcgagctctgtcagcaacgtagtgattacaaaaaatgtatttgaggaaacatcggtcaaaagtgaagatgaacccccagcactgccaccaaagatcggaactccaacaagaccctgccctctaccacctgggaaaagatccatcaacaaattggattctcctgatccctttaaactgaatgatccatttcagcctttcccaggcaacgatagccccaaagaaaaagatcctgaaatattttgtgatccattcacttctgctactaccactaccaataaagaggctgatccaagcaattttgccaacttcagtgcttatccctctgaagaagatatgatcgaatgggccaagagggaaagtgagagagaggaagagcagaggcttgcccgactaaatcagcaggaacaagaagacttagaactggctattgcactcagcaaatctgagatatcagaagcatgaagaattctcttgttctttggcaacaatatagtattcttcttcctgaatactgaaactatttacaatgtgtatcaaaactacctgtgagcatgggaatacaaaaggtttgagattcctgtaaatgtgacaaaattttaggattttttttttttcttcattacagattcgtctttttttttttttcttataaaagccgtaacccagtcagacaaattcaccttcacttaggcccctgttctggtatacatttactgtgagcttttgcctgcctgtgctattttacttgtaaagctagagcacccaagcttctgccttctggaatatagagaaatagtttcaccctgcactaccctgttctgtagttattctgatgatagccagtgaggttcttaaagtttgcagtattctcccctgattggaatggttgagtgagggtaagggaaagaatatcttatttcttttatgattggtgcaaattggctaaagtgcatttttaaatttcctctacttaatttgtttttcagagataaggaaaaatattttgcacagatttactccactatggaaaagggatgctgtaggttgaaccattatagcctcagattcgatcttttcctaactaaaaatattaaagcctcatgtgtgaaataaatttttaaaaagatttatctggatttagagaattttagatcaacagatacctctcagtgtgtttgctaattaataaaaatcagtttcttacaaataaagtttgtaagaaaatgttcattttaagtgatagatagtggagaaaatttatcacctaaaatatacccatcagtataaggcaagcaaaagtcttaacatggcagccattctgcctttgccgtggccctgtcctgtttagttcttagtgggttaatttttgtacttttgcagaagaaacttcagcaagctagaactggaaggtactttaatttttcatatatatttgtttttttttttttaatgaaggctcatttacttgaaatgtaaaaactttcactgaatacaaatagaaaaagtgatgtgttttatatcatattgctttttgtccatctttgtggtttagtttatttactcacttcatgtttttcacctataaaattgtcaagctagcaaaaaaactcttgtttttttaattgggagagaagagacctgccagattatcagacctcttcatgttaaaagaccatctcctgtaaaactgacctagtggacaagctgaatttgaaatagactgtgaagtaagctgtaacttgtcattttaattttgtttaacacggttactgacttagatgatgtattaaataccaagataaagaaaaatgcacctaaaatctaattagaattctctgggtcaacaagtcaaggtggtattgatctgtgttaatctgagtaacttattgcctagcctataaataaattccaaaatatccaattcatttcttcttgaaatggtgcttgttttgttttctttccattacacaattagactcctacagtttaaaacaaactttaaaccactatcttgcactgctaacttttttctacctttgtaaatagaaacatttctgcataaaagtcatacatatgaagcaagggctgaatcataatcacaaggcttaattttgataaacgaatccagtgacctaaggattttctgcaaaatttgactgggagttgtgataggtggtatttttgtttattttcttcctcttactccttaggataaaggtaagttgacttgaacaactttcttttgcactgggaaaataagcaaatgtttaaatgcttcaaatctcatagagttgtattctaacttatgtatgtgtactggatacatagtgtt

SEQ ID NO: 315848 - DNA, 3237 bp, Homo sapiens
taagtaactgggcctctagttacaatttcccccatttttcagaagcaggagctcagcgtaggtaggtggcctgtctgaagttcacaggtcaatctgcagtcgcctccgcagcccgtccgctttaattttatgtccgcgccgggttttccaaggcggccccgggggcaggctctggtccggtggccgagactccggcgccagggtttgggcggcgccgcggccggctccggcgggcgggcaggcgggcggggccagtcggggcggggcgggcgtggggagggaagttgtggaagttaggggagacgcccgaccgcccgccccggcctcgcctgcggccgctccctccgcctcctccccgccccgagccccagtcagcccgtcttccttcccctcccttgcatgatggaaacaccatggctgcggcggcccagctctctctgacacagttatcaagtgggaatcctgtatatgaaaaatactatagacaggttgatacaggcaatactggaagggtgttggcttctgatgctgctgctttcctgaaaaaatcagggcttccagacttgatacttggaaagatttgggatttagccgacacagatggcaaaggtatcctgaacaaacaagaattctttgttgctttgcgtcttgtggcatgtgcccagaatggattggaagtttcactaagtagtttgaacctggctgttcctccaccaagatttcatgataccagtagtcctttgctaatcagtggaacctctgcagctgagctcccatgggctgtaaaacctgaagataaggccaaatatgatgcaatatttgatagtttaagcccagtgaatggatttctgtctggtgataaagtgaaaccagtgttgctcaactctaagttacctgtggatatccttggaagagtttgggagttgagtgatattgaccatgatggaatgcttgacagagatgagtttgcagttgccatgtttttggtatactgtgcactggagaaagaacctgtgccaatgtccttgcctccagccttggtgccaccatctaagagaaaaacgtgggttgtatcccctgcagaaaaagctaaatatgatgaaatcttcctgaaaactgataaagatatggacggatttgtgtctggattggaggtccgtgaaatattcttgaaaacaggtttaccttctaccttactagcccatatatggtcattatgcgacacaaaggactgtgggaagctttcaaaggatcagtttgccttggcttttcacttaatcagtcagaagttaatcaagggcattgatcctcctcacgttcttactcctgaaatgattccaccatcagacagggccagtttacaaaagaacatcataggatcaagtcctgttgcagatttctctgctattaaggaactagatactcttaacaatgaaatagttgacctacagagggaaaagaataatgtggaacaggaccttaaggagaaggaagatactattaaacagaggacaagtgaggttcaggatcttcaagatgaagttcaaagggagaatactaatctgcaaaaactacaggcccagaaacagcaggtacaggaactccttgatgaactggatgagcagaaagcccagctggaggagcaactcaaggaagtcagaaagaaatgtgctgaggaggcccaactgatctcttctctgaaagctgaattaactagtcaggaatcgcagatctccacttatgaagaagaattggcaaaagctagagaagagctgagccgtctacagcaagaaacagcagaattggaggagagtgtagagtcagggaaggctcagttggaacctcttcagcagcacctacaagattcacaacaggaaattagttcaatgcaaatgaaactgatggaaatgaaagatttggaaaatcataatagtcagttaaattggtgcagtagcccacacagcattcttgtaaacggagctacagattattgcagcctcagcaccagcagcagtgaaacagccaaccttaatgaacatgttgaaggccagagcaacctagagtctgagcccatacaccaggaatctccagcaagaagtagtcctgaactactgccttctggtgtgactgatgaaaatgaggtgactacagctgttactgaaaaagtttgttctgaactcgacaataatagacattcaaaagaggaagatccatttaatgtagactcaagttcgctgacaggtccagttgcagatacaaacttggattttttccagtctgatccttttgttggcagtgatcctttcaaggatgatccttttggaaaaatcgatccatttggtggtgatcctttcaaaggttcagatccatttgcatcagactgtttcttcaggcaatctactgatccttttgccacttcaagcactgaccctttcagtgcagccaacaatagcagtattacatcggtagaaacgttgaagcacaatgatccttttgctcctggtggaacagttgttgcagcaagcgattcagccacagacccctttgcttctgtttttgggaatgaatcatttggaggtggatttgctgacttcagcacattgtcaaaggtcaacaatgaagatccttttcgttcagccacatcgagctctgtcagcaacgtagtgattacaaaaaatgtatttgaggaaacatcggtcaaaagtgaagatgaacccccagcactgccaccaaagatcggaactccaacaagaccctgccctctaccacctgggaaaagatccatcaacaaattggattctcctgatccctttaaactgaatgatccatttcagcctttcccaggcaacgatagccccaaagaaaaagatcctgaaatattttgtgatccattcacttctgctactaccactaccaataaagaggctgatccaagcaattttgccaacttcagtgcttatccctctgaagaagatatgatcgaatgggccaagagggaaagtgagagagaggaagagcagaggcttgcccgactaaatcagcaggaacaagaagacttagaactggctattgcactcagcaaatctgagatatcagaagcatgaagaattctcttgttctttggcaacaatatagtattcttcttcctgaatactgaaactatttacaggaatctcaaaccttttgtattcccatgctcacaggtagttttgatacacattgtaaatagtgtcgagc

SEQ ID NO: 315849 - DNA, 1424 bp, Homo sapiens
taagtaactgggcctctagttacaatttcccccatttttcagaagcaggagctcagcgtaggtaggtggcctgtctgaagttcacaggtcaatctgcagtcgcctccgcagcccgtccgctttaattttatgtccgcgccgggttttccaaggcggccccgggggcaggctctggtccggtggccgagactccggcgccagggtttgggcggcgccgcggccggctccggcgggcgggcaggcgggcggggccagtcggggcggggcgggcgtggggagggaagttgtggaagttaggggagacgcccgaccgcccgccccggcctcgcctgcggccgctccctccgcctcctccccgccccgagccccagtcagcccgtcttccttcccctcccttgcatgatggaaacaccatggctgcggcggcccagctctctctgacacagttatcaagtgggaatcctgtatatgaaaaatactatagacaggttgatacaggcaatactggaagggtgttggcttctgatgctgctgctttcctgaaaaaatcagggcttccagacttgatacttggaaagatttgggatttagccgacacagatggcaaaggtatcctgaacaaacaagaattctttgttgctttgcgtcttgtggcatgtgcccagaatggattggaagtttcactaagtagtttgaacctggctgttcctccaccaagatttcatgataccagtagtcctttgctaatcagtggaacctctgcagctgagctcccatgggctgtaaaacctgaagataaggccaaatatgatgcaatatttgatagtttaagcccagtgaatggatttctgtctggtgataaagtgaaaccagtgttgctcaactctaagttacctgtggatatccttggaagagtttgggagttgagtgatattgaccatgatggaatgcttgacagagatgagtttgcagttattttcctcattttccacaagagccagatgaaataggcagaatacatattaccacattttaaaaatgcagaaagagaaacttaaagtgacttgaattcttgttcacagacggagtctcactctgtcactcaggctggagtgcagtggcgggatctcagctcactgcagcctcggcctcctggattcaagttattcttccacctcagcctcctgaggagctgggattacaggcatgcaccaccacccccggctaatttttatatttttagtagagacagcgtttcgccgtgtttgccagactggtctcgagctcctgataataggtgatccactcgcctcggcctcccaaagtgccgggattacaggcatgagccacctcttcaggcccaagacaaaaatatagttagagtagatggggaatagtagtgtcatcatttgataaacagtagt

SEQ ID NO: 315850 - DNA, 1632 bp, Homo sapiens
tttaacacccatagtaggcctaaaagcagccaccaattatgaaagccacagcacgtacacccactccagggatctgccagcaccctgtggggcccagactacaggctgatggcggaggcttcgagtgacccgggtgccgaggagcgggaagagttgctggggcccactgctcagtggagcgtggaggacgaggaggaggccgtccacgagcaatgccagcatgagagagacaggcagcttcaggcccaggacgaggagggaggcggccatgtccccgagcggccgaagcaggagatgctcctcagcctgaagccctcggaggcccctgaactggatgaggacgagggctttggcgactggtcccagaggccagagcagcggcagcagcacgagggggcgcagggcgccttggacagcggagagcccccccagtgcaggagtcctgagggggagcaagaggacaggcccggcctgcatgcctacgaaaaggaggacagtgatgaagtccacctggaggagttgagtctgagcaaggaggggccaggcccagaggacactgtccaggacaacctgggggccgcaggggctgaggaggaacaggaggagcaccagaaatgtcagcagcccaggacacccagccccttggtcttggaggggaccatcgaacagagctcgcctcccctgagccctaccaccaaactcatcgacaggaccgagtccctaaaccgctccatagagaagagtaacagtgtgaagaaatcccagccagacttgcccatctccaagattgatcagtggctggaacaatacacccaggccatcgagaccgctggccggacccccaagctagcccgccaggcctccatagagctgcccagcatggctgtggccagtaccaagagtcggtgggagacgggtgaggtacaggctcagtctgcggccaagactccgtcctgcaaggatattgtggctggagacatgagcaagaaaagcctctgggagcagaagggaggctccaagacctcatcaacaattaagagcaccccatctgggaagaggtataagtttgtggccaccgggcatgggaagtatgagaaggtgcttgtggaagggggcccggctccctaggcgtcccatctcgcttcctgggtctgcaggtccagccggctggcaccctccatgtacccaggggagattccagccagacacccgccccccggccctggctaagaagttgcttcctgttgccagcatgacctaccctcgcctctttgatgccatccgctgccacctccttttgctcctggaccctttagcctctctgcccttccactctctgaccaccgcccccgccctccccacccagctccgcttcttgttacttgggggaggaaagaaactcctgatcattggccaaagggacttacccctggagaggccaagtgccttctaggaagttaggaggttgaggcacagcctgtgcagagagggtgggtcacccccccagatccaaggggaaactgcaggtcaagggctgataacggccatgcaggatgcttgatgctgcgtcccccgctgcttgccgccccccaccccgccattttgtataataaagctccctgtgtattctca

SEQ ID NO: 315851 - DNA, 797 bp, Homo sapiens
  misc_feature (17)..(17): n is a, c, g, or t
  misc_feature (20)..(20): n is a, c, g, or t
  misc_feature (769)..(769): n is a, c, g, or t
tcgcgcggagcacaacnatnggctaggtacgaggctgggtgttgaaagccacagcacgtacacccactccagggatctgccagcaccctgtggggcccagactacaggctgatggcggaggcttcgagtgacccgggtgccgaggagcgggaagagttgctggggcccactgctcagtggagcgtggaggacgaggaggaggccgtccacgagcaatgccagcatgagagagacaggcagcttcaggcccaggacgaggagggaggcggccatgtccccgagcggccgaagcaggagatgctcctcagcctgaagccctcggaggcccctgaactggatgaggacgagggctttggcgactggtcccagaggccagagcagcggcagcagcacgagggggcgcagggcgccttggacagcggagagcccccccagtgcaggagtcctgagggggagcaagaggacaggcccggcctgcatgcctacgaaaaggaggacagtgatgaagtccacctggaggagttgagtctgagcaaggaggggccaggcccagaggacactgtccaggacaacctgggggccgcaggggctgaggaggaacaggaggagcaccagaaatgtcagcagcccaggacacccagccccttggtcttggaggggaccatcgaacagagctcgcctcccctgagccctaccaccaaatcatcgacggaccggtcctaaacgctcctagagaaggtaccgttgtgagaatccagcagattgccantccagatggtgtggtgacatcacccgga

SEQ ID NO: 315852 - DNA, 145 bp, Homo sapiens
gcggccgcctactactactactactgctcgaattcaagcttctaacgatgtacggggccatgcaggatgcttgatgctgcgtcccccgctgcttgccgccccccaccccgccattttgtataataaagctccctgtgtattctca

SEQ ID NO: 315853 - DNA, 1680 bp, Homo sapiens
gacaggttccaaacctcaacctgcagccggaagggggaagtgaaactcggctgggggtgggggctcagaagccgccccagaaagcactgaaagccacagcacgtacacccactccagggatctgccagcaccctgtggggcccagactacaggctgatggcggaggcttcgagtgacccgggtgccgaggagcgggaagagttgctggggcccactgctcagtggagcgtggaggacgaggaggaggccgtccacgagcaatgccagcatgagagagacaggcagcttcaggcccaggacgaggagggaggcggccatgtccccgagcggccgaagcaggagatgctcctcagcctgaagccctcggaggcccctgaactggatgaggacgagggctttggcgactggtcccagaggccagagcagcggcagcagcacgagggggcgcagggcgccttggacagcggagagcccccccagtgcaggagtcctgagggggagcaagaggacaggcccggcctgcatgcctacgaaaaggaggacagtgatgaagtccacctggaggagttgagtctgagcaaggaggggccaggcccagaggacactgtccaggacaacctgggggccgcaggggctgaggaggaacaggaggagcaccagaaatgtcagcagcccaggacacccagccccttggtcttggaggggaccatcgaacagagctcgcctcccctgagccctaccaccaaactcatcgacaggaccgagtccctaaaccgctccatagagaagagtaacagtgtgaagaaatcccagccagacttgcccatctccaagattgatcagtggctggaacaatacacccaggccatcgagaccgctggccggacccccaagctagcccgccaggcctccatagagctgcccagcatggctgtggccagtaccaagagtcggtgggagacgggtgaggtacaggctcagtctgcggccaagactccgtcctgcaaggatattgtggctggagacatgagcaagaaaagcctctgggagcagaagggaggctccaagacctcatcaacaattaagagcaccccatctgggaagaggtataagtttgtggccaccgggcatgggaagtatgagaaggtgcttgtggaagggggcccggctccctaggcgtcccatctcgcttcctgggtctgcaggtccagccggctggcaccctccatgtacccaggggagattccagccagacacccgccccccggccctggctaagaagttgcttcctgttgccagcatgacctaccctcgcctctttgatgccatccgctgccacctccttttgctcctggaccctttagcctctctgcccttccactctctgaccaccgcccccgccctccccacccagctccgcttcttgttacttgggggaggaaagaaactcctgatcattggccaaagggacttacccctggagaggccaagtgccttctaggaagttaggaggttgaggcacagcctgtgcagagagggtgggtcacccccccagatccaaggggaaactgcaggtcaagggctgataacggccatgcaggatgcttgatgctgcgtcccccgctgcttgccgccccccaccccgccattttgtataataaagctccctgtgtattctca

SEQ ID NO: 315854 - DNA, 1635 bp, Homo sapiens
  misc_feature (17)..(17): n is a, c, g, or t
  misc_feature (20)..(20): n is a, c, g, or t
tcgcgcggagcacaacnatnggctaggtacgaggctgggtgttgaaagccacagcacgtacacccactccagggatctgccagcaccctgtggggcccagactacaggctgatggcggaggcttcgagtgacccgggtgccgaggagcgggaagagttgctggggcccactgctcagtggagcgtggaggacgaggaggaggccgtccacgagcaatgccagcatgagagagacaggcagcttcaggcccaggacgaggagggaggcggccatgtccccgagcggccgaagcaggagatgctcctcagcctgaagccctcggaggcccctgaactggatgaggacgagggctttggcgactggtcccagaggccagagcagcggcagcagcacgagggggcgcagggcgccttggacagcggagagcccccccagtgcaggagtcctgagggggagcaagaggacaggcccggcctgcatgcctacgaaaaggaggacagtgatgaagtccacctggaggagttgagtctgagcaaggaggggccaggcccagaggacactgtccaggacaacctgggggccgcaggggctgaggaggaacaggaggagcaccagaaatgtcagcagcccaggacacccagccccttggtcttggaggggaccatcgaacagagctcgcctcccctgagccctaccaccaaactcatcgacaggaccgagtccctaaaccgctccatagagaagagtaacagtgtgaagaaatcccagccagacttgcccatctccaagattgatcagtggctggaacaatacacccaggccatcgagaccgctggccggacccccaagctagcccgccaggcctccatagagctgcccagcatggctgtggccagtaccaagagtcggtgggagacgggtgaggtacaggctcagtctgcggccaagactccgtcctgcaaggatattgtggctggagacatgagcaagaaaagcctctgggagcagaagggaggctccaagacctcatcaacaattaagagcaccccatctgggaagaggtataagtttgtggccaccgggcatgggaagtatgagaaggtgcttgtggaagggggcccggctccctaggcgtcccatctcgcttcctgggtctgcaggtccagccggctggcaccctccatgtacccaggggagattccagccagacacccgccccccggccctggctaagaagttgcttcctgttgccagcatgacctaccctcgcctctttgatgccatccgctgccacctccttttgctcctggaccctttagcctctctgcccttccactctctgaccaccgcccccgccctccccacccagctccgcttcttgttacttgggggaggaaagaaactcctgatcattggccaaagggacttacccctggagaggccaagtgccttctaggaagttaggaggttgaggcacagcctgtgcagagagggtgggtcacccccccagatccaaggggaaactgcaggtcaagggctgataacggccatgcaggatgcttgatgctgcgtcccccgctgcttgccgccccccaccccgccattttgtataataaagctccctgtgtattctca

SEQ ID NO: 315855 - DNA, 2004 bp, Homo sapiens
gacaggttccaaacctcaacctgcagccggaagggggaagtgaaactcggctgggggtgggggctcagaagccgccccagaaagcactgaaagccacagcacgtacacccactccagggatctgccagcaccctgtggggcccagactacaggctgatggcggaggcttcgagtgacccgggtgccgaggagcgggaagagttgctggggcccactgctcagtggagcgtggaggacgaggaggaggccgtccacgagcaatgccagcatgagagagacaggcagcttcaggcccaggacgaggagggaggcggccatgtccccgagcggccgaagcaggagatgctcctcagcctgaagccctcggaggcccctgaactggatgaggacgagggctttggcgactggtcccagaggccagagcagcggcagcagcacgagggggcgcagggcgccttggacagcggagagcccccccagtgcaggagtcctgagggggagcaagaggacaggcccggcctgcatgcctacgaaaaggaggacagtgatgaagtccacctggaggagttgagtctgagcaaggaggggccaggcccagaggacactgtccaggacaacctgggggccgcaggggctgaggaggaacaggaggagcaccagaaatgtcagcagcccaggacacccagccccttggtcttggaggggaccatcgaacagagctcgcctcccctgagccctaccaccaaactcatcgacaggaccgagtccctaaaccgctccatagagaagagtaacagtgtgaagaaatcccagccagacttgcccatctccaagattgatcagtggctggaacaatacacccaggccatcgagaccgctggccggacccccaagctagcccgccaggcctccatagagctgcccagcatggctgtggccagtaccaagagtcggtgggagacgggtgaggtacaggctcagtctgcggccaagactccgtcctgcaaggatattgtggctggagacatgagcaagaaaagcctctgggagcagaagggaggctccaagacctcatcaacaattaagagcaccccatctgggaagaggtataagtttgtggccaccgggcatgggaagtatgagaaggtgcttgtggaagggggcccggctccctaggcgtcccatctcgcttcctgggtctgcaggtccagccggctggcaccctccatgtacccaggggagattccagccagacacccgccccccggccctggctaagaagttgcttcctgttgccagcatgacctaccctcgcctctttgatgccatccgctgccacctccttttgctcctggaccctttagcctctctgcccttccactctctgaccaccgcccccgccctccccacccagctccgcttcttgttacttgggggaggaaagaaactcctgatcattggccaaagggacttacccctggagaggccaagtgccttctaggaagttaggaggttgaggcacagcctgtgcagagagggtgggtcacccccccagatccaaggggaaactgcaggtcaagggctgataacggccatgcaggatgcttgatgctgcgtcccccgctgcttgccgccccccaccccgccattttgtataataaagctccctgtgtattctcaaaaaaaaaaaaaaaagaaaaaaaaaaaataaaaaaaaaaaaccgaaaaaaaaaaaaaaaaaaaaaaaacaaacaaaaagaaagaaagagcggggggcgcccgcaaaacagccccccacggcgggcaacacaatcggcactaccccccgtcttctgtgaaacaacggcccccccataaggacggctcatttactacgcgagcgccgggcgccttaaaacacgccgcgtcgtggtgtgagaaacacgcccgcaagcggacccttctgggcagagagccccaccaccgcgggccgaacgagcgatcgtctgggggcaacccccgcgg

SEQ ID NO: 315856 - DNA, 2015 bp, Homo sapiens
acggcaagagctctgccagggcagtcccagctggcccaggcgccgcagcgctcccgagggccgtcgagcaaaggcgggaggcgcagccgggctgtcggtggacctgtaggtatcagggctccttggtcccctcctgcgggaagcaggcaccgagtggggctgcatgtagacgcatgcgagggtgagagctgcggcggaggacgctgatcgcggagtgcaggcgagggccccagaaaggtcccgcaggtcgcctcgctcgtggcacgggctcggcagcgttgtggttagtgacacggaggaagacagaaagccatatgcacagcacgcagaacaggaggaggggggaagaaagagcaggcacggggcaggcagagccgcagccacgccgccgggatgcagcaggcagggccacccacgagcagggcggggccctaacctccgacccaggctggtcgccgcagatgggggcagagatgtgaaacagctgcagagcgggacaagggtgctgccggcacagggctgaccacagagcacatcaaaagaggcccactgctcagtggagcgtggaggacgaggaggaggccgtccacgagcaatgccagcatgagagagacaggcagcttcaggcccaggacgaggagggaggcggccatgtccccgagcggccgaagcaggagatgctcctcagcctgaagccctcggaggcccctgaactggatgaggacgagggctttggcgactggtcccagaggccagagcagcggcagcagcacgagggggcgcagggcgccttggacagcggagagcccccccagtgcaggagtcctgagggggagcaagaggacaggcccggcctgcatgcctacgaaaaggaggacagtgatgaagtccacctggaggagttgagtctgagcaaggaggggccaggcccagaggacactgtccaggacaacctgggggccgcaggggctgaggaggaacaggaggagcaccagaaatgtcagcagcccaggacacccagccccttggtcttggaggggaccatcgaacagagctcgcctcccctgagccctaccaccaaactcatcgacaggaccgagtccctaaaccgctccatagagaagagtaacagtgtgaagaaatcccagccagacttgcccatctccaagattgatcagtggctggaacaatacacccaggccatcgagaccgctggccggacccccaagctagcccgccaggcctccatagagctgcccagcatggctgtggccagtaccaagagtcggtgggagacgggtgaggtacaggctcagtctgcggccaagactccgtcctgcaaggatattgtggctggagacatgagcaagaaaagcctctgggagcagaagggaggctccaagacctcatcaacaattaagagcaccccatctgggaagaggtataagtttgtggccaccgggcatgggaagtatgagaaggtgcttgtggaagggggcccggctccctaggcgtcccatctcgcttcctgggtctgcaggtccagccggctggcaccctccatgtacccaggggagattccagccagacacccgccccccggccctggctaagaagttgcttcctgttgccagcatgacctaccctcgcctctttgatgccatccgctgccacctccttttgctcctggaccctttagcctctctgcccttccactctctgaccaccgcccccgccctccccacccagctccgcttcttgttacttgggggaggaaagaaactcctgatcattggccaaagggacttacccctggagaggccaagtgccttctaggaagttaggaggttgaggcacagcctgtgcagagagggtgggtcacccccccagatccaaggggaaactgcaggtcaagggctgataacggccatgcaggatgcttgatgctgcgtcccccgctgcttgccgccccccaccccgccattttgtataataaagctccctgtgtattctca

SEQ ID NO: 315857 - DNA, 1680 bp, Homo sapiens
gacaggttccaaacctcaacctgcagccggaagggggaagtgaaactcggctgggggtgggggctcagaagccgccccagaaagcactgaaagccacagcacgtacacccactccagggatctgccagcaccctgtggggcccagactacaggctgatggcggaggcttcgagtgacccgggtgccgaggagcgggaagagttgctggggcccactgctcagtggagcgtggaggacgaggaggaggccgtccacgagcaatgccagcatgagagagacaggcagcttcaggcccaggacgaggagggaggcggccatgtccccgagcggccgaagcaggagatgctcctcagcctgaagccctcggaggcccctgaactggatgaggacgagggctttggcgactggtcccagaggccagagcagcggcagcagcacgagggggcgcagggcgccttggacagcggagagcccccccagtgcaggagtcctgagggggagcaagaggacaggcccggcctgcatgcctacgaaaaggaggacagtgatgaagtccacctggaggagttgagtctgagcaaggaggggccaggcccagaggacactgtccaggacaacctgggggccgcaggggctgaggaggaacaggaggagcaccagaaatgtcagcagcccaggacacccagccccttggtcttggaggggaccatcgaacagagctcgcctcccctgagccctaccaccaaactcatcgacaggaccgagtccctaaaccgctccatagagaagagtaacagtgtgaagaaatcccagccagacttgcccatctccaagattgatcagtggctggaacaatacacccaggccatcgagaccgctggccggacccccaagctagcccgccaggcctccatagagctgcccagcatggctgtggccagtaccaagagtcggtgggagacgggtgaggtacaggctcagtctgcggccaagactccgtcctgcaaggatattgtggctggagacatgagcaagaaaagcctctgggagcagaagggaggctccaagacctcatcaacaattaagagcaccccatctgggaagaggtataagtttgtggccaccgggcatgggaagtatgagaaggtgcttgtggaagggggcccggctccctaggcgtcccatctcgcttcctgggtctgcaggtccagccggctggcaccctccatgtacccaggggagattccagccagacacccgccccccggccctggctaagaagttgcttcctgttgccagcatgacctaccctcgcctctttgatgccatccgctgccacctccttttgctcctggaccctttagcctctctgcccttccactctgtgggcactgcgtctgcattctcttcctagagcaggtttgtgtttggtatatgagtaaaggcctttgggttcagtgggcacaggttcttacccctggagaggccaagtgccttctaggaagttaggaggttgaggcacagcctgtgcagagagggtgggtcacccccccagatccaaggggaaactgcaggtcaagggctgataacggccatgcaggatgcttgatgctgcgtcccccgctgcttgccgccccccaccccgccattttgtataataaagctccctgtgtattctca

SEQ ID NO: 315858 - DNA, 1364 bp, Homo sapiens
gacaggttccaaacctcaacctgcagccggaagggggaagtgaaactcggctgggggtgggggctcagaagccgccccagaaagcactgaaagccacagcacgtacacccactccagggatctgccagcaccctgtggggcccagactacaggctgatggcggaggcttcgagtgacccgggtgccgaggagcgggaagagttgctggggcccactgctcagtggagcgtggaggacgaggaggaggccgtccacgagcaatgccagcatgagagagacaggcagcttcaggcccaggacgaggagggaggcggccatgtccccgagcggccgaagcaggagatgctcctcagcctgaagccctcggaggcccctgaactggatgaggacgagggctttggcgactggtcccagaggccagagcagcggcagcagcacgagggggcgcagggcgccttggacagcggagagcccccccagtgcaggagtcctgagggggagcaagaggacaggcccggcctgcatgcctacgaaaaggaggacagtgatgaagtccacctggaggagttgagtctgagcaaggaggggccaggcccagaggacactgtccaggacaacctgggggccgcaggggctgaggaggaacaggaggagcaccagaaatgtcagcagcccaggacacccagccccttggtcttggaggggaccatcgaacagagctcgcctcccctgagccctaccaccaaactcatcgacaggaccgagtccctaaaccgctccatagagaagagtaacagtgtgaagaaatcccagccagacttgcccatctccaagattgatcagtggctggaacaatacacccaggccatcgagaccgctggccggacccccaagctagcccgccaggcctccatagagctgcccagcatggctgtggccagtaccaagagtcggtgggagacgggtgaggtacaggctcagtctgcggccaagactccgtcctgcaaggatattgtggctggagacatgagcaagaaaagcctctgggagcagaagggaggctccaagacctcatcaacaattaagagcaccccatctgggaagaggtataagtttgtggccaccgggcatgggaagtatgagaaggtgcttgtggaagggggcccggctccctaggcgtcccatctcgcttcctgggtctgcaggtccagccggctggcaccctccatgtacccaggggagattccagccagacacccgccccccggccctggctaagaagttgcttcctgttgccagcatgacctaccctcgcctctttgattccacaagcaccttctcatacttcccatgcccggagacat

SEQ ID NO: 315859 - DNA, 1645 bp, Homo sapiens
gacaggttccaaacctcaacctgcagccggaagggggaagtgaaactcggctgggggtgggggctcagaagccgccccagaaagcactgaaagccacagcacgtacacccactccagggatctgccagcaccctgtggggcccagactacaggctgatggcggaggcttcgagtgacccgggtgccgaggagcgggaagagttgctggggcccactgctcagtggagcgtggaggacgaggaggaggccgtccacgagcaatgccagcatgagagagacaggcagcttcaggcccaggacgaggagggaggcggccatgtccccgagcggccgaagcaggagatgctcctcagcctgaagccctcggaggcccctgaactggatgaggacgagggctttggcgactggtcccagaggccagagcagcggcagcagcacgagggggcgcagggcgccttggacagcggagagcccccccagtgcaggagtcctgagggggagcaagaggacaggcccggcctgcatgcctacgaaaaggaggacagtgatgaagtccacctggaggagttgagtctgagcaaggaggggccaggcccagaggacactgtccaggacaacctgggggccgcaggggctgaggaggaacaggaggagcaccagaaatgtcagcagcccaggacacccagccccttggtcttggaggggaccatcgaacagagctcgcctcccctgagccctaccaccaaactcatcgacaggaccgagtccctaaaccgctccatagagaagagtaacagtgtgaagaaatcccagccagacttgcccatctccaagattgatcagtggctggaacaatacacccaggccatcgagaccgctggccggacccccaagctagcccgccagtaccaagagtcggtgggagacgggtgaggtacaggctcagtctgcggccaagactccgtcctgcaaggatattgtggctggagacatgagcaagaaaagcctctgggagcagaagggaggctccaagacctcatcaacaattaagagcaccccatctgggaagaggtataagtttgtggccaccgggcatgggaagtatgagaaggtgcttgtggaagggggcccggctccctaggcgtcccatctcgcttcctgggtctgcaggtccagccggctggcaccctccatgtacccaggggagattccagccagacacccgccccccggccctggctaagaagttgcttcctgttgccagcatgacctaccctcgcctctttgatgccatccgctgccacctccttttgctcctggaccctttagcctctctgcccttccactctctgaccaccgcccccgccctccccacccagctccgcttcttgttacttgggggaggaaagaaactcctgatcattggccaaagggacttacccctggagaggccaagtgccttctaggaagttaggaggttgaggcacagcctgtgcagagagggtgggtcacccccccagatccaaggggaaactgcaggtcaagggctgataacggccatgcaggatgcttgatgctgcgtcccccgctgcttgccgccccccaccccgccattttgtataataaagctccctgtgtattctca

SEQ ID NO: 315860 - DNA, 1047 bp, Homo sapiens
gcacgaggcgagctctgttcgatggtcccctccaagaccaaggggctgggtgtcctgggctgctgacatttctggtgctcctcctgttcctcctcagcccctgcggcccccaaactcatcgacaggaccgagtccctaaaccgctccatagagaagagtaacagtgtgaagaaatcccagccagacttgcccatctccaagattgatcagtggctggaacaatacacccaggccatcgagaccgctggccggacccccaagctagcccgccaggcctccatagagctgcccagcatggctgtggccagtaccaagagtcggtgggagacgggtgaggtacaggctcagtctgcggccaagactccgtcctgcaaggatattgtggctggagacatgagcaagaaaagcctctgggagcagaagggaggctccaagacctcatcaacaattaagagcaccccatctgggaagaggtataagtttgtggccaccgggcatgggaagtatgagaaggtgcttgtggaagggggcccggctccctaggcgtcccatctcgcttcctgggtctgcaggtccagccggctggcaccctccatgtacccaggggagattccagccagacacccgccccccggccctggctaagaagttgcttcctgttgccagcatgacctaccctcgcctctttgatgccatccgctgccacctccttttgctcctggaccctttagcctctctgcccttccactctctgaccaccgcccccgccctccccacccagctccgcttcttgttacttgggggaggaaagaaactcctgatcattggccaaagggacttacccctggagaggccaagtgccttctaggaagttaggaggttgaggcacagcctgtgcagagagggtgggtcacccccccagatccaaggggaaactgcaggtcaagggctgataacggccatgcaggatgcttgatgctgcgtcccccgctgcttgccgccccccaccccgccattttgtataataaagctccctgtgtattctca

SEQ ID NO: 315861 - DNA, 1129 bp, Homo sapiens
  misc_feature (1098)..(1098): n is a, c, g, or t
gacaggttccaaacctcaacctgcagccggaagggggaagtgaaactcggctgggggtgggggctcagaagccgccccagaaagcactgaaagccacagcacgtacacccactccagggatctgccagcaccctgtggggcccagactacaggctgatggcggaggcttcgagtgacccgggtgccgaggagcgggaagagttgctggggcccactgctcagtggagcgtggaggacgaggaggaggccgtccacgagcaatgccagcatgagagagacaggcagcttcaggcccaggacgaggagggaggcggccatgtccccgagcggccgaagcaggagatgctcctcagcctgaagccctcggaggcccctgaactggatgaggacgagggctttggcgactggtcccagaggccagagcagcggcagcagcacgagggggcgcagggcgccttggacagcggagagcccccccagtgcaggagtcctgagggggagcaagaggacaggcccggcctgcatgcctacgaaaaggaggacagtgatgaagtccacctggaggagttgagtctgagcaaggaggggccaggcccagaggacactgtccaggacaacctgggggccgcaggggctgaggaggaacaggaggagcaccagaaatgtcagcagcccaggacacccagccccttggtcttggaggggaccatcgaacagagctcgcctcccctgagccctaccaccaaactcatcgacaggaccgagtccctaaaccgctccatagagaagagtaacagtgtgaagaaatcccagccagacttgcccatctccaagattgatcagtggctggaacaatacacccaggccatcgagaccgctggccggacccccaagctagcccgccaggcctccatagagctgcccagcatggctgtggccagtaccaagagtcggtgggagacgggtgaggtacaggctcagtctgcggccaagactccgtcctgcaaggatattgtggctggagacatgagcaagaaaagcctctgggagcagaagggaggctccaagacctcatcaacaattaagacaccccatctnggaagaggaaagtttgcctcttctgagcagg

SEQ ID NO: 315862 - DNA, 987 bp, Homo sapiens
gacaggttccaaacctcaacctgcagccggaagggggaagtgaaactcggctgggggtgggggctcagaagccgccccagaaagcactgaaagccacagcacgtacacccactccagggatctgccagcaccctgtggggcccagactacaggctgatggcggaggcttcgagtgacccgggtgccgaggagcgggaagagttgctggggcccactgctcagtggagcgtggaggacgaggaggaggccgtccacgagcaatgccagcatgagagagacaggcagcttcaggcccaggacgaggagggaggcggccatgtccccgagcggccgaagcaggagatgctcctcagcctgaagccctcggaggcccctgaactggatgaggacgagggctttggcgactggtcccagaggccagagcagcggcagcagcacgagggggcgcagggcgccttggacagcggagagcccccccagtgcaggagtcctgagggggagcaagaggacaggcccggcctgcatgcctacgaaaaggaggacagtgatgaagtccacctggaggagttgagtctgagcaaggaggggccaggcccagaggacactgtccaggacaacctgggggccgcaggggctgaggaggaacaggaggagcaccagaaatgtcagcagcccaggacacccagccccttggtcttggaggggaccatcgaacagagctcgcctcccctgagccctaccaccaaactcatcgacaggaccgagtccctaaaccgctccatagagaagagtaacagtgtgaagaaatcccagccagacttgcccatctccaagattgatcagtggctggaacaatacacccaggccatcgaggtatgacctggctcccctctgctgtcaggtccctcctgcatcctggcaccattccttcatccaaccaacgcccttccatccaatcagtgccgccttattcaaccaacaccctat

SEQ ID NO: 315863 - DNA, 1059 bp, Homo sapiens
  misc_feature (862)..(862): n is a, c, g, or t
gggtttggcagagatgtgttttcctgttgccagcatgacctaccctcgcctctttgatgccatccgctgccacctccttttgctcctggaccctttagcctctctgcccttccactctctgaccaccgcccccgccctccccacccagctccgcttcttgttacttgggggaggaaagaaactcctgatcattggccaaagggacttacccctggagaggccaagtgccttctaggaagttaggaggttgaggcacagcctgtgcagagagggtgggtcacccccccagatccaaggggaaactgcaggtcaagggctgataacggccatgcaggatgcttgatgctgcgtcccccgctgcttgccgccccccaccccgccattttgtataataaagctccctgtgtattctcaaaaaaaaaaaaaaaagaaaaaaaaaaaataaaaagggggggcggttcaaaattttccctccggggggccaaatttaagctaccccagttttttgttaaaagtgggcccctatggggggcttttaaaaagtaggcaggggccgtttaacacacgttcgtttacgtggaaaacctttgctctacgctgtggggcccttttgtagaggggaccccttactttcctggggcgtgtgacactattgcgccaacctacccttacagagatttaaacgagccccaaggcgcaaattattacaattagcacgggtgtactacgtgtgtaaccagtagcgtgcaatatttcattggcactgctagaaaagattttgggccgtaacgggggagatttttgaattttgaatggaaaaaatttttttatttaccgggggagcttatgttataaataccgngatatatcagatcagtaagacgacatgatagacaagagagaaatgatgatagaagataaagaacgtgatagagcgataggattaacatactggaatcgataggcatcatgcaagatctgatatatcataatactagagcataatgatcaatgaagagatcaaagaatcaataagagaaggaagagaataagccaaaa

SEQ ID NO: 315864 - DNA, 1441 bp, Homo sapiens
acggcaagagctctgccagggcagtcccagctggcccaggcgccgcagcgctcccgagggccgtcgagcaaaggcgggaggcgcagccgggctgtcggtggacctgtaggtatcagggctccttggtcccctcctgcgggaagcaggcaccgagtggggctgcatgtagacgcatgcgagggtgagagctgcggcggaggacgctgatcgcggagtgcaggcgagggccccagaaaggtcccgcaggtcgcctcgctcgtggcacgggctcggcagcgttgtggttagtgacacggaggaagacagaaagccatatgcacagcacgcagaacaggaggaggggggaagaaagagcaggcacggggcaggcagagccgcagccacgccgccgggatgcagcaggcagggccacccacgagcagggcggggccctaacctccgacccaggctggtcgccgcagatgggggcagagatgtgaaacagctgcagagcgggacaagggtgctgccggcacagggctgaccacagagcacatcaaaagaggcccactgctcagtggagcgtggaggacgaggaggaggccgtccacgagcaatgccagcatgagagagacaggcagcttcaggcccaggacgaggagggaggcggccatgtccccgagcggccgaagcaggagatgctcctcagcctgaagccctcggaggcccctgaactggatgaggacgagggctttggcgactggtcccagaggccagagcagcggcagcagcacgagggggcgcagggcgccttggacagcggagagcccccccagtgcaggagtcctgagggggagcaagaggacaggtgagtgagggcctcgagggcgggcgctgggcagagcagggctccctctggacctcgagggcgggcgctgggcagagcagggctccctctggacctcgagggcgggcgctgggcagagcagggcaccgcggagctcccttcaggccctcaacctgcgcctgagcagccaccccatcctcccctttccaagcagagcctgaaatgcccccatggccaggaaagggggagacaggaggggagggaggaagagggcgagacagcatggtggccggcgaggggccgcgaggaaacctcattctggggctccccagggcccctgggccccatccaggcagctgcgaggccaggccgggtgctgccacatcagcacacagctgcggccgcttccgtaatggaggctgagagcccgccgccgccccttcctccctcggggctggctgatctccattcccacggaggggagcaggtatttccagatgtgcatgccggagagtcggccgggaggacgcactttccagatgtggggatgtgtgtgcctgtctcaaccccaacaggcccaacaggggctgctcccgagccccacttcactacccc

SEQ ID NO: 315865 - DNA, 215 bp, Homo sapiens
tttaacacccatagtaggcctaaaagcagccaccaattatgaaagccacagcacgtacacccactccagggatctgccagcaccctgtggggcccagactacaggctgatggcggaggcttcgagtgacccgggtgccgaggagcgggaagagttgctggggtaagggtctgcggcgacgcccggcgccctgtgccgtgtccacgggtgcatagt

SEQ ID NO: 315866 - DNA, 392 bp, Homo sapiens
atcccaggccccctggccaggtaaggcaaggcgggagagaagggcccagggcttctactccccaagatccaggggtctgcccttgtgacatacccttctgctgcccccaggatattgtggctggagacatgagcaagaaaagcctctgggagcagaagggaggctccaagacctcatcaacaattaaggtagagcctaaatgtggttggtgcaggcagggtgggtgcagcaggggagggcaaagagggactgtcctctgtgcatctgggagggcttcccagaggcggaggcagcatcatctcctttctgctgctctcaccttcactcttggtctcctttcccaacagagcaccccatctgggaagaggtataagtttgtggccaccgggcat

SEQ ID NO: 315867 - DNA, 418 bp, Homo sapiens
agcctgcttaggactgctctcagctaccggcctcctctggatgacgggactgcaggaaccacgagaaccccagttctagctcccagggtgggcaggctgcttggcaggcaggccgccttccctccaccaggagtcaggtctccagccagaggtcctgacccagggcacaagtgctcgcactgggaagcaggcctctgaggcaggacgtcttctcctgtggtggagtgggggtgtgggcagggcagggaggccagcagagagaggctcggggagcaggctctgtgggcttgcaggaggcaggtctgtggcccctccctggaccctagcctaatgccccctgcaccccatgcctatgttccagcttcctgggtctgcaggtccagccggctggcaccctccatgtacccaggggagattc

SEQ ID NO: 315868 - DNA, 464 bp, Homo sapiens
ctgtggcgtgactgtccctctgtgtcccccactaggcccactgctcagtggagcgtggaggacgaggaggaggccgtccacgagcaatgccagcatgagagagacaggcagcttcaggcccaggacgaggagggaggcggccatgtccccgagcggccgaagcaggagatgctgtgagcagccccataacgcgtgcctgggctctagcccctatccgtgtaccctggggcctgggcagagggggaggtcaagggcctgggcttgggggttccagtgcaggatgagagcgaggaagggcccccaggagcaggcgtgggagtgggtgagtgctcctggggcgagggtggccacagccctagaggagggtctgccaatacctggctgcctcctgggcgctgacccaggctctgtgtccgtgccctggcccttgctcggaccgcctctgaccccagccacgcagcctg

SEQ ID NO: 315869 - DNA, 909 bp, Homo sapiens
acgataatagtcataggtcgaggcctgggtgtttaatcaggctgaggcctcaccctgtggggcccagactacaggctgatggcggaggcttcgagtgacccgggtgccgaggagcgggaagagttgctggggcccactgctcagtggagcgtggaggacgaggaggaggccgtccacgagcaatgccagcatgagagagacaggcagcttcaggcccaggacgaggagggaggcggccatgtccccgagcggccgaagcaggagatgctcctcagcctgaagccctcggaggcccctgaactggatgaggacgagggctttggcgactggtcccagaggccagagcagcggcagcagcacgagggggcgcagggcgccttggacagcggagagcccccccagtgcaggagtcctgagggggagcaagaggacaggcccggcctgcatgcctacgaaaaggaggacagtgatgaagtccacctggaggagttgagtctgagcaaggaggggccaggcccagaggacactgtccaggacaacctgggggccgcaggggctgaggaggaacaggaggagcaccagaaatgtcagcagcccaggacacccagccccttggtcttggaggggaccatcgaacagagctcgcctcccctgagccctaccaccaaactcatcgacaggaccgagtccctaaaccgctccatagagaagagtaacagtgtgaagaaatcccagccagacttgcccatctccaagattgatcagtggctggaacaatacacccaggccatcgaggtatgacctggctcccctctgctgtcaggtccctcctgcatcctggcaccattccttcatccaaccaacgcccttccatccaatcagtgccgccttattcaaccaacaccctat

SEQ ID NO: 315870 - DNA, 450 bp, Homo sapiens
  misc_feature (419)..(419): n is a, c, g, or t
gggagtcacaaggtagagatctggagaccgaggggggctctgggagaggcttgggcaggttgggagaagccttgtgggagacatggggcctgacacatcttctaccctccagtaacagtgtgaagaaatcccagccagacttgcccatctccaagattgatcagtggctggaacaatacacccaggccatcgagaccgctggccggacccccaagctagcccgccaggcctccatagagctgcccagcatggctgtggccagtaccaagagtcggtgggagacgggtgaggtacaggctcagtctgcggccaagactccgtcctgcaaggatattgtggctggagacatgagcaagaaaagcctctgggagcagaagggaggctccaagacctcatcaacaattaagacaccccatctnggaagaggaaagtttgcctcttctgagcagg

SEQ ID NO: 315871 - DNA, 2325 bp, Homo sapiens
  misc_feature (2128)..(2128): n is a, c, g, or t
gacaggttccaaacctcaacctgcagccggaagggggaagtgaaactcggctgggggtgggggctcagaagccgccccagaaagcactgaaagccacagcacgtacacccactccagggatctgccagcaccctgtggggcccagactacaggctgatggcggaggcttcgagtgacccgggtgccgaggagcgggaagagttgctggggcccactgctcagtggagcgtggaggacgaggaggaggccgtccacgagcaatgccagcatgagagagacaggcagcttcaggcccaggacgaggagggaggcggccatgtccccgagcggccgaagcaggagatgctcctcagcctgaagccctcggaggcccctgaactggatgaggacgagggctttggcgactggtcccagaggccagagcagcggcagcagcacgagggggcgcagggcgccttggacagcggagagcccccccagtgcaggagtcctgagggggagcaagaggacaggcccggcctgcatgcctacgaaaaggaggacagtgatgaagtccacctggaggagttgagtctgagcaaggaggggccaggcccagaggacactgtccaggacaacctgggggccgcaggggctgaggaggaacaggaggagcaccagaaatgtcagcagcccaggacacccagccccttggtcttggaggggaccatcgaacagagctcgcctcccctgagccctaccaccaaactcatcgacaggaccgagtccctaaaccgctccatagagaagagtaacagtgtgaagaaatcccagccagacttgcccatctccaagattgatcagtggctggaacaatacacccaggccatcgagaccgctggccggacccccaagctagcccgccaggcctccatagagctgcccagcatggctgtggccagtaccaagagtcggtgggagacgggtgaggtacaggctcagtctgcggccaagactccgtcctgcaaggatattgtggctggagacatgagcaagaaaagcctctgggagcagaagggaggctccaagacctcatcaacaattaagagcaccccatctgggaagaggtataagtttgtggccaccgggcatgggaagtatgagaaggtgcttgtggaagggggcccggctccctaggcgtcccatctcgcttcctgggtctgcaggtccagccggctggcaccctccatgtacccaggggagattccagccagacacccgccccccggccctggctaagaagttgcttcctgttgccagcatgacctaccctcgcctctttgatgccatccgctgccacctccttttgctcctggaccctttagcctctctgcccttccactctctgaccaccgcccccgccctccccacccagctccgcttcttgttacttgggggaggaaagaaactcctgatcattggccaaagggacttacccctggagaggccaagtgccttctaggaagttaggaggttgaggcacagcctgtgcagagagggtgggtcacccccccagatccaaggggaaactgcaggtcaagggctgataacggccatgcaggatgcttgatgctgcgtcccccgctgcttgccgccccccaccccgccattttgtataataaagctccctgtgtattctcaaaaaaaaaaaaaaaagaaaaaaaaaaaataaaaagggggggcggttcaaaattttccctccggggggccaaatttaagctaccccagttttttgttaaaagtgggcccctatggggggcttttaaaaagtaggcaggggccgtttaacacacgttcgtttacgtggaaaacctttgctctacgctgtggggcccttttgtagaggggaccccttactttcctggggcgtgtgacactattgcgccaacctacccttacagagatttaaacgagccccaaggcgcaaattattacaattagcacgggtgtactacgtgtgtaaccagtagcgtgcaatatttcattggcactgctagaaaagattttgggccgtaacgggggagatttttgaattttgaatggaaaaaatttttttatttaccgggggagcttatgttataaataccgngatatatcagatcagtaagacgacatgatagacaagagagaaatgatgatagaagataaagaacgtgatagagcgataggattaacatactggaatcgataggcatcatgcaagatctgatatatcataatactagagcataatgatcaatgaagagatcaaagaatcaataagagaaggaagagaataagccaaaa

SEQ ID NO: 315872 - DNA, 1791 bp, Homo sapiens
ctggcagggctggaagtcggtcttcggacagagcccgtcctgcccagaagcccaggcgagccagcagcaggggtgcagggaccgagtggcccagccccctgggcagggtgtcagggccagagcccagaggacggcggttcaggcttcagtcccagccggcgaaccagagctgggcagagcggccagcaagcggcagccagggtgccctgggcactcgacccccagatgcccctgctggaaccgtaaaggggaggcaccctgaggccagagggagcatggccccggggactgagcatccggctcagagcggcttggcagaggcccactgctcagtggagcgtggaggacgaggaggaggccgtccacgagcaatgccagcatgagagagacaggcagcttcaggcccaggacgaggagggaggcggccatgtccccgagcggccgaagcaggagatgctcctcagcctgaagccctcggaggcccctgaactggatgaggacgagggctttggcgactggtcccagaggccagagcagcggcagcagcacgagggggcgcagggcgccttggacagcggagagcccccccagtgcaggagtcctgagggggagcaagaggacaggcccggcctgcatgcctacgaaaaggaggacagtgatgaagtccacctggaggagttgagtctgagcaaggaggggccaggcccagaggacactgtccaggacaacctgggggccgcaggggctgaggaggaacaggaggagcaccagaaatgtcagcagcccaggacacccagccccttggtcttggaggggaccatcgaacagagctcgcctcccctgagccctaccaccaaactcatcgacaggaccgagtccctaaaccgctccatagagaagagtaacagtgtgaagaaatcccagccagacttgcccatctccaagattgatcagtggctggaacaatacacccaggccatcgagaccgctggccggacccccaagctagcccgccaggcctccatagagctgcccagcatggctgtggccagtaccaagagtcggtgggagacgggtgaggtacaggctcagtctgcggccaagactccgtcctgcaaggatattgtggctggagacatgagcaagaaaagcctctgggagcagaagggaggctccaagacctcatcaacaattaagagcaccccatctgggaagaggtataagtttgtggccaccgggcatgggaagtatgagaaggtgcttgtggaagggggcccggctccctaggcgtcccatctcgcttcctgggtctgcaggtccagccggctggcaccctccatgtacccaggggagattccagccagacacccgccccccggccctggctaagaagttgcttcctgttgccagcatgacctaccctcgcctctttgatgccatccgctgccacctccttttgctcctggaccctttagcctctctgcccttccactctctgaccaccgcccccgccctccccacccagctccgcttcttgttacttgggggaggaaagaaactcctgatcattggccaaagggacttacccctggagaggccaagtgccttctaggaagttaggaggttgaggcacagcctgtgcagagagggtgggtcacccccccagatccaaggggaaactgcaggtcaagggctgataacggccatgcaggatgcttgatgctgcgtcccccgctgcttgccgccccccaccccgccattttgtataataaagctccctgtgtattctca

SEQ ID NO: 315873 - DNA, 1559 bp, Homo sapiens
acacagcttcttggtgctccaaagacgggcggtaggaggaagatcaaagaagcgagaaatggatgctggaggaacgcagtgaggccaggcccactgctcagtggagcgtggaggacgaggaggaggccgtccacgagcaatgccagcatgagagagacaggcagcttcaggcccaggacgaggagggaggcggccatgtccccgagcggccgaagcaggagatgctcctcagcctgaagccctcggaggcccctgaactggatgaggacgagggctttggcgactggtcccagaggccagagcagcggcagcagcacgagggggcgcagggcgccttggacagcggagagcccccccagtgcaggagtcctgagggggagcaagaggacaggcccggcctgcatgcctacgaaaaggaggacagtgatgaagtccacctggaggagttgagtctgagcaaggaggggccaggcccagaggacactgtccaggacaacctgggggccgcaggggctgaggaggaacaggaggagcaccagaaatgtcagcagcccaggacacccagccccttggtcttggaggggaccatcgaacagagctcgcctcccctgagccctaccaccaaactcatcgacaggaccgagtccctaaaccgctccatagagaagagtaacagtgtgaagaaatcccagccagacttgcccatctccaagattgatcagtggctggaacaatacacccaggccatcgagaccgctggccggacccccaagctagcccgccaggcctccatagagctgcccagcatggctgtggccagtaccaagagtcggtgggagacgggtgaggtacaggctcagtctgcggccaagactccgtcctgcaaggatattgtggctggagacatgagcaagaaaagcctctgggagcagaagggaggctccaagacctcatcaacaattaagagcaccccatctgggaagaggtataagtttgtggccaccgggcatgggaagtatgagaaggtgcttgtggaagggggcccggctccctaggcgtcccatctcgcttcctgggtctgcaggtccagccggctggcaccctccatgtacccaggggagattccagccagacacccgccccccggccctggctaagaagttgcttcctgttgccagcatgacctaccctcgcctctttgatgccatccgctgccacctccttttgctcctggaccctttagcctctctgcccttccactctctgaccaccgcccccgccctccccacccagctccgcttcttgttacttgggggaggaaagaaactcctgatcattggccaaagggacttacccctggagaggccaagtgccttctaggaagttaggaggttgaggcacagcctgtgcagagagggtgggtcacccccccagatccaaggggaaactgcaggtcaagggctgataacggccatgcaggatgcttgatgctgcgtcccccgctgcttgccgccccccaccccgccattttgtataataaagctccctgtgtattctca

SEQ ID NO: 315874 - DNA, 1576 bp, Homo sapiens
acggcaagagctctgccagggcagtcccagctggcccaggcgccgcagcgctcccgagggccgtcgagcaaaggcgggaggcgcagccgggctgtcggtggacctgcccactgctcagtggagcgtggaggacgaggaggaggccgtccacgagcaatgccagcatgagagagacaggcagcttcaggcccaggacgaggagggaggcggccatgtccccgagcggccgaagcaggagatgctcctcagcctgaagccctcggaggcccctgaactggatgaggacgagggctttggcgactggtcccagaggccagagcagcggcagcagcacgagggggcgcagggcgccttggacagcggagagcccccccagtgcaggagtcctgagggggagcaagaggacaggcccggcctgcatgcctacgaaaaggaggacagtgatgaagtccacctggaggagttgagtctgagcaaggaggggccaggcccagaggacactgtccaggacaacctgggggccgcaggggctgaggaggaacaggaggagcaccagaaatgtcagcagcccaggacacccagccccttggtcttggaggggaccatcgaacagagctcgcctcccctgagccctaccaccaaactcatcgacaggaccgagtccctaaaccgctccatagagaagagtaacagtgtgaagaaatcccagccagacttgcccatctccaagattgatcagtggctggaacaatacacccaggccatcgagaccgctggccggacccccaagctagcccgccaggcctccatagagctgcccagcatggctgtggccagtaccaagagtcggtgggagacgggtgaggtacaggctcagtctgcggccaagactccgtcctgcaaggatattgtggctggagacatgagcaagaaaagcctctgggagcagaagggaggctccaagacctcatcaacaattaagagcaccccatctgggaagaggtataagtttgtggccaccgggcatgggaagtatgagaaggtgcttgtggaagggggcccggctccctaggcgtcccatctcgcttcctgggtctgcaggtccagccggctggcaccctccatgtacccaggggagattccagccagacacccgccccccggccctggctaagaagttgcttcctgttgccagcatgacctaccctcgcctctttgatgccatccgctgccacctccttttgctcctggaccctttagcctctctgcccttccactctctgaccaccgcccccgccctccccacccagctccgcttcttgttacttgggggaggaaagaaactcctgatcattggccaaagggacttacccctggagaggccaagtgccttctaggaagttaggaggttgaggcacagcctgtgcagagagggtgggtcacccccccagatccaaggggaaactgcaggtcaagggctgataacggccatgcaggatgcttgatgctgcgtcccccgctgcttgccgccccccaccccgccattttgtataataaagctccctgtgtattctca

SEQ ID NO: 315875 - DNA, 1381 bp, Homo sapiens
gacaggttccaaacctcaacctgcagccggaagggggaagtgaaactcggctgggggtgggggctcagaagccgccccagaaagcactgaaagccacagcacgtacacccactccagggatctgccagcaccctgtggggcccagactacaggctgatggcggaggcttcgagtgacccgggtgccgaggagcgggaagagttgctggggcccactgctcagtggagcgtggaggacgaggaggaggccgtccacgagcaatgccagcatgagagagacaggcagcttcaggcccaggacgaggagggaggcggccatgtccccgagcggccgaagcaggagatgctcctcagcctgaagccctcggaggcccctgaactggatgaggacgagggctttggcgactggtcccagaggccagagcagcggcagcagcacgagggggcgcagggcgccttggacagcggagagcccccccagtgcaggagtcctgagggggagcaagaggacaggcccggcctgcatgcctacgaaaaggaggacagtgatgaagtccacctggaggagttgagtctgagcaaggaggggccaggcccagaggacactgtccaggacaacctgggggccgcaggggctgaggaggaacaggaggagcaccagaaatgtcagcagcccaggacacccagccccttggtcttggaggggaccatcgaacagagctcgcctcccctgagccctaccaccaaactcatcgacaggaccgagtccctaaaccgctccatagagaagagtaacagtgtgaagaaatcccagccagacttgcccatctccaagattgatcagtggctggaacaatacacccaggccatcgagaccgctggccggacccccaagctagcccgccaggcctccatagagctgcccagcatggctgtggccagtaccaagagtcggtgggagacgggtgaggtacaggctcagtctgcggccaagactccgtcctgcaaggatattgtggctggagacatgagcaagaaaagcctctgggagcagaagggaggctccaagacctcatcaacaattaagagcaccccatctgggaagaggtataagtttgtggccaccgggcatgggaagtatgagaaggtgcttgtggaagggggcccggctccctaggcgtcccatctcgcttcctgggtctgcaggtccagccggctggcaccctccatgtacccaggggagattccagccagacacccgccccccggccctggctaagaagttgcttcctgttgccagcatgacctaccctcgcctctttgatctgcttgccgccccccaccccgccattttgtataataaagctccctgtgtattctca

SEQ ID NO: 315876 - DNA, 1629 bp, Homo sapiens
gacaggttccaaacctcaacctgcagccggaagggggaagtgaaactcggctgggggtgggggctcagaagccgccccagaaagcactgaaagccacagcacgtacacccactccagggatctgccagcaccctgtggggcccagactacaggctgatggcggaggcttcgagtgacccgggtgccgaggagcgggaagagttgctggggcccactgctcagtggagcgtggaggacgaggaggaggccgtccacgagcaatgccagcatgagagagacaggcagcttcaggcccaggacgaggagggaggcggccatgtccccgagcggccgaagcaggagatgctcctcagcctgaagccctcggaggcccctgaactggatgaggacgagggctttggcgactggtcccagaggccagagcagcggcagcagcacgagggggcgcagggcgccttggacagcggagagcccccccagtgcaggagtcctgagggggagcaagaggacaggcccggcctgcatgcctacgaaaaggaggacagtgatgaagtccacctggaggagttgagtctgagcaaggaggggccaggcccagaggacactgtccaggacaacctgggggccgcaggggctgaggaggaacaggaggagcaccagaaatgtcagcagcccaggacacccagccccttggtcttggaggggaccatcgaacagagctcgcctcccctgagccctaccaccaaactcatcgacaggaccgagtccctaaaccgctccatagagaagagtaacagtgtgaagaaatcccagccagacttgcccatctccaagattgatcagtggctggaacaatacacccaggccatcgagaccgctggccggacccccaagctagcccgccaggcctccatagagctgcccagcatggctgtggccagtaccaagagtcggtgggagacgggtgaggtacaggctcagtctgcggccaagactccgtcctgcaaggatattgtggctggagacatgagcaagagcaccccatctgggaagaggtataagtttgtggccaccgggcatgggaagtatgagaaggtgcttgtggaagggggcccggctccctaggcgtcccatctcgcttcctgggtctgcaggtccagccggctggcaccctccatgtacccaggggagattccagccagacacccgccccccggccctggctaagaagttgcttcctgttgccagcatgacctaccctcgcctctttgatgccatccgctgccacctccttttgctcctggaccctttagcctctctgcccttccactctctgaccaccgcccccgccctccccacccagctccgcttcttgttacttgggggaggaaagaaactcctgatcattggccaaagggacttacccctggagaggccaagtgccttctaggaagttaggaggttgaggcacagcctgtgcagagagggtgggtcacccccccagatccaaggggaaactgcaggtcaagggctgataacggccatgcaggatgcttgatgctgcgtcccccgctgcttgccgccccccaccccgccattttgtataataaagctccctgtgtattctca

SEQ ID NO: 315877 - DNA, 851 bp, Homo sapiens
gcaattgttacgggccccctcgagtcgcggttctataagttgataccgctggccggacccccaagctagcccgccaggcctccatagagctgcccagcatggctgtggccagtaccaagagtcggtgggagacgggtgaggtacaggctcagtctgcggccaagactccgtcctgcaaggatattgtggctggagacatgagcaagaaaagcctctgggagcagaagggaggctccaagacctcatcaacaattaagagcaccccatctgggaagaggtataagtttgtggccaccgggcatgggaagtatgagaaggtgcttgtggaagggggcccggctccctaggcgtcccatctcgcttcctgggtctgcaggtccagccggctggcaccctccatgtacccaggggagattccagccagacacccgccccccggccctggctaagaagttgcttcctgttgccagcatgacctaccctcgcctctttgatgccatccgctgccacctccttttgctcctggaccctttagcctctctgcccttccactctctgaccaccgcccccgccctccccacccagctccgcttcttgttacttgggggaggaaagaaactcctgatcattggccaaagggacttacccctggagaggccaagtgccttctaggaagttaggaggttgaggcacagcctgtgcagagagggtgggtcacccccccagatccaaggggaaactgcaggtcaagggctgataacggccatgcaggatgcttgatgctgcgtcccccgctgcttgccgccccccaccccgccattttgtataataaagctccctgtgtattctca

SEQ ID NO: 315878 - DNA, 946 bp, Homo sapiens
gacaggttccaaacctcaacctgcagccggaagggggaagtgaaactcggctgggggtgggggctcagaagccgccccagaaagcactgaaagccacagcacgtacacccactccagggatctgccagcaccctgtggggcccagactacaggctgatggcggaggcttcgagtgacccgggtgccgaggagcgggaagagttgctggggcccactgctcagtggagcgtggaggacgaggaggaggccgtccacgagcaatgccagcatgagagagacaggcagcttcaggcccaggacgaggagggaggcggccatgtccccgagcggccgaagcaggagatgctcctcagcctgaagccctcggaggcccctgaactggatgaggacgagggctttggcgactggtcccagaggccagagcagcggcagcagcacgagggggcgcagggcgccttggacagcggagagcccccccagtgcaggagtcctgagggggagcaagaggacaggcccggcctgcatgcctacgaaaaggaggacagtgatgaagtccacctggaggagttgagtctgagcaaggaggggccaggcccagaggacactgtccaggacaacctgggggccgcaggggctgaggaggaacaggaggagcaccagaaatgtcagcagcccaggacacccagccccttggtcttggaggggaccatcgaacagagctcgcctcccctgagccctaccaccaaactcatcgacaggaccgagtccctaaaccgctccatagagaagagtaacagtgtgaagaaatcccagccagacttgcccatctccaagattgatcagtggctggaacaatacacccaggccatcgagacgtggccggacccaagtagcgcaggctcataagttgccagaatggtttggcagtcccagatcgtggaaacgt

SEQ ID NO: 315879 - DNA, 781 bp, Homo sapiens
tttaacacccatagtaggcctaaaagcagccaccaattatgaaagccacagcacgtacacccactccagggatctgccagcaccctgtggggcccagactacaggctgatggcggaggcttcgagtgacccgggtgccgaggagcgggaagagttgctggggcccactgctcagtggagcgtggaggacgaggaggaggccgtccacgagcaatgccagcatgagagagacaggcagcttcaggcccaggacgaggagggaggcggccatgtccccgagcggccgaagcaggagatgctcctcagcctgaagccctcggaggcccctgaactggatgaggacgagggctttggcgactggtcccagaggccagagcagcggcagcagttcctgttgccagcatgacctaccctcgcctctttgatgccatccgctgccacctccttttgctcctggaccctttagcctctctgcccttccactctctgaccaccgcccccgccctccccacccagctccgcttcttgttacttgggggaggaaagaaactcctgatcattggccaaagggacttacccctggagaggccaagtgccttctaggaagttaggaggttgaggcacagcctgtgcagagagggtgggtcacccccccagatccaaggggaaactgcaggtcaagggctgataacggccatgcaggatgcttgatgctgcgtcccccgctgcttgccgccccccaccccgccattttgtataataaagctccctgtgtattctca

SEQ ID NO: 315880 - DNA, 911 bp, Homo sapiens
  misc_feature (19)..(19): n is a, c, g, or t
  misc_feature (872)..(872): n is a, c, g, or t
aaaggctaggtacgaggcnggtgttgaatcggccgaggcgcaagcgaggcagccatgtcttatcccgctgatgattatgagtctgaggcggcttatgacccctacgcttatcccagcgactatgatatgcacacaggagatccaaagcaggaccttgcttatgaacgtcagtatgaacagcaaacctatcaggtgatccctgaggtgatcaaaaacttcatccagtatttccacaaaactgtctcagatttgattgaccagaaagtgtatgagctacaggccagtcgtgtctccagtgatgtcattgaccagaaggtgtatgagatccaggacatctatgagaacagctggaccaagctgactgaaagattcttcaagaatacaccttggcccgaggctgaagccattgctccacaggttggcaatgatgctgtcttcctgattttatacaaagaattatactacaggcacatatatgccaaagtcagtgggggaccttccttggagcagaggtttgaatcctattacaactactgcaatctcttcaactacattcttaatgccgatggtcctgctccccttgaactacccaaccagtggctctgggatattatcgatgagttcatctaccagtttcagtcattcagtcagtaccgctgtaagactgccaagaagtcagaggaggagattgactttcttcgttccaatcccaaaatctggaatgttcatagtgtcctcaatgtccttcattccctggtagacaaatccaacatcaaccgacagttggaggtatacacaagcggagggtgaccctgagagtgtgggtgggagtatgggggggcccctctacaatggctggtacttcagccggncgggtttcgccggccccggtggggattttccggcccggg

SEQ ID NO: 315881 - DNA, 2226 bp, Homo sapiens
tcatttagcgtctttccggcggtgctcgcaagcgaggcagccatgtcttatcccgctgatgattatgagtctgaggcggcttatgacccctacgcttatcccagcgactatgatatgcacacaggagatccaaagcaggaccttgcttatgaacgtcagtatgaacagcaaacctatcaggtgatccctgaggtgatcaaaaacttcatccagtatttccacaaaactgtctcagatttgattgaccagaaagtgtatgagctacaggccagtcgtgtctccagtgatgtcattgaccagaaggtgtatgagatccaggacatctatgagaacagctggaccaagctgactgaaagattcttcaagaatacaccttggcccgaggctgaagccattgctccacaggttggcaatgatgctgtcttcctgattttatacaaagaattatactacaggcacatatatgccaaagtcagtgggggaccttccttggagcagaggtttgaatcctattacaactactgcaatctcttcaactacattcttaatgccgatggtcctgctccccttgaactacccaaccagtggctctgggatattatcgatgagttcatctaccagtttcagtcattcagtcagtaccgctgtaagactgccaagaagtcagaggaggagattgactttcttcgttccaatcccaaaatctggaatgttcatagtgtcctcaatgtccttcattccctggtagacaaatccaacatcaaccgacagttggaggtatacacaagcggaggtgaccctgagagtgtggctggggagtatgggcggcactccctctacaaaatgcttggttacttcagcctggtcgggcttctccgcctgcactccctgttaggagattactaccaggccatcaaggtgctggagaacatcgaactgaacaagaagagtatgtattcccgtgtgccagagtgccaggtcaccacatactattatgttgggtttgcatatttgatgatgcgtcgttaccaggatgccatccgggtcttcgccaacatcctcctctacatccagaggaccaagagcatgttccagaggaccacgtacaagtatgagatgattaacaagcagaatgagcagatgcatgcgctgctggccattgccctcacgatgtaccccatgcgtattgatgagagcattcacctccagctgcgggagaaatatggggacaagatgttgcgcatgcagaaaggtgacccacaagtctatgaagaacttttcagttactcctgccccaagttcctgtcgcctgtagtgcccaactatgataatgtgcaccccaactaccacaaagagcccttcctgcagcagctgaaggtgttttctgatgaagtacagcagcaggcccagctttcaaccatccgcagcttcctgaagctctacaccaccatgcctgtggccaagctggctggcttcctggacctcacagagcaggagttccggatccagcttcttgtcttcaaacacaagatgaagaacctcgtgtggaccagcggtatctcagccctggatggtgaatttcagtcagcctcagaggttgacttctacattgataaggacatgatccacatcgcggacaccaaggtcgccaggcgttatggggatttcttcatccgtcagatccacaaatttgaggagcttaatcgaaccctgaagaagatgggacagagaccttgatgatattcacacacattcaggaacctgttttgatgtattataggcaggaagtgtttttgctaccgtgaaacctttacctagatcagccatcagcctgtcaactcagttaacaagttaaggaccgaagtgtttcaagtggatctcagtaaaggatctttggagccagaaaaaaagaaaaaaacaaaaagaattaaaaaaaaaaaaaagagaaaaacaaacaaaacttgggggggcgccaggcgccgtcgaaaagttttaaaacacaactgtatgttggaggccggggaccaagagggaggtgaacgatggccaagagagggagcccacaagaacaccgggggccaaccacggacggcggtggcgtcctacccaaaaaaaaaaccgcgggtgggacacggagggtcgtggaacaacacccggagggccgcgaggcacacgcgcgtctacaagcggccgagggccgaaataatggccgcgcgtggttggaga

SEQ ID NO: 315882 - DNA, 2344 bp, Homo sapiens
tcatttagcgtctttccggcggtgctcgcaagcgaggcagccatgtcttatcccgctgatgattatgagtctgaggcggcttatgacccctacgcttatcccagcgactatgatatgcacacaggagatccaaagcaggaccttgcttatgaacgtcagtatgaacagcaaacctatcaggtgatccctgaggtgatcaaaaacttcatccagtatttccacaaaactgtctcagatttgattgaccagaaagtgtatgagctacaggccagtcgtgtctccagtgatgtcattgaccagaaggtgtatgagatccaggacatctatgagaacagctggaccaagctgactgaaagattcttcaagaatacaccttggcccgaggctgaagccattgctccacaggttggcaatgatgctgtcttcctgattttatacaaagaattatactacaggcacatatatgccaaagtcagtgggggaccttccttggagcagaggtttgaatcctattacaactactgcaatctcttcaactacattcttaatgccgatggtcctgctccccttgaactacccaaccagtggctctgggatattatcgatgagttcatctaccagtttcagtcattcagtcagtaccgctgtaagactgccaagaagtcagaggaggagattgactttcttcgttccaatcccaaaatctggaatgttcatagtgtcctcaatgtccttcattccctggtagacaaatccaacatcaaccgacagttggaggtatacacaagcggaggtgaccctgagagtgtggctggggagtatgggcggcactccctctacaaaatgcttggttacttcagcctggtcgggcttctccgcctgcactccctgttaggagattactaccaggccatcaaggtgctggagaacatcgaactgaacaagaagagtatgtattcccgtgtgccagagtgccaggtcaccacatactattatgttgggtttgcatatttgatgatgcgtcgttaccaggatgccatccgggtcttcgccaacatcctcctctacatccagaggaccaagagcatgttccagaggaccacgtacaagtatgagatgattaacaagcagaatgagcagatgcatgcgctgctggccattgccctcacgatgtaccccatgcgtattgatgagagcattcacctccagctgcgggagaaatatggggacaagatgttgcgcatgcagaaaggtgacccacaagtctatgaagaacttttcagttactcctgccccaagttcctgtcgcctgtagtgcccaactatgataatgtgcaccccaactaccacaaagagcccttcctgcagcagctgaaggtgttttctgatgaagtacagcagcaggcccagctttcaaccatccgcagcttcctgaagctctacaccaccatgcctgtggccaagctggctggcttcctggacctcacagagcaggagttccggatccagcttcttgtcttcaaacacaagatgaagaacctcgtgtggaccagcggtatctcagccctggatggtgaatttcagtcagcctcagaggttgacttctacattgataaggacatgatccacatcgcggacaccaaggtcgccaggcgttatggggatttcttcatccgtcagatccacaaatttgaggagcttaatcgaaccctgaagaagatgggacagagaccttgatgatattcacacacattcaggaacctgttttgatgtattataggcaggaagtgtttttgctaccgtgaaacctttacctagatcagccatcagcctgtcaactcagttaacaagttaaggaccgaagtgtttcaagtggatctcagtaaaggatctttggagccagatttgtcgtctcattattgtaggagagaatttgtgggttgtggcagtaatacatttcccatgtgtcctgatgctttcaggatacatcagttgttagtgtttaaattgagttatttttattttgtgcttttgagatggagtctcactctgtctcccaggctggagtgcagtagcgtgatctcagttcgttgcatcctccgctgcccaggttcaagcagttctgcctcagccttccaagtagctgggattacaggcgtgtgccaccacactcagctaatttttgtattctcagtagagatgggttttaccatgttggccaggctggtctcgaactcctggcctcaagtgattcgcctgccttggcctcccaaaatgtgctaggattacaggcatgagccaccacgccccgcctaaattcaaaatctttttgtttttttttaga

SEQ ID NO: 315883 - DNA, 2486 bp, Homo sapiens
gttacggcccgggaagtaacgggcatatcgtcgaagccaagacagtacgaccacgcgtcgagcgcaagcgaggcagccatgtcttatcccgctgatgattatgagtctgaggcggcttatgacccctacgcttatcccagcgactatgatatgcacacaggagatccaaagcaggaccttgcttatgaacgtcagtatgaacagcaaacctatcaggtgatccctgaggtgatcaaaaacttcatccagtatttccacaaaactgtctcagatttgattgaccagaaagtgtatgagctacaggccagtcgtgtctccagtgatgtcattgaccagaaggtgtatgagatccaggacatctatgagaacagctggaccaagctgactgaaagattcttcaagaatacaccttggcccgaggctgaagccattgctccacaggttggcaatgatgctgtcttcctgattttatacaaagaattatactacaggcacatatatgccaaagtcagtgggggaccttccttggagcagaggtttgaatcctattacaactactgcaatctcttcaactacattcttaatgccgatggtcctgctccccttgaactacccaaccagtggctctgggatattatcgatgagttcatctaccagtttcagtcattcagtcagtaccgctgtaagactgccaagaagtcagaggaggagattgactttcttcgttccaatcccaaaatctggaatgttcatagtgtcctcaatgtccttcattccctggtagacaaatccaacatcaaccgacagttggaggtatacacaagcggaggtgaccctgagagtgtggctggggagtatgggcggcactccctctacaaaatgcttggttacttcagcctggtcgggcttctccgcctgcactccctgttaggagattactaccaggccatcaaggtgctggagaacatcgaactgaacaagaagagtatgtattcccgtgtgccagagtgccaggtcaccacatactattatgttgggtttgcatatttgatgatgcgtcgttaccaggatgccatccgggtcttcgccaacatcctcctctacatccagaggaccaagagcatgttccagaggaccacgtacaagtatgagatgattaacaagcagaatgagcagatgcatgcgctgctggccattgccctcacgatgtaccccatgcgtattgatgagagcattcacctccagctgcgggagaaatatggggacaagatgttgcgcatgcagaaaggtgacccacaagtctatgaagaacttttcagttactcctgccccaagttcctgtcgcctgtagtgcccaactatgataatgtgcaccccaactaccacaaagagcccttcctgcagcagctgaaggtgttttctgatgaagtacagcagcaggcccagctttcaaccatccgcagcttcctgaagctctacaccaccatgcctgtggccaagctggctggcttcctggacctcacagagcaggagttccggatccagcttcttgtcttcaaacacaagatgaagaacctcgtgtggaccagcggtatctcagccctggatggtgaatttcagtcagcctcagaggttgacttctacattgataaggacatgatccacatcgcggacaccaaggtcgccaggcgttatggggatttcttcatccgtcagatccacaaatttgaggagcttaatcgaaccctgaagaagatgggacagagaccttgatgatattcacacacattcaggaacctgttttgatgtattataggcaggaagtgtttttgctaccgtgaaacctttacctagatcagccatcagcctgtcaactcagttaacaagttaaggaccgaagtgtttcaagtggatctcagtaaaggatctttggagccagaaaaaaaaaaaacaaaaaaaaaattcgggggattcattgtgggggggggaaaaagcgggtatggaaggggcccaggggccaatagggtgtccctgtgacccaagtttcttgggcacaaagggggaaaactctggcgggctccccatatagggagctcgaaataaatctcgaatagagccggggtacccggaattatagaatcgcgagaaaaagcacggacacaccgcagaagcaccacgagcaacgcacagacgcgagacccaaacacgagcacgcacccacgtcaccacacagacccagcagcacacgcgacaccccacccacaacaccgccccgcacacaagacaaagacagcccgaggccgcaggcgcaggcagaagagggcgaagagggggccgggggtggggagggggggggcgcgagaggcgagagagaggggagggaggggggggaggagaggaggggaggcggcggcgggaacgaaggaggggaacgcgagggagggggaggaagcgagggaaggacgacaggggcggaagggcggaag

SEQ ID NO: 315884 - DNA, 2553 bp, Homo sapiens
accatcggacaatcaatcaagtgccttaggttgataccaaagcccggctaggacttttattaggactgaacgcgtatgtagttgtctgacttaagatagcaggcttggctgcattattgaatcgagagccgcaagcgaggcagccatgtcttatcccgctgatgattatgagtctgaggcggcttatgacccctacgcttatcccagcgactatgatatgcacacaggagatccaaagcaggaccttgcttatgaacgtcagtatgaacagcaaacctatcaggtgatccctgaggtgatcaaaaacttcatccagtatttccacaaaactgtctcagatttgattgaccagaaagtgtatgagctacaggccagtcgtgtctccagtgatgtcattgaccagaaggtgtatgagatccaggacatctatgagaacagctggaccaagctgactgaaagattcttcaagaatacaccttggcccgaggctgaagccattgctccacaggttggcaatgatgctgtcttcctgattttatacaaagaattatactacaggcacatatatgccaaagtcagtgggggaccttccttggagcagaggtttgaatcctattacaactactgcaatctcttcaactacattcttaatgccgatggtcctgctccccttgaactacccaaccagtggctctgggatattatcgatgagttcatctaccagtttcagtcattcagtcagtaccgctgtaagactgccaagaagtcagaggaggagattgactttcttcgttccaatcccaaaatctggaatgttcatagtgtcctcaatgtccttcattccctggtagacaaatccaacatcaaccgacagttggaggtatacacaagcggaggtgaccctgagagtgtggctggggagtatgggcggcactccctctacaaaatgcttggttacttcagcctggtcgggcttctccgcctgcactccctgttaggagattactaccaggccatcaaggtgctggagaacatcgaactgaacaagaagagtatgtattcccgtgtgccagagtgccaggtcaccacatactattatgttgggtttgcatatttgatgatgcgtcgttaccaggatgccatccgggtcttcgccaacatcctcctctacatccagaggaccaagagcatgttccagaggaccacgtacaagtatgagatgattaacaagcagaatgagcagatgcatgcgctgctggccattgccctcacgatgtaccccatgcgtattgatgagagcattcacctccagctgcgggagaaatatggggacaagatgttgcgcatgcagaaaggtgacccacaagtctatgaagaacttttcagttactcctgccccaagttcctgtcgcctgtagtgcccaactatgataatgtgcaccccaactaccacaaagagcccttcctgcagcagctgaaggtgttttctgatgaagtacagcagcaggcccagctttcaaccatccgcagcttcctgaagctctacaccaccatgcctgtggccaagctggctggcttcctggacctcacagagcaggagttccggatccagcttcttgtcttcaaacacaagatgaagaacctcgtgtggaccagcggtatctcagccctggatggtgaatttcagtcagcctcagaggttgacttctacattgataaggacatgatccacatcgcggacaccaaggtcgccaggcgttatggggatttcttcatccgtcagatccacaaatttgaggagcttaatcgaaccctgaagaagatgggacagagaccttgatgatattcacacacattcaggaacctgttttgatgtattataggcaggaagtgtttttgctaccgtgaaacctttacctagatcagccatcagcctgtcaactcagttaacaagttaaggaccgaagtgtttcaagtggatctcagtaaaggatctttggagccagaaaaaaaaaaaacaaaaaaaaaattcgggggattcattgtgggggggggaaaaagcgggtatggaaggggcccaggggccaatagggtgtccctgtgacccaagtttcttgggcacaaagggggaaaactctggcgggctccccatatagggagctcgaaataaatctcgaatagagccggggtacccggaattatagaatcgcgagaaaaagcacggacacaccgcagaagcaccacgagcaacgcacagacgcgagacccaaacacgagcacgcacccacgtcaccacacagacccagcagcacacgcgacaccccacccacaacaccgccccgcacacaagacaaagacagcccgaggccgcaggcgcaggcagaagagggcgaagagggggccgggggtggggagggggggggcgcgagaggcgagagagaggggagggaggggggggaggagaggaggggaggcggcggcgggaacgaaggaggggaacgcgagggagggggaggaagcgagggaaggacgacaggggcggaagggcggaag

SEQ ID NO: 315885 - DNA, 2463 bp, Homo sapiens
cggacgcgtgggtcgacccacgcgtccgacccacgcgtccgcaagcgaggcagccatgtcttatcccgctgatgattatgagtctgaggcggcttatgacccctacgcttatcccagcgactatgatatgcacacaggagatccaaagcaggaccttgcttatgaacgtcagtatgaacagcaaacctatcaggtgatccctgaggtgatcaaaaacttcatccagtatttccacaaaactgtctcagatttgattgaccagaaagtgtatgagctacaggccagtcgtgtctccagtgatgtcattgaccagaaggtgtatgagatccaggacatctatgagaacagctggaccaagctgactgaaagattcttcaagaatacaccttggcccgaggctgaagccattgctccacaggttggcaatgatgctgtcttcctgattttatacaaagaattatactacaggcacatatatgccaaagtcagtgggggaccttccttggagcagaggtttgaatcctattacaactactgcaatctcttcaactacattcttaatgccgatggtcctgctccccttgaactacccaaccagtggctctgggatattatcgatgagttcatctaccagtttcagtcattcagtcagtaccgctgtaagactgccaagaagtcagaggaggagattgactttcttcgttccaatcccaaaatctggaatgttcatagtgtcctcaatgtccttcattccctggtagacaaatccaacatcaaccgacagttggaggtatacacaagcggaggtgaccctgagagtgtggctggggagtatgggcggcactccctctacaaaatgcttggttacttcagcctggtcgggcttctccgcctgcactccctgttaggagattactaccaggccatcaaggtgctggagaacatcgaactgaacaagaagagtatgtattcccgtgtgccagagtgccaggtcaccacatactattatgttgggtttgcatatttgatgatgcgtcgttaccaggatgccatccgggtcttcgccaacatcctcctctacatccagaggaccaagagcatgttccagaggaccacgtacaagtatgagatgattaacaagcagaatgagcagatgcatgcgctgctggccattgccctcacgatgtaccccatgcgtattgatgagagcattcacctccagctgcgggagaaatatggggacaagatgttgcgcatgcagaaaggtgacccacaagtctatgaagaacttttcagttactcctgccccaagttcctgtcgcctgtagtgcccaactatgataatgtgcaccccaactaccacaaagagcccttcctgcagcagctgaaggtgttttctgatgaagtacagcagcaggcccagctttcaaccatccgcagcttcctgaagctctacaccaccatgcctgtggccaagctggctggcttcctggacctcacagagcaggagttccggatccagcttcttgtcttcaaacacaagatgaagaacctcgtgtggaccagcggtatctcagccctggatggtgaatttcagtcagcctcagaggttgacttctacattgataaggacatgatccacatcgcggacaccaaggtcgccaggcgttatggggatttcttcatccgtcagatccacaaatttgaggagcttaatcgaaccctgaagaagatgggacagagaccttgatgatattcacacacattcaggaacctgttttgatgtattataggcaggaagtgtttttgctaccgtgaaacctttacctagatcagccatcagcctgtcaactcagttaacaagttaaggaccgaagtgtttcaagtggatctcagtaaaggatctttggagccagaaaaaaaaaaaacaaaaaaaaaattcgggggattcattgtgggggggggaaaaagcgggtatggaaggggcccaggggccaatagggtgtccctgtgacccaagtttcttgggcacaaagggggaaaactctggcgggctccccatatagggagctcgaaataaatctcgaatagagccggggtacccggaattatagaatcgcgagaaaaagcacggacacaccgcagaagcaccacgagcaacgcacagacgcgagacccaaacacgagcacgcacccacgtcaccacacagacccagcagcacacgcgacaccccacccacaacaccgccccgcacacaagacaaagacagcccgaggccgcaggcgcaggcagaagagggcgaagagggggccgggggtggggagggggggggcgcgagaggcgagagagaggggagggaggggggggaggagaggaggggaggcggcggcgggaacgaaggaggggaacgcgagggagggggaggaagcgagggaaggacgacaggggcggaagggcggaag

SEQ ID NO: 315886 - DNA, 1948 bp, Homo sapiens
  misc_feature (1915)..(1915): n is a, c, g, or t
tcatttagcgtctttccggcggtgctcgcaagcgaggcagccatgtcttatcccgctgatgattatgagtctgaggcggcttatgacccctacgcttatcccagcgactatgatatgcacacaggagatccaaagcaggaccttgcttatgaacgtcagtatgaacagcaaacctatcaggtgatccctgaggtgatcaaaaacttcatccagtatttccacaaaactgtctcagatttgattgaccagaaagtgtatgagctacaggccagtcgtgtctccagtgatgtcattgaccagaaggtgtatgagatccaggacatctatgagaacagctggaccaagctgactgaaagattcttcaagaatacaccttggcccgaggctgaagccattgctccacaggttggcaatgatgctgtcttcctgattttatacaaagaattatactacaggcacatatatgccaaagtcagtgggggaccttccttggagcagaggtttgaatcctattacaactactgcaatctcttcaactacattcttaatgccgatggtcctgctccccttgaactacccaaccagtggctctgggatattatcgatgagttcatctaccagtttcagtcattcagtcagtaccgctgtaagactgccaagaagtcagaggaggagattgactttcttcgttccaatcccaaaatctggaatgttcatagtgtcctcaatgtccttcattccctggtagacaaatccaacatcaaccgacagttggaggtatacacaagcggaggtgaccctgagagtgtggctggggagtatgggcggcactccctctacaaaatgcttggttacttcagcctggtcgggcttctccgcctgcactccctgttaggagattactaccaggccatcaaggtgctggagaacatcgaactgaacaagaagagtatgtattcccgtgtgccagagtgccaggtcaccacatactattatgttgggtttgcatatttgatgatgcgtcgttaccaggatgccatccgggtcttcgccaacatcctcctctacatccagaggaccaagagcatgttccagaggaccacgtacaagtatgagatgattaacaagcagaatgagcagatgcatgcgctgctggccattgccctcacgatgtaccccatgcgtattgatgagagcattcacctccagctgcgggagaaatatggggacaagatgttgcgcatgcagaaaggtgacccacaagtctatgaagaacttttcagttactcctgccccaagttcctgtcgcctgtagtgcccaactatgataatgtgcaccccaactaccacaaagagcccttcctgcagcagctgaaggtgttttctgatgaagtacagcagcaggcccagctttcaaccatccgcagcttcctgaagctctacaccaccatgcctgtggccaagctggctggcttcctggacctcacagagcaggagttccggatccagcttcttgtcttcaaacacaagatgaagaacctcgtgtggaccagcggtatctcagccctggatggtgaatttcagtcagcctcagaggttgacttctacattgataaggacatgatccacatcgcggacaccaaggtcgccaggcgttatggggatttcttcatccgtcagatccacaaatttgaggagcttaatcgaaccctgaagaagatgggacagagaccttgatgatattcacacacattcaggaacctgttttgatgtattataggcaggaagtgtttttgctaccgtgaaacctttacctagatcagccatcagcctgtcaactcagttaacaagttaaggaccgaagtgtttcaagtggatctcatcaaggtctctgtcccatcttcttcagggttgncgacgcggccgcgaatttagtagtagtagtagg

SEQ ID NO: 315887 - DNA, 2459 bp, Homo sapiens
cgagagagctaggtcgtgctggggtatcgcgtacgagcgccgagcaggcatgtcatgtttgcccgcgatgatcatgagtctgaggcggcttatgacccctacgcttatcccagcgactatgatatgcacacaggagatccaaagcaggaccttgcttatgaacgtcagtatgaacagcaaacctatcaggtgatccctgaggtgatcaaaaacttcatccagtatttccacaaaactgtctcagatttgattgaccagaaagtgtatgagctacaggccagtcgtgtctccagtgatgtcattgaccagaaggtgtatgagatccaggacatctatgagaacagctggaccaagctgactgaaagattcttcaagaatacaccttggcccgaggctgaagccattgctccacaggttggcaatgatgctgtcttcctgattttatacaaagaattatactacaggcacatatatgccaaagtcagtgggggaccttccttggagcagaggtttgaatcctattacaactactgcaatctcttcaactacattcttaatgccgatggtcctgctccccttgaactacccaaccagtggctctgggatattatcgatgagttcatctaccagtttcagtcattcagtcagtaccgctgtaagactgccaagaagtcagaggaggagattgactttcttcgttccaatcccaaaatctggaatgttcatagtgtcctcaatgtccttcattccctggtagacaaatccaacatcaaccgacagttggaggtatacacaagcggaggtgaccctgagagtgtggctggggagtatgggcggcactccctctacaaaatgcttggttacttcagcctggtcgggcttctccgcctgcactccctgttaggagattactaccaggccatcaaggtgctggagaacatcgaactgaacaagaagagtatgtattcccgtgtgccagagtgccaggtcaccacatactattatgttgggtttgcatatttgatgatgcgtcgttaccaggatgccatccgggtcttcgccaacatcctcctctacatccagaggaccaagagcatgttccagaggaccacgtacaagtatgagatgattaacaagcagaatgagcagatgcatgcgctgctggccattgccctcacgatgtaccccatgcgtattgatgagagcattcacctccagctgcgggagaaatatggggacaagatgttgcgcatgcagaaaggtgacccacaagtctatgaagaacttttcagttactcctgccccaagttcctgtcgcctgtagtgcccaactatgataatgtgcaccccaactaccacaaagagcccttcctgcagcagctgaaggtgttttctgatgaagtacagcagcaggcccagctttcaaccatccgcagcttcctgaagctctacaccaccatgcctgtggccaagctggctggcttcctggacctcacagagcaggagttccggatccagcttcttgtcttcaaacacaagatgaagaacctcgtgtggaccagcggtatctcagccctggatggtgaatttcagtcagcctcagaggttgacttctacattgataaggacatgatccacatcgcggacaccaaggtcgccaggcgttatggggatttcttcatccgtcagatccacaaatttgaggagcttaatcgaaccctgaagaagatgggacagagaccttgatgatattcacacacattcaggaacctgttttgatgtattataggcaggaagtgtttttgctaccgtgaaacctttacctagatcagccatcagcctgtcaactcagttaacaagttaaggaccgaagtgtttcaagtggatctcagtaaaggatctttggagccagaaaaaaaaaaaacaaaaaaaaaattcgggggattcattgtgggggggggaaaaagcgggtatggaaggggcccaggggccaatagggtgtccctgtgacccaagtttcttgggcacaaagggggaaaactctggcgggctccccatatagggagctcgaaataaatctcgaatagagccggggtacccggaattatagaatcgcgagaaaaagcacggacacaccgcagaagcaccacgagcaacgcacagacgcgagacccaaacacgagcacgcacccacgtcaccacacagacccagcagcacacgcgacaccccacccacaacaccgccccgcacacaagacaaagacagcccgaggccgcaggcgcaggcagaagagggcgaagagggggccgggggtggggagggggggggcgcgagaggcgagagagaggggagggaggggggggaggagaggaggggaggcggcggcgggaacgaaggaggggaacgcgagggagggggaggaagcgagggaaggacgacaggggcggaagggcggaag

SEQ ID NO: 315888 - DNA, 2263 bp, Homo sapiens
tcatttagcgtctttccggcggtgctcgcaagcgaggcagccatgtcttatcccgctgatgattatgagtctgaggcggcttatgacccctacgcttatcccagcgactatgatatgcacacaggagatccaaagcaggaccttgcttatgaacgtcagtatgaacagcaaacctatcaggtgatccctgaggtgatcaaaaacttcatccagtatttccacaaaactgtctcagatttgattgaccagaaagtgtatgagctacaggccagtcgtgtctccagtgatgtcattgaccagaaggtgtatgagatccaggacatctatgagaacagctggaccaagctgactgaaagattcttcaagaatacaccttggcccgaggctgaagccattgctccacaggttggcaatgatgctgtcttcctgattttatacaaagaattatactacaggcacatatatgccaaagtcagtgggggaccttccttggagcagaggtttgaatcctattacaactactgcaatctcttcaactacattcttaatgccgatggtcctgctccccttgaactacccaaccagtggctctgggatattatcgatgagttcatctaccagtttcagtcattcagtcagtaccgctgtaagactgccaagaagtcagaggaggagattgactttcttcgttccaatcccaaaatctggaatgttcatagtgtcctcaatgtccttcattccctggtagacaaatccaacatcaaccgacagttggaggtatacacaagcggaggtgaccctgagagtgtggctggggagtatgggcggcactccctctacaaaatgcttggttacttcagcctggtcgggcttctccgcctgcactccctgttaggagattactaccaggccatcaaggtgctggagaacatcgaactgaacaagaagagtatgtattcccgtgtgccagagtgccaggtcaccacatactattatgttgggtttgcatatttgatgatgcgtcgttaccaggatgccatccgggtcttcgccaacatcctcctctacatccagaggaccaagagcatgttccagaggaccacgtacaagtatgagatgattaacaagcagaatgagcagatgcatgcgctgctggccattgccctcacgatgtaccccatgcgtattgatgagagcattcacctccagctgcgggagaaatatggggacaagatgttgcgcatgcagaaaggtgacccacaagtctatgaagaacttttcagttactcctgccccaagttcctgtcgcctgtagtgcccaactatgataatgtgcaccccaactaccacaaagagcccttcctgcagcagctgaaggtgttttctgatgaagtacagcagcaggcccagctttcaaccatccgcagcttcctgaagctctacaccaccatgcctgtggccaagctggctggcttcctggacctcacagagcaggagttccggatccagcttcttgtcttcaaacacaagatgaagaacctcgtgtggaccagcggtatctcagccctggatggtgaatttcagtcagcctcagaggttgacttctacattgataagcttaatcgaaccctgaagaagatgggacagagaccttgatgatattcacacacattcaggaacctgttttgatgtattataggcaggaagtgtttttgctaccgtgaaacctttacctagatcagccatcagcctgtcaactcagttaacaagttaaggaccgaagtgtttcaagtggatctcagtaaaggatctttggagccagatttgtcgtctcattattgtaggagagaatttgtgggttgtggcagtaatacatttcccatgtgtcctgatgctttcaggatacatcagttgttagtgtttaaattgagttatttttattttgtgcttttgagatggagtctcactctgtctcccaggctggagtgcagtagcgtgatctcagttcgttgcatcctccgctgcccaggttcaagcagttctgcctcagccttccaagtagctgggattacaggcgtgtgccaccacactcagctaatttttgtattctcagtagagatgggttttaccatgttggccaggctggtctcgaactcctggcctcaagtgattcgcctgccttggcctcccaaaatgtgctaggattacaggcatgagccaccacgccccgcctaaattcaaaatctttttgtttttttttaga

SEQ ID NO: 315889 - DNA, 1863 bp, Homo sapiens
tcatttagcgtctttccggcggtgctcgcaagcgaggcagccatgtcttatcccgctgatgattatgagtctgaggcggcttatgacccctacgcttatcccagcgactatgatatgcacacaggagatccaaagcaggaccttgcttatgaacgtcagtatgaacagcaaacctatcaggtgatccctgaggtgatcaaaaacttcatccagtatttccacaaaactgtctcagatttgattgaccagaaagtgtatgagctacaggccagtcgtgtctccagtgatgtcattgaccagaaggtgtatgagatccaggacatctatgagaacagctggaccaagctgactgaaagattcttcaagaatacaccttggcccgaggctgaagccattgctccacaggttggcaatgatgctgtcttcctgattttatacaaagaattatactacaggcacatatatgccaaagtcagtgggggaccttccttggagcagaggtttgaatcctattacaactactgcaatctcttcaactacattcttaatgccgatggtcctgctccccttgaactacccaaccagtggctctgggatattatcgatgagttcatctaccagtttcagtcattcagtcagtaccgctgtaagactgccaagaagtcagaggaggagattgactttcttcgttccaatcccaaaatctggaatgttcatagtgtcctcaatgtccttcattccctggtagacaaatccaacatcaaccgacagttggaggtatacacaagcggaggtgaccctgagagtgtggctggggagtatgggcggcactccctctacaaaatgcttggttacttcagcctggtcgggcttctccgcctgcactccctgttaggagattactaccaggccatcaaggtgctggagaacatcgaactgaacaagaagagtatgtattcccgtgtgccagagtgccaggtcaccacatactattatgttgggtttgcatatttgatgatgcgtcgttaccaggatgccatccgggtcttcgccaacatcctcctctacatccagaggaccaagagcatgttccagaggaccacgtacaagtatgagatgattaacaagcagaatgagcagatgcatgcgctgctggccattgccctcacgatgtaccccatgcgtattgatgagagcattcacctccagctgcgggagaaatatggggacaagatgttgcgcatgcagaaaggtgacccacaagtctatgaagaacttttcagttactcctgccccaagttcctgtcgcctgtagtgcccaactatgataatgtgcaccccaactaccacaaagagcccttcctgcagcagctgaaggtgttttctgatgaagtacagcagcaggcccagctttcaaccatccgcagcttcctgaagctctacaccaccatgcctgtggccaagctggctggcttcctggacctcacagagcaggagttccggatccagcttcttgtcttcaaacacaagatgaagaacctcgtgtggaccagcggtatctcagccctggatggtgaatttcagtcagcctcagaggttgacttctacattgataaggtatgcctgtcccctgggcttggggtcttgtattaagtgttcagtatctttcattcactattgtgggcacatgaagtatatcggggaacaaaaagattcctggccttgtggtgctgccacaaggtgccaggtgtggtggctcatgccagtaatactagtactttaggggaggctggggtgggaggatcactctagcccaggagttcaagaccagcctgggcaacgtagtgagaccttttctctatt

SEQ ID NO: 315890 - DNA, 2434 bp, Homo sapiens
  misc_feature (2)..(2): n is a, c, g, or t
  misc_feature (21)..(21): n is a, c, g, or t
cncgtgcaattcggcagaggntgtgcatatcatagtcgctgggataagcgtaggggtcataagccgcctcagtgtcataatcatcagcgggataagacatgcacacaggagatccaaagcaggaccttgcttatgaacgtcagtatgaacagcaaacctatcaggtgatccctgaggtgatcaaaaacttcatccagtatttccacaaaactgtctcagatttgattgaccagaaagtgtatgagctacaggccagtcgtgtctccagtgatgtcattgaccagaaggtgtatgagatccaggacatctatgagaacagctggaccaagctgactgaaagattcttcaagaatacaccttggcccgaggctgaagccattgctccacaggttggcaatgatgctgtcttcctgattttatacaaagaattatactacaggcacatatatgccaaagtcagtgggggaccttccttggagcagaggtttgaatcctattacaactactgcaatctcttcaactacattcttaatgccgatggtcctgctccccttgaactacccaaccagtggctctgggatattatcgatgagttcatctaccagtttcagtcattcagtcagtaccgctgtaagactgccaagaagtcagaggaggagattgactttcttcgttccaatcccaaaatctggaatgttcatagtgtcctcaatgtccttcattccctggtagacaaatccaacatcaaccgacagttggaggtatacacaagcggaggtgaccctgagagtgtggctggggagtatgggcggcactccctctacaaaatgcttggttacttcagcctggtcgggcttctccgcctgcactccctgttaggagattactaccaggccatcaaggtgctggagaacatcgaactgaacaagaagagtatgtattcccgtgtgccagagtgccaggtcaccacatactattatgttgggtttgcatatttgatgatgcgtcgttaccaggatgccatccgggtcttcgccaacatcctcctctacatccagaggaccaagagcatgttccagaggaccacgtacaagtatgagatgattaacaagcagaatgagcagatgcatgcgctgctggccattgccctcacgatgtaccccatgcgtattgatgagagcattcacctccagctgcgggagaaatatggggacaagatgttgcgcatgcagaaaggtgacccacaagtctatgaagaacttttcagttactcctgccccaagttcctgtcgcctgtagtgcccaactatgataatgtgcaccccaactaccacaaagagcccttcctgcagcagctgaaggtgttttctgatgaagtacagcagcaggcccagctttcaaccatccgcagcttcctgaagctctacaccaccatgcctgtggccaagctggctggcttcctggacctcacagagcaggagttccggatccagcttcttgtcttcaaacacaagatgaagaacctcgtgtggaccagcggtatctcagccctggatggtgaatttcagtcagcctcagaggttgacttctacattgataaggacatgatccacatcgcggacaccaaggtcgccaggcgttatggggatttcttcatccgtcagatccacaaatttgaggagcttaatcgaaccctgaagaagatgggacagagaccttgatgatattcacacacattcaggaacctgttttgatgtattataggcaggaagtgtttttgctaccgtgaaacctttacctagatcagccatcagcctgtcaactcagttaacaagttaaggaccgaagtgtttcaagtggatctcagtaaaggatctttggagccagaaaaaaaaaaaacaaaaaaaaaattcgggggattcattgtgggggggggaaaaagcgggtatggaaggggcccaggggccaatagggtgtccctgtgacccaagtttcttgggcacaaagggggaaaactctggcgggctccccatatagggagctcgaaataaatctcgaatagagccggggtacccggaattatagaatcgcgagaaaaagcacggacacaccgcagaagcaccacgagcaacgcacagacgcgagacccaaacacgagcacgcacccacgtcaccacacagacccagcagcacacgcgacaccccacccacaacaccgccccgcacacaagacaaagacagcccgaggccgcaggcgcaggcagaagagggcgaagagggggccgggggtggggagggggggggcgcgagaggcgagagagaggggagggaggggggggaggagaggaggggaggcggcggcgggaacgaaggaggggaacgcgagggagggggaggaagcgagggaaggacgacaggggcggaagggcggaag

SEQ ID NO: 315891 - DNA, 2325 bp, Homo sapiens
tcatttagcgtctttccggcggtgctcgcaagcgaggcagccatgtcttatcccgctgatgattatgagtctgaggcggcttatgacccctacgcttatcccagcgactatgatatgcacacaggagatccaaagcaggaccttgcttatgaacgtcagtatgaacagcaaacctatcaggtgatccctgaggtgatcaaaaacttcatccagtatttccacaaaactgtctcagatttgattgaccagaaagtgtatgagctacaggccagtcgtgtctccagtgatgtcattgaccagaaggtgtatgagatccaggacatctatgagaacagctggaccaagctgactgaaagattcttcaagaatacaccttggcccgaggctgaagccattgctccacaggttggcaatgatgctgtcttcctgattttatacaaagaattatactacaggcacatatatgccaaagtcagtgggggaccttccttggagcagaggtttgaatcctattacaactactgcaatctcttcaactacattcttaatgccgatggtcctgctccccttgaactacccaaccagtggctctgggatattatcgatgagttcatctaccagtttcagtcattcagtcagtaccgctgtaagactgccaagaagtcagaggaggagattgactttcttcgttccaatcccaaaatctggaatgttcatagtgtcctcaatgtccttcattccctggtagacaaatccaacatcaaccgacagttggaggtatacacaagcggaggtgaccctgagagtgtggctggggagtatgggcggcactccctctacaaaatgcttggttacttcagcctggtcgggcttctccgcctgcactccctgttaggagattactaccaggccatcaaggtgctggagaacatcgaactgaacaagaagagtatgtattcccgtgtgccagagtgccaggtcaccacatactattatgttgggtttgcatatttgatgatgcgtcgttaccaggatgccatccgggtcttcgccaacatcctcctctacatccagaggaccaagagcatgttccagaggaccacgtacaagtatgagatggcagaaaggtgacccacaagtctatgaagaacttttcagttactcctgccccaagttcctgtcgcctgtagtgcccaactatgataatgtgcaccccaactaccacaaagagcccttcctgcagcagctgaaggtgttttctgatgaagtacagcagcaggcccagctttcaaccatccgcagcttcctgaagctctacaccaccatgcctgtggccaagctggctggcttcctggacctcacagagcaggagttccggatccagcttcttgtcttcaaacacaagatgaagaacctcgtgtggaccagcggtatctcagccctggatggtgaatttcagtcagcctcagaggttgacttctacattgataaggacatgatccacatcgcggacaccaaggtcgccaggcgttatggggatttcttcatccgtcagatccacaaatttgaggagcttaatcgaaccctgaagaagatgggacagagaccttgatgatattcacacacattcaggaacctgttttgatgtattataggcaggaagtgtttttgctaccgtgaaacctttacctagatcagccatcagcctgtcaactcagttaacaagttaaggaccgaagtgtttcaagtggatctcagtaaaggatctttggagccagaaaaaaaaaaaacaaaaaaaaaattcgggggattcattgtgggggggggaaaaagcgggtatggaaggggcccaggggccaatagggtgtccctgtgacccaagtttcttgggcacaaagggggaaaactctggcgggctccccatatagggagctcgaaataaatctcgaatagagccggggtacccggaattatagaatcgcgagaaaaagcacggacacaccgcagaagcaccacgagcaacgcacagacgcgagacccaaacacgagcacgcacccacgtcaccacacagacccagcagcacacgcgacaccccacccacaacaccgccccgcacacaagacaaagacagcccgaggccgcaggcgcaggcagaagagggcgaagagggggccgggggtggggagggggggggcgcgagaggcgagagagaggggagggaggggggggaggagaggaggggaggcggcggcgggaacgaaggaggggaacgcgagggagggggaggaagcgagggaaggacgacaggggcggaagggcggaag

SEQ ID NO: 315892 - DNA, 2409 bp, Homo sapiens
cggacgcgtgggtcgacccacgcgtccgacccacgcgtccgcaagcgaggcagccatgtcttatcccgctgatgattatgagtctgaggcggcttatgacccctacgcttatcccagcgactatgatatgcacacaggagatccaaagcaggaccttgcttatgaacgtcagtatgaacagcaaacctatcaggtgatccctgaggtgatcaaaaacttcatccagtatttccacgtctccagtgatgtcattgaccagaaggtgtatgagatccaggacatctatgagaacagctggaccaagctgactgaaagattcttcaagaatacaccttggcccgaggctgaagccattgctccacaggttggcaatgatgctgtcttcctgattttatacaaagaattatactacaggcacatatatgccaaagtcagtgggggaccttccttggagcagaggtttgaatcctattacaactactgcaatctcttcaactacattcttaatgccgatggtcctgctccccttgaactacccaaccagtggctctgggatattatcgatgagttcatctaccagtttcagtcattcagtcagtaccgctgtaagactgccaagaagtcagaggaggagattgactttcttcgttccaatcccaaaatctggaatgttcatagtgtcctcaatgtccttcattccctggtagacaaatccaacatcaaccgacagttggaggtatacacaagcggaggtgaccctgagagtgtggctggggagtatgggcggcactccctctacaaaatgcttggttacttcagcctggtcgggcttctccgcctgcactccctgttaggagattactaccaggccatcaaggtgctggagaacatcgaactgaacaagaagagtatgtattcccgtgtgccagagtgccaggtcaccacatactattatgttgggtttgcatatttgatgatgcgtcgttaccaggatgccatccgggtcttcgccaacatcctcctctacatccagaggaccaagagcatgttccagaggaccacgtacaagtatgagatgattaacaagcagaatgagcagatgcatgcgctgctggccattgccctcacgatgtaccccatgcgtattgatgagagcattcacctccagctgcgggagaaatatggggacaagatgttgcgcatgcagaaaggtgacccacaagtctatgaagaacttttcagttactcctgccccaagttcctgtcgcctgtagtgcccaactatgataatgtgcaccccaactaccacaaagagcccttcctgcagcagctgaaggtgttttctgatgaagtacagcagcaggcccagctttcaaccatccgcagcttcctgaagctctacaccaccatgcctgtggccaagctggctggcttcctggacctcacagagcaggagttccggatccagcttcttgtcttcaaacacaagatgaagaacctcgtgtggaccagcggtatctcagccctggatggtgaatttcagtcagcctcagaggttgacttctacattgataaggacatgatccacatcgcggacaccaaggtcgccaggcgttatggggatttcttcatccgtcagatccacaaatttgaggagcttaatcgaaccctgaagaagatgggacagagaccttgatgatattcacacacattcaggaacctgttttgatgtattataggcaggaagtgtttttgctaccgtgaaacctttacctagatcagccatcagcctgtcaactcagttaacaagttaaggaccgaagtgtttcaagtggatctcagtaaaggatctttggagccagaaaaaaaaaaaacaaaaaaaaaattcgggggattcattgtgggggggggaaaaagcgggtatggaaggggcccaggggccaatagggtgtccctgtgacccaagtttcttgggcacaaagggggaaaactctggcgggctccccatatagggagctcgaaataaatctcgaatagagccggggtacccggaattatagaatcgcgagaaaaagcacggacacaccgcagaagcaccacgagcaacgcacagacgcgagacccaaacacgagcacgcacccacgtcaccacacagacccagcagcacacgcgacaccccacccacaacaccgccccgcacacaagacaaagacagcccgaggccgcaggcgcaggcagaagagggcgaagagggggccgggggtggggagggggggggcgcgagaggcgagagagaggggagggaggggggggaggagaggaggggaggcggcggcgggaacgaaggaggggaacgcgagggagggggaggaagcgagggaaggacgacaggggcggaagggcggaag

SEQ ID NO: 315893 - DNA, 2377 bp, Homo sapiens
cggacgcgtgggtcgacccacgcgtccgacccacgcgtccgcaagcgaggcagccatgtcttatcccgctgatgattatgagtctgaggcggcttatgacccctacgcttatcccagcgactatgatatgcacacaggagatccaaagcaggaccttgcttatgaacgtcagtatgaacagcaaacctatcaggtgatccctgaggtgatcaaaaacttcatccagtatttccacaaaactgtctcagatttgattgaccagctggaccaagctgactgaaagattcttcaagaatacaccttggcccgaggctgaagccattgctccacaggttggcaatgatgctgtcttcctgattttatacaaagaattatactacaggcacatatatgccaaagtcagtgggggaccttccttggagcagaggtttgaatcctattacaactactgcaatctcttcaactacattcttaatgccgatggtcctgctccccttgaactacccaaccagtggctctgggatattatcgatgagttcatctaccagtttcagtcattcagtcagtaccgctgtaagactgccaagaagtcagaggaggagattgactttcttcgttccaatcccaaaatctggaatgttcatagtgtcctcaatgtccttcattccctggtagacaaatccaacatcaaccgacagttggaggtatacacaagcggaggtgaccctgagagtgtggctggggagtatgggcggcactccctctacaaaatgcttggttacttcagcctggtcgggcttctccgcctgcactccctgttaggagattactaccaggccatcaaggtgctggagaacatcgaactgaacaagaagagtatgtattcccgtgtgccagagtgccaggtcaccacatactattatgttgggtttgcatatttgatgatgcgtcgttaccaggatgccatccgggtcttcgccaacatcctcctctacatccagaggaccaagagcatgttccagaggaccacgtacaagtatgagatgattaacaagcagaatgagcagatgcatgcgctgctggccattgccctcacgatgtaccccatgcgtattgatgagagcattcacctccagctgcgggagaaatatggggacaagatgttgcgcatgcagaaaggtgacccacaagtctatgaagaacttttcagttactcctgccccaagttcctgtcgcctgtagtgcccaactatgataatgtgcaccccaactaccacaaagagcccttcctgcagcagctgaaggtgttttctgatgaagtacagcagcaggcccagctttcaaccatccgcagcttcctgaagctctacaccaccatgcctgtggccaagctggctggcttcctggacctcacagagcaggagttccggatccagcttcttgtcttcaaacacaagatgaagaacctcgtgtggaccagcggtatctcagccctggatggtgaatttcagtcagcctcagaggttgacttctacattgataaggacatgatccacatcgcggacaccaaggtcgccaggcgttatggggatttcttcatccgtcagatccacaaatttgaggagcttaatcgaaccctgaagaagatgggacagagaccttgatgatattcacacacattcaggaacctgttttgatgtattataggcaggaagtgtttttgctaccgtgaaacctttacctagatcagccatcagcctgtcaactcagttaacaagttaaggaccgaagtgtttcaagtggatctcagtaaaggatctttggagccagaaaaaaaaaaaacaaaaaaaaaattcgggggattcattgtgggggggggaaaaagcgggtatggaaggggcccaggggccaatagggtgtccctgtgacccaagtttcttgggcacaaagggggaaaactctggcgggctccccatatagggagctcgaaataaatctcgaatagagccggggtacccggaattatagaatcgcgagaaaaagcacggacacaccgcagaagcaccacgagcaacgcacagacgcgagacccaaacacgagcacgcacccacgtcaccacacagacccagcagcacacgcgacaccccacccacaacaccgccccgcacacaagacaaagacagcccgaggccgcaggcgcaggcagaagagggcgaagagggggccgggggtggggagggggggggcgcgagaggcgagagagaggggagggaggggggggaggagaggaggggaggcggcggcgggaacgaaggaggggaacgcgagggagggggaggaagcgagggaaggacgacaggggcggaagggcggaag

SEQ ID NO: 315894 - DNA, 2077 bp, Homo sapiens
aaagtcatggaggccatggggttggattgaaaccagctttggggggttcgtttccttccttttttgccaaattatactacaggcacatatatgccaaagtcagtgggggaccttccttggagcagaggtttgaatcctattacaactactgcaatctcttcaactacattcttaatgccgatggtcctgctccccttgaactacccaaccagtggctctgggatattatcgatgagttcatctaccagtttcagtcattcagtcagtaccgctgtaagactgccaagaagtcagaggaggagattgactttcttcgttccaatcccaaaatctggaatgttcatagtgtcctcaatgtccttcattccctggtagacaaatccaacatcaaccgacagttggaggtatacacaagcggaggtgaccctgagagtgtggctggggagtatgggcggcactccctctacaaaatgcttggttacttcagcctggtcgggcttctccgcctgcactccctgttaggagattactaccaggccatcaaggtgctggagaacatcgaactgaacaagaagagtatgtattcccgtgtgccagagtgccaggtcaccacatactattatgttgggtttgcatatttgatgatgcgtcgttaccaggatgccatccgggtcttcgccaacatcctcctctacatccagaggaccaagagcatgttccagaggaccacgtacaagtatgagatgattaacaagcagaatgagcagatgcatgcgctgctggccattgccctcacgatgtaccccatgcgtattgatgagagcattcacctccagctgcgggagaaatatggggacaagatgttgcgcatgcagaaaggtgacccacaagtctatgaagaacttttcagttactcctgccccaagttcctgtcgcctgtagtgcccaactatgataatgtgcaccccaactaccacaaagagcccttcctgcagcagctgaaggtgttttctgatgaagtacagcagcaggcccagctttcaaccatccgcagcttcctgaagctctacaccaccatgcctgtggccaagctggctggcttcctggacctcacagagcaggagttccggatccagcttcttgtcttcaaacacaagatgaagaacctcgtgtggaccagcggtatctcagccctggatggtgaatttcagtcagcctcagaggttgacttctacattgataaggacatgatccacatcgcggacaccaaggtcgccaggcgttatggggatttcttcatccgtcagatccacaaatttgaggagcttaatcgaaccctgaagaagatgggacagagaccttgatgatattcacacacattcaggaacctgttttgatgtattataggcaggaagtgtttttgctaccgtgaaacctttacctagatcagccatcagcctgtcaactcagttaacaagttaaggaccgaagtgtttcaagtggatctcagtaaaggatctttggagccagaaaaaaaaaaaacaaaaaaaaaattcgggggattcattgtgggggggggaaaaagcgggtatggaaggggcccaggggccaatagggtgtccctgtgacccaagtttcttgggcacaaagggggaaaactctggcgggctccccatatagggagctcgaaataaatctcgaatagagccggggtacccggaattatagaatcgcgagaaaaagcacggacacaccgcagaagcaccacgagcaacgcacagacgcgagacccaaacacgagcacgcacccacgtcaccacacagacccagcagcacacgcgacaccccacccacaacaccgccccgcacacaagacaaagacagcccgaggccgcaggcgcaggcagaagagggcgaagagggggccgggggtggggagggggggggcgcgagaggcgagagagaggggagggaggggggggaggagaggaggggaggcggcggcgggaacgaaggaggggaacgcgagggagggggaggaagcgagggaaggacgacaggggcggaagggcggaag

SEQ ID NO: 315895 - DNA, 1321 bp, Homo sapiens
  misc_feature (1290)..(1290): n is a, c, g, or t
tcatttagcgtctttccggcggtgctcgcaagcgaggcagccatgtcttatcccgctgatgattatgagtctgaggcggcttatgacccctacgcttatcccagcgactatgatatgcacacaggagatccaaagcaggaccttgcttatgaacgtcagtatgaacagcaaacctatcaggtgatccctgaggtgatcaaaaacttcatccagtatttccacaaaactgtctcagatttgattgaccagaaagtgtatgagctacaggccagtcgtgtctccagtgatgtcattgaccagaaggtgtatgagatccaggacatctatgagaacagctggaccaagctgactgaaagattcttcaagaatacaccttggcccgaggctgaagccattgctccacaggttggcaatgatgctgtcttcctgattttatacaaagaattatactacaggcacatatatgccaaagtcagtgggggaccttccttggagcagaggtttgaatcctattacaactactgcaatctcttcaactacattcttaatgccgatggtcctgctccccttgaactacccaaccagtggctctgggatattatcgatgagttcatctaccagtttcagtcattcagtcagtaccgctgtaagactgccaagaagtcagaggaggagattgactttcttcgttccaatcccaaaatctggaatgttcatagtgtcctcaatgtccttcattccctggtagacaaatccaacatcaaccgacagttggaggtatacacaagcggaggtgaccctgagagtgtggctggggagtatgggcggcactccctctacaaaatgcttggttacttcagcctggtcgggcttctccgcctgcactccctgttaggagattactaccaggccatcaaggtgctggagaacatcgaactgaacaagaagagtatgtattcccgtgtgccagagtgccaggtcaccacatactattatgttgggtttgcatatttgatgatgcgtcgttaccaggatgccatccgggtcttcgccaacatcctcctctacatccagaggaccaagagcatgttccagaggaccacgtacaagtatgagatgattaacaagcagaatgagcagatgcatgcgctgctggccattgccctcacgatgtaccccatgcgtattgatgagagcattcacctccagctgcgggagaaatatggggacaagatgttgcgcatgcagaaaggtgacccacaagtcaaaagaaattagagctgtcctctncgtcgaccgatcctctagaggatcctctaga

SEQ ID NO: 315896 - DNA, 1366 bp, Homo sapiens
  misc_feature (1344)..(1345): n is a, c, g, or t
tcatttagcgtctttccggcggtgctcgcaagcgaggcagccatgtcttatcccgctgatgattatgagtctgaggcggcttatgacccctacgcttatcccagcgactatgatatgcacacaggagatccaaagcaggaccttgcttatgaacgtcagtatgaacagcaaacctatcaggtgatccctgaggtgatcaaaaacttcatccagtatttccacaaaactgtctcagatttgattgaccagaaagtgtatgagctacaggccagtcgtgtctccagtgatgtcattgaccagaaggtgtatgagatccaggacatctatgagaacagctggaccaagctgactgaaagattcttcaagaatacaccttggcccgaggctgaagccattgctccacaggttggcaatgatgctgtcttcctgattttatacaaagaattatactacaggcacatatatgccaaagtcagtgggggaccttccttggagcagaggtttgaatcctattacaactactgcaatctcttcaactacattcttaatgccgatggtcctgctccccttgaactacccaaccagtggctctgggatattatcgatgagttcatctaccagtttcagtcattcagtcagtaccgctgtaagactgccaagaagtcagaggaggagattgactttcttcgttccaatcccaaaatctggaatgttcatagtgtcctcaatgtccttcattccctggtagacaaatccaacatcaaccgacagttggaggtatacacaagcggaggtgaccctgagagtgtggctggggagtatgggcggcactccctctacaaaatgcttggttacttcagcctggtcgggcttctccgcctgcactccctgttaggagattactaccaggccatcaaggtgctggagaacatcgaactgaacaagaagagtatgtattcccgtgtgccagagtgccaggtcaccacatactattatgttgggtttgcatatttgatgatgcgtcgttaccaggatgccatccgggtcttcgccaacatcctcctctacatccagaggaccaagagcatgttccagaggaccacgtacaagtatgagatggttcagttggatgtttaccagcgatggcgatgctggcctgtggcattgactccgagttcccgggttgtgtggagctccctccgctggggggattggggccaccgtcggccggccaaggggcccagtctagacttcgtctccgcccccttggcgttgtccagttcgggcccccaagctccgcgcggttgtggcgcgcccccctgctcaccggccggcgccggtccnnggcctgctggcgctggctcat

SEQ ID NO: 315897 - DNA, 2435 bp, Homo sapiens
aaggaatcaggcaggtagaggccggtggttaatcaggaagaagatcacgtcgaaggacatagtgtgatcccgggtgaagagaagtattctgatggcgcgattatcgatacctgtgctctatccccaggacttcattgtatagcagatgaggtaaaactccgacggctctcccctatactagagatcggactaaattgcgcataaagccacgtgattcagctgactactcatagtgaggtgatcaaaaacttcatccagtatttccacaaaactgtctcagatttgattgaccagaaagtgtatgagctacaggccagtcgtgtctccagtgatgtcattgaccagaaggtgtatgagatccaggacatctatgagaacagctggaccaagctgactgaaagattcttcaagaatacaccttggcccgaggctgaagccattgctccacaggttggcaatgatgctgtcttcctgattttatacaaagaattatactacaggcacatatatgccaaagtcagtgggggaccttccttggagcagaggtttgaatcctattacaactactgcaatctcttcaactacattcttaatgccgatggtcctgctccccttgaactacccaaccagtggctctgggatattatcgatgagttcatctaccagtttcagtcattcagtcagtaccgctgtaagactgccaagaagtcagaggaggagattgactttcttcgttccaatcccaaaatctggaatgttcatagtgtcctcaatgtccttcattccctggtagacaaatccaacatcaaccgacagttggaggtatacacaagcggaggtgaccctgagagtgtggctggggagtatgggcggcactcccgagattactaccaggccatcaaggtgctggagaacatcgaactgaacaagaagagtatgtattcccgtgtgccagagtgccaggtcaccacatactattatgttgggtttgcatatttgatgatgcgtcgttaccaggatgccatccgggtcttcgccaacatcctcctctacatccagaggaccaagagcatgttccagaggaccacgtacaagtatgagatgattaacaagcagaatgagcagatgcatgcgctgctggccattgccctcacgatgtaccccatgcgtattgatgagagcattcacctccagctgcgggagaaatatggggacaagatgttgcgcatgcagaaaggtgacccacaagtctatgaagaacttttcagttactcctgccccaagttcctgtcgcctgtagtgcccaactatgataatgtgcaccccaactaccacaaagagcccttcctgcagcagctgaaggtgttttctgatgaagtacagcagcaggcccagctttcaaccatccgcagcttcctgaagctctacaccaccatgcctgtggccaagctggctggcttcctggacctcacagagcaggagttccggatccagcttcttgtcttcaaacacaagatgaagaacctcgtgtggaccagcggtatctcagccctggatggtgaatttcagtcagcctcagaggttgacttctacattgataaggacatgatccacatcgcggacaccaaggtcgccaggcgttatggggatttcttcatccgtcagatccacaaatttgaggagcttaatcgaaccctgaagaagatgggacagagaccttgatgatattcacacacattcaggaacctgttttgatgtattataggcaggaagtgtttttgctaccgtgaaacctttacctagatcagccatcagcctgtcaactcagttaacaagttaaggaccgaagtgtttcaagtggatctcagtaaaggatctttggagccagaaaaaaaaaaaacaaaaaaaaaattcgggggattcattgtgggggggggaaaaagcgggtatggaaggggcccaggggccaatagggtgtccctgtgacccaagtttcttgggcacaaagggggaaaactctggcgggctccccatatagggagctcgaaataaatctcgaatagagccggggtacccggaattatagaatcgcgagaaaaagcacggacacaccgcagaagcaccacgagcaacgcacagacgcgagacccaaacacgagcacgcacccacgtcaccacacagacccagcagcacacgcgacaccccacccacaacaccgccccgcacacaagacaaagacagcccgaggccgcaggcgcaggcagaagagggcgaagagggggccgggggtggggagggggggggcgcgagaggcgagagagaggggagggaggggggggaggagaggaggggaggcggcggcgggaacgaaggaggggaacgcgagggagggggaggaagcgagggaaggacgacaggggcggaagggcggaag

SEQ ID NO: 315898 - DNA, 1691 bp, Homo sapiens
  misc_feature (51)..(51): n is a, c, g, or t
  misc_feature (70)..(70): n is a, c, g, or t
  misc_feature (101)..(101): n is a, c, g, or t
cactctaaggatccgtaggtggttgtgggtagcaggatcagggttaggcanggacgggggtagagaaggnggtgggagagacagagagagagagacgacancctggtcgggcttctccgcctgcactccctgttaggagattactaccaggccatcaaggtgctggagaacatcgaactgaacaagaagagtatgtattcccgtgtgccagagtgccaggtcaccacatactattatgttgggtttgcatatttgatgatgcgtcgttaccaggatgccatccgggtcttcgccaacatcctcctctacatccagaggaccaagagcatgttccagaggaccacgtacaagtatgagatgattaacaagcagaatgagcagatgcatgcgctgctggccattgccctcacgatgtaccccatgcgtattgatgagagcattcacctccagctgcgggagaaatatggggacaagatgttgcgcatgcagaaaggtgacccacaagtctatgaagaacttttcagttactcctgccccaagttcctgtcgcctgtagtgcccaactatgataatgtgcaccccaactaccacaaagagcccttcctgcagcagctgaaggtgttttctgatgaagtacagcagcaggcccagctttcaaccatccgcagcttcctgaagctctacaccaccatgcctgtggccaagctggctggcttcctggacctcacagagcaggagttccggatccagcttcttgtcttcaaacacaagatgaagaacctcgtgtggaccagcggtatctcagccctggatggtgaatttcagtcagcctcagaggttgacttctacattgataaggacatgatccacatcgcggacaccaaggtcgccaggcgttatggggatttcttcatccgtcagatccacaaatttgaggagcttaatcgaaccctgaagaagatgggacagagaccttgatgatattcacacacattcaggaacctgttttgatgtattataggcaggaagtgtttttgctaccgtgaaacctttacctagatcagccatcagcctgtcaactcagttaacaagttaaggaccgaagtgtttcaagtggatctcagtaaaggatctttggagccagaaaaaaaaaaaacaaaaaaaaaattcgggggattcattgtgggggggggaaaaagcgggtatggaaggggcccaggggccaatagggtgtccctgtgacccaagtttcttgggcacaaagggggaaaactctggcgggctccccatatagggagctcgaaataaatctcgaatagagccggggtacccggaattatagaatcgcgagaaaaagcacggacacaccgcagaagcaccacgagcaacgcacagacgcgagacccaaacacgagcacgcacccacgtcaccacacagacccagcagcacacgcgacaccccacccacaacaccgccccgcacacaagacaaagacagcccgaggccgcaggcgcaggcagaagagggcgaagagggggccgggggtggggagggggggggcgcgagaggcgagagagaggggagggaggggggggaggagaggaggggaggcggcggcgggaacgaaggaggggaacgcgagggagggggaggaagcgagggaaggacgacaggggcggaagggcggaag

SEQ ID NO: 315899 - DNA, 2385 bp, Homo sapiens
cggacgcgtgggtcgacccacgcgtccgacccacgcgtccgcaagaagagtatgtattcccgtgtgccagagtgccaggtcaccacatactattatgttgggtttgcatatttgatgatgcgtcgttaccaggatgccatccgggcttcgccaacatcctcctctacatccagaggaccaagagcatgttccagaggaccacgtacaagtatgagatgattaacaagcagaatgagcagatgcatgcgctgctggccattgccctcgacgatgtaccccatgcgtatcgatgagagcattcacctccagctgcgggagaaatatggggacaagatgttgcgcatgcagaaaggtgacccacaagtctatgaagaacttttcagttactccagcctgggcaacagaacaagactctgtcccagaaaaaaaaaaagaattaagtaaagatgtaattctaagatggtatgttcattgatacatggttagctgttgtgttcttcctaaccacagaaaaatattacagataatttttatttggtgtttggctcatgtgcatgtatgtgtttctgtcttccctgtccaaaaggacttaattgaaaaagcaaggaaaaataacaaaactgagatgtatagcattttagagctgaaggagattttagggattacctgatccagaaccttcttgtttacagctaaaaaaatggattcctcaaaacatacaacttaattgatgaataggaagatccgctctcaaactctgggactccagagcttcctctggatagttgagggcctctgcagggaaaactcttggtgtttctacctctggttctatctaggatgaattgggactcatgaatgtttgttctacctccttctacagagtatgtattcccgtgtgccagagtgccaggtcaccacatactattatgttgggtttgcatatttgatgatgcgtcgttaccaggatgccatccgggtcttcgccaacatcctcctctacatccagaggaccaagagcatgttccagaggaccacgtacaagtatgagatgattaacaagcagaatgagcagatgcatgcgctgctggccattgccctcacgatgtaccccatgcgtattgatgagagcattcacctccagctgcgggagaaatatggggacaagatgttgcgcatgcagaaaggtgacccacaagtctatgaagaacttttcagttactcctgccccaagttcctgtcgcctgtagtgcccaactatgataatgtgcaccccaactaccacaaagagcccttcctgcagcagctgaaggtgttttctgatgaagtacagcagcaggcccagctttcaaccatccgcagcttcctgaagctctacaccaccatgcctgtggccaagctggctggcttcctggacctcacagagcaggagttccggatccagcttcttgtcttcaaacacaagatgaagaacctcgtgtggaccagcggtatctcagccctggatggtgaatttcagtcagcctcagaggttgacttctacattgataaggacatgatccacatcgcggacaccaaggtcgccaggcgttatggggatttcttcatccgtcagatccacaaatttgaggagcttaatcgaaccctgaagaagatgggacagagaccttgatgatattcacacacattcaggaacctgttttgatgtattataggcaggaagtgtttttgctaccgtgaaacctttacctagatcagccatcagcctgtcaactcagttaacaagttaaggaccgaagtgtttcaagtggatctcagtaaaggatctttggagccagaaaaaaaaaaaacaaaaaaaaaattcgggggattcattgtgggggggggaaaaagcgggtatggaaggggcccaggggccaatagggtgtccctgtgacccaagtttcttgggcacaaagggggaaaactctggcgggctccccatatagggagctcgaaataaatctcgaatagagccggggtacccggaattatagaatcgcgagaaaaagcacggacacaccgcagaagcaccacgagcaacgcacagacgcgagacccaaacacgagcacgcacccacgtcaccacacagacccagcagcacacgcgacaccccacccacaacaccgccccgcacacaagacaaagacagcccgaggccgcaggcgcaggcagaagagggcgaagagggggccgggggtggggagggggggggcgcgagaggcgagagagaggggagggaggggggggaggagaggaggggaggcggcggcgggaacgaaggaggggaacgcgagggagggggaggaagcgagggaaggacgacaggggcggaagggcggaag

SEQ ID NO: 315900 - DNA, 1675 bp, Homo sapiens
  misc_feature (51)..(51): n is a, c, g, or t
  misc_feature (70)..(70): n is a, c, g, or t
  misc_feature (101)..(101): n is a, c, g, or t
cactctaaggatccgtaggtggttgtgggtagcaggatcagggttaggcanggacgggggtagagaaggnggtgggagagacagagagagagagacgacancctgggtggggctgacatcttgcctgtgaggggctgagctggggctggggaacaatcgaactgaacaagaagagtatgtattcccgtgtgccagagtgccaggtcaccacatactattatgttgggtttgcatatttgatgatgcgtcgttaccaggatgccatccgggtcttcgccaacatcctcctctacatccagaggaccaagagcatgttccagaggaccacgtacaagtatgagatgattaacaagcagaatgagcagatgcatgcgctgctggccattgccctcacgatgtaccccatgcgtattgatgagagcattcacctccagctgcgggagaaatatggggacaagatgttgcgcatgcagaaaggtgacccacaagtctatgaagaacttttcagttactcctgccccaagttcctgtcgcctgtagtgcccaactatgataatgtgcaccccaactaccacaaagagcccttcctgcagcagctgaaggtgttttctgatgaagtacagcagcaggcccagctttcaaccatccgcagcttcctgaagctctacaccaccatgcctgtggccaagctggctggcttcctggacctcacagagcaggagttccggatccagcttcttgtcttcaaacacaagatgaagaacctcgtgtggaccagcggtatctcagccctggatggtgaatttcagtcagcctcagaggttgacttctacattgataaggacatgatccacatcgcggacaccaaggtcgccaggcgttatggggatttcttcatccgtcagatccacaaatttgaggagcttaatcgaaccctgaagaagatgggacagagaccttgatgatattcacacacattcaggaacctgttttgatgtattataggcaggaagtgtttttgctaccgtgaaacctttacctagatcagccatcagcctgtcaactcagttaacaagttaaggaccgaagtgtttcaagtggatctcagtaaaggatctttggagccagaaaaaaaaaaaacaaaaaaaaaattcgggggattcattgtgggggggggaaaaagcgggtatggaaggggcccaggggccaatagggtgtccctgtgacccaagtttcttgggcacaaagggggaaaactctggcgggctccccatatagggagctcgaaataaatctcgaatagagccggggtacccggaattatagaatcgcgagaaaaagcacggacacaccgcagaagcaccacgagcaacgcacagacgcgagacccaaacacgagcacgcacccacgtcaccacacagacccagcagcacacgcgacaccccacccacaacaccgccccgcacacaagacaaagacagcccgaggccgcaggcgcaggcagaagagggcgaagagggggccgggggtggggagggggggggcgcgagaggcgagagagaggggagggaggggggggaggagaggaggggaggcggcggcgggaacgaaggaggggaacgcgagggagggggaggaagcgagggaaggacgacaggggcggaagggcggaag

SEQ ID NO: 315901 - DNA, 1366 bp, Homo sapiens
caaacttttactttaagttggatccctgttatcagtaatactttagatgaacctcccctttcaaagtagtaaaaactaaagcacccgcgtaccccatgcgtattgatgagagcattcacctccagctgcgggagaaatatggggacaagatgttgcgcatgcagaaaggtgacccacaagtctatgaagaacttttcagttactcctgccccaagttcctgtcgcctgtagtgcccaactatgataatgtgcaccccaactaccacaaagagcccttcctgcagcagctgaaggtgttttctgatgaagtacagcagcaggcccagctttcaaccatccgcagcttcctgaagctctacaccaccatgcctgtggccaagctggctggcttcctggacctcacagagcaggagttccggatccagcttcttgtcttcaaacacaagatgaagaacctcgtgtggaccagcggtatctcagccctggatggtgaatttcagtcagcctcagaggttgacttctacattgataaggacatgatccacatcgcggacaccaaggtcgccaggcgttatggggatttcttcatccgtcagatccacaaatttgaggagcttaatcgaaccctgaagaagatgggacagagaccttgatgatattcacacacattcaggaacctgttttgatgtattataggcaggaagtgtttttgctaccgtgaaacctttacctagatcagccatcagcctgtcaactcagttaacaagttaaggaccgaagtgtttcaagtggatctcagtaaaggatctttggagccagaaaaaaaaaaaacaaaaaaaaaattcgggggattcattgtgggggggggaaaaagcgggtatggaaggggcccaggggccaatagggtgtccctgtgacccaagtttcttgggcacaaagggggaaaactctggcgggctccccatatagggagctcgaaataaatctcgaatagagccggggtacccggaattatagaatcgcgagaaaaagcacggacacaccgcagaagcaccacgagcaacgcacagacgcgagacccaaacacgagcacgcacccacgtcaccacacagacccagcagcacacgcgacaccccacccacaacaccgccccgcacacaagacaaagacagcccgaggccgcaggcgcaggcagaagagggcgaagagggggccgggggtggggagggggggggcgcgagaggcgagagagaggggagggaggggggggaggagaggaggggaggcggcggcgggaacgaaggaggggaacgcgagggagggggaggaagcgagggaaggacgacaggggcggaagggcggaag

SEQ ID NO: 315902 - DNA, 781 bp, Homo sapiens
aaataattaaatagtacactaccgaattatacatatatatatttttttctaggtgacatgatccacatcgcggacaccaaggtcgccaggcgttatggggatttcttcatccgtcagatccacaaatttgaggagcttaatcgaaccctgaagaagatgggacagagaccttgatgatattcacacacattcaggaacctgttttgatgtattataggcaggaagtgtttttgctaccgtgaaacctttacctagatcagccatcagcctgtcaactcagttaacaagttaaggaccgaagtgtttcaagtggatctcagtaaaggatctttggagccagatttgtcgtctcattattgtaggagagaatttgtgggttgtggcagtaatacatttcccatgtgtcctgatgctttcaggatacatcagttgttagtgtttaaattgagttatttttattttgtgcttttgagatggagtctcactctgtctcccaggctggagtgcagtagcgtgatctcagttcgttgcatcctccgctgcccaggttcaagcagttctgcctcagccttccaagtagctgggattacaggcgtgtgccaccacactcagctaatttttgtattctcagtagagatgggttttaccatgttggccaggctggtctcgaactcctggcctcaagtgattcgcctgccttggcctcccaaaatgtgctaggattacaggcatgagccaccacgccccgcctaaattcaaaatctttttgtttttttttaga

SEQ ID NO: 315903 - DNA, 646 bp, Homo sapiens
  misc_feature (1)..(1): n is a, c, g, or t
ngcacgagccttgataatacatcaaaacaggttcctgaatgtgtgtgaatatcatcaaggtctctgttttgatgtattataggcaggaagtgtttttgctaccgtgaaacctttacctagatcagccatcagcctgtcaactcagttaacaagttaaggaccgaagtgtttcaagtggatctcagtaaaggatctttggagccagatttgtcgtctcattattgtaggagagaatttgtgggttgtggcagtaatacatttcccatgtgtcctgatgctttcaggatacatcagttgttagtgtttaaattgagttatttttattttgtgcttttgagatggagtctcactctgtctcccaggctggagtgcagtagcgtgatctcagttcgttgcatcctccgctgcccaggttcaagcagttctgcctcagccttccaagtagctgggattacaggcgtgtgccaccacactcagctaatttttgtattctcagtagagatgggttttaccatgttggccaggctggtctcgaactcctggcctcaagtgattcgcctgccttggcctcccaaaatgtgctaggattacaggcatgagccaccacgccccgcctaaattcaaaatctttttgtttttttttaga

SEQ ID NO: 315904 - DNA, 394 bp, Homo sapiens
tggaaacgctgtgttaaagaatggtggccaaaaaagtagttcttatagcagaaaacagcaagcagttaaatatggctatagttaatgatacagaggcaggagattatcctgaaaagcttgatgggtccctaactgatacaaaaacaatattttcttgtgttgagaaagattgaagtgtggagttgggttgaggacagttgtgggcttgaagggctttggcctcagctctgtttatttgacatcttcccctttctaagcctgggtcctcatctgtaaaatgttaggattggcattctccagtccttttggaattttagagatttttttcttgatttttagctggaccaagctgactgaaagattcttcaagaatacaccttggcccgaggctgaa

SEQ ID NO: 315905 - DNA, 2450 bp, Homo sapiens
tcatttagcgtctttccggcggtgctcgcaagcgaggcagccatgtcttatcccgctgatgattatgagtctgaggcggcttatgacccctacgcttatcccagcgactatgatatgcacacaggagatccaaagcaggaccttgcttatgaacgtcagtatgaacagcaaacctatcaggtgatccctgaggtgatcaaaaacttcatccagtatttccacaaaactgtctcagatttgattgaccagaaagtgtatgagctacaggccagtcgtgtctccagtgatgtcattgaccagaaggtgtatgagatccaggacatctatgagaacagctggaccaagctgactgaaagattcttcaagaatacaccttggcccgaggctgaagccattgctccacaggttggcaatgatgctgtcttcctgattttatacaaagaattatactacaggcacatatatgccaaagtcagtgggggaccttccttggagcagaggtttgaatcctattacaactactgcaatctcttcaactacattcttaatgccgatggtcctgctccccttgaactacccaaccagtggctctgggatattatcgatgagttcatctaccagtttcagtcattcagtcagtaccgctgtaagactgccaagaagtcagaggaggagattgactttcttcgttccaatcccaaaatctggaatgttcatagtgtcctcaatgtccttcattccctggtagacaaatccaacatcaaccgacagttggaggtatacacaagcggaggtgaccctgagagtgtggctggggagtatgggcggcactccctctacaaaatgcttggttacttcagcctggtcgggcttctccgcctgcactccctgttaggagattactaccaggccatcaaggtgctggagaacatcgaactgaacaagaagagtatgtattcccgtgtgccagagtgccaggtcaccacatactattatgttgggtttgcatatttgatgatgcgtcgttaccaggatgccatccgggtcttcgccaacatcctcctctacatccagaggaccaagagcatgttccagaggaccacgtacaagtatgagatgattaacaagcagaatgagcagatgcatgcgctgctggccattgccctcacgatgtaccccatgcgtattgatgagagcattcacctccagctgcgggagaaatatggggacaagatgttgcgcatgcagaaaggtgacccacaagtctatgaagaacttttcagttactcctgccccaagttcctgtcgcctgtagtgcccaactatgataatgtgcaccccaactaccacaaagagcccttcctgcagcagctgaaggtgttttctgatgaagtacagcagcaggcccagctttcaaccatccgcagcttcctgaagctctacaccaccatgcctgtggccaagctggctggcttcctggacctcacagagcaggagttccggatccagcttcttgtcttcaaacacaagatgaagaacctcgtgtggaccagcggtatctcagccctggatggtgaatttcagtcagcctcagaggttgacttctacattgataaggacatgatccacatcgcggacaccaaggtcgccaggcgttatggggatttcttcatccgtcagatccacaaatttgaggagcttaatcgaaccctgaagaagatgggacagagaccttgatgatattcacacacattcaggaacctgttttgatgtattataggcaggaagtgtttttgctaccgtgaaacctttacctagatcagccatcagcctgtcaactcagttaacaagttaaggaccgaagtgtttcaagtggatctcagtaaaggatctttggagccagaaaaaaaaaaaacaaaaaaaaaattcgggggattcattgtgggggggggaaaaagcgggtatggaaggggcccaggggccaatagggtgtccctgtgacccaagtttcttgggcacaaagggggaaaactctggcgggctccccatatagggagctcgaaataaatctcgaatagagccggggtacccggaattatagaatcgcgagaaaaagcacggacacaccgcagaagcaccacgagcaacgcacagacgcgagacccaaacacgagcacgcacccacgtcaccacacagacccagcagcacacgcgacaccccacccacaacaccgccccgcacacaagacaaagacagcccgaggccgcaggcgcaggcagaagagggcgaagagggggccgggggtggggagggggggggcgcgagaggcgagagagaggggagggaggggggggaggagaggaggggaggcggcggcgggaacgaaggaggggaacgcgagggagggggaggaagcgagggaaggacgacaggggcggaagggcggaag

SEQ ID NO: 315906 - DNA, 1966 bp, Homo sapiens
tcatttagcgtctttccggcggtgctcgcaagcgaggcagccatgtcttatcccgctgatgattatgagtctgaggcggcttatgacccctacgcttatcccagcgactatgatatgcacacaggagatccaaagcaggaccttgcttatgaacgtcagtatgaacagcaaacctatcaggtgatccctgaggtgatcaaaaacttcatccagtatttccacaaaactgtctcagatttgattgaccagaaagtgtatgagctacaggccagtcgtgtctccagtgatgtcattgaccagaaggtgtatgagatccaggacatctatgagaacagctggaccaagctgactgaaagattcttcaagaatacaccttggcccgaggctgaagccattgctccacaggttggcaatgatgctgtcttcctgattttatacaaagaattatactacaggcacatatatgccaaagtcagtgggggaccttccttggagcagaggtttgaatcctattacaactactgcaatctcttcaactacattcttaatgccgatggtcctgctccccttgaactacccaaccagtggctctgggatattatcgatgagttcatctaccagtttcagtcattcagtcagtaccgctgtaagactgccaagaagtcagaggaggagattgactttcttcgttccaatcccaaaatctggaatgttcatagtgtcctcaatgtccttcattccctggtagacaaatccaacatcaaccgacagttggaggtatacacaagcggaggtgaccctgagagtgtggctggggagtatgggcggcactccctctacaaaatgcttggttacttcagcctggtcgggcttctccgcctgcactccctgttaggagattactaccaggccatcaaggtgctggagaacatcgaactgaacaagaagagtatgtattcccgtgtgccagagtgccaggtcaccacatactattatgttgggtttgcatatttgatgatgcgtcgttaccaggatgccatccgggtcttcgccaacatcctcctctacatccagaggaccaagagcatgttccagaggaccacgtacaagtatgagatgattaacaagcagaatgagcagatgcatgcgctgctggccattgccctcacgatgtaccccatgcgtattgatgagagcattcacctccagctgcgggagaaatatggggacaagatgttgcgcatgcagaaaggtgacccacaagtctatgaagaacttttcagttactcctgccccaagttcctgtcgcctgtagtgcccaactatgataatgtgcaccccaactaccacaaagagcccttcctgcagcagctgaaggtgttttctgatgaagtacagcagcaggcccagctttcaaccatccgcagcttcctgaagctctacaccaccatgcctgtggccaagctggctggcttcctggacctcacagagcaggagttccggatccagcttcttgtcttcaaacacaagatgaagaacctcgtgtggaccagcggtatctcagccctggatggtgaatttcagtcagcctcagaggttgacttctacattgataaggacatgatccacatcgcggacaccaaggtcgccaggcgttatggggatttcttcatccgtcagatccacaaatttgaggagcttaatcgaaccctgaagaagatgggacagagaccttgatgatattcacacacattcaggaacctgttttgatgtattataggcaggaagtgtttttgctaccgtgaaacctttacctagatcagccatcagcctgtcaactcagttaacaagttaaggaccgaagtgtttcaagtggatctcagtaaaggatctttggagccagaaaaaaaaataagattacgagtacgagccgaaatcaccagagtagaggtgggcctgaaatgga

SEQ ID NO: 315907 - DNA, 2462 bp, Homo sapiens
  misc_feature (19)..(19): n is a, c, g, or t
aaaggctaggtacgaggcnggtgttgaatcggccgaggcgcaagcgaggcagccatgtcttatcccgctgatgattatgagtctgaggcggcttatgacccctacgcttatcccagcgactatgatatgcacacaggagatccaaagcaggaccttgcttatgaacgtcagtatgaacagcaaacctatcaggtgatccctgaggtgatcaaaaacttcatccagtatttccacaaaactgtctcagatttgattgaccagaaagtgtatgagctacaggccagtcgtgtctccagtgatgtcattgaccagaaggtgtatgagatccaggacatctatgagaacagctggaccaagctgactgaaagattcttcaagaatacaccttggcccgaggctgaagccattgctccacaggttggcaatgatgctgtcttcctgattttatacaaagaattatactacaggcacatatatgccaaagtcagtgggggaccttccttggagcagaggtttgaatcctattacaactactgcaatctcttcaactacattcttaatgccgatggtcctgctccccttgaactacccaaccagtggctctgggatattatcgatgagttcatctaccagtttcagtcattcagtcagtaccgctgtaagactgccaagaagtcagaggaggagattgactttcttcgttccaatcccaaaatctggaatgttcatagtgtcctcaatgtccttcattccctggtagacaaatccaacatcaaccgacagttggaggtatacacaagcggaggtgaccctgagagtgtggctggggagtatgggcggcactccctctacaaaatgcttggttacttcagcctggtcgggcttctccgcctgcactccctgttaggagattactaccaggccatcaaggtgctggagaacatcgaactgaacaagaagagtatgtattcccgtgtgccagagtgccaggtcaccacatactattatgttgggtttgcatatttgatgatgcgtcgttaccaggatgccatccgggtcttcgccaacatcctcctctacatccagaggaccaagagcatgttccagaggaccacgtacaagtatgagatgattaacaagcagaatgagcagatgcatgcgctgctggccattgccctcacgatgtaccccatgcgtattgatgagagcattcacctccagctgcgggagaaatatggggacaagatgttgcgcatgcagaaaggtgacccacaagtctatgaagaacttttcagttactcctgccccaagttcctgtcgcctgtagtgcccaactatgataatgtgcaccccaactaccacaaagagcccttcctgcagcagctgaaggtgttttctgatgaagtacagcagcaggcccagctttcaaccatccgcagcttcctgaagctctacaccaccatgcctgtggccaagctggctggcttcctggacctcacagagcaggagttccggatccagcttcttgtcttcaaacacaagatgaagaacctcgtgtggaccagcggtatctcagccctggatggtgaatttcagtcagcctcagaggttgacttctacattgataaggacatgatccacatcgcggacaccaaggtcgccaggcgttatggggatttcttcatccgtcagatccacaaatttgaggagcttaatcgaaccctgaagaagatgggacagagaccttgatgatattcacacacattcaggaacctgttttgatgtattataggcaggaagtgtttttgctaccgtgaaacctttacctagatcagccatcagcctgtcaactcagttaacaagttaaggaccgaagtgtttcaagtggatctcagtaaaggatctttggagccagaaaaaaaaaaaacaaaaaaaaaattcgggggattcattgtgggggggggaaaaagcgggtatggaaggggcccaggggccaatagggtgtccctgtgacccaagtttcttgggcacaaagggggaaaactctggcgggctccccatatagggagctcgaaataaatctcgaatagagccggggtacccggaattatagaatcgcgagaaaaagcacggacacaccgcagaagcaccacgagcaacgcacagacgcgagacccaaacacgagcacgcacccacgtcaccacacagacccagcagcacacgcgacaccccacccacaacaccgccccgcacacaagacaaagacagcccgaggccgcaggcgcaggcagaagagggcgaagagggggccgggggtggggagggggggggcgcgagaggcgagagagaggggagggaggggggggaggagaggaggggaggcggcggcgggaacgaaggaggggaacgcgagggagggggaggaagcgagggaaggacgacaggggcggaagggcggaag

SEQ ID NO: 315908 - DNA, 2466 bp, Homo sapiens
tcatttagcgtctttccggcggtgctcgcaagcgaggcagccatgtcttatcccgctgatgattatgagtctgaggcggcttatgacccctacgcttatcccagcgactatgatatgcacacaggagatccaaagcaggaccttgcttatgaacgtcagtatgaacagcaaacctatcaggtgatccctgaggtgatcaaaaacttcatccagtatttccacaaaactgtctcagatttgattgaccagaaagtgtatgagctacaggccagtcgtgtctccagtgatgtcattgaccagaaggtgtatgagatccaggacatctatgagaacagctggaccaagctgactgaaagattcttcaagaatacaccttggcccgaggctgaagccattgctccacaggttggcaatgatgctgtcttcctgattttatacaaagaattatactacaggcacatatatgccaaagtcagtgggggaccttccttggagcagaggtttgaatcctattacaactactgcaatctcttcaactacattcttaatgccgatggtcctgctccccttgaactacccaaccagtggctctgggatattatcgatgagttcatctaccagtttcagtcattcagtcagtaccgctgtaagactgccaagaagtcagaggaggagattgactttcttcgttccaatcccaaaatctggaatgttcatagtgtcctcaatgtccttcattccctggtagacaaatccaacatcaaccgacagttggaggtatacacaagcggaggtgaccctgagagtgtggctggggagtatgggcggcactccctctacaaaatgcttggttacttcagcctggtcgggcttctccgcctgcactccctgttaggagattactaccaggccatcaaggtgctggagaacatcgaactgaacaagaagagtatgtattcccgtgtgccagagtgccaggtcaccacatactattatgttgggtttgcatatttgatgatgcgtcgttaccaggatgccatccgggtcttcgccaacatcctcctctacatccagaggaccaagagcatgttccagaggaccacgtacaagtatgagatgattaacaagcagaatgagcagatgcatgcgctgctggccattgccctcacgatgtaccccatgcgtattgatgagagcattcacctccagctgcgggagaaatatggggacaagatgttgcgcatgcagaaaggtgacccacaagtctatgaagaacttttcagttactcctgccccaagttcctgtcgcctgtagtgcccaactatgataatgtgcaccccaactaccacaaagagcccttcctgcagcagctgaaggtgttttctgatgaagtacagcagcaggcccagctttcaaccatccgcagcttcctgaagctctacaccaccatgcctgtggccaagctggctggcttcctggacctcacagagcaggagttccggatccagcttcttgtcttcaaacacaagatgaagaacctcgtgtggaccagcggtatctcagccctggatggtgaatttcagtcagcctcagaggttgacttctacattgataaggacatgatccacatcgcggacaccaaggtcgccaggcgttatggggatttcttcatccgtcagatccacaaatttgaggagatggagtcttgtgctgtcacccatgctggagtgcagcgacgtgatcttagctcactgcaacctctgcctcctgggttcaagcgagtctccctcctcagcctcccgcatagctggaattacagcttaatcgaaccctgaagaagatgggacagagaccttgatgatattcacacacattcaggaacctgttttgatgtattataggcaggaagtgtttttgctaccgtgaaacctttacctagatcagccatcagcctgtcaactcagttaacaagttaaggaccgaagtgtttcaagtggatctcagtaaaggatctttggagccagatttgtcgtctcattattgtaggagagaatttgtgggttgtggcagtaatacatttcccatgtgtcctgatgctttcaggatacatcagttgttagtgtttaaattgagttatttttattttgtgcttttgagatggagtctcactctgtctcccaggctggagtgcagtagcgtgatctcagttcgttgcatcctccgctgcccaggttcaagcagttctgcctcagccttccaagtagctgggattacaggcgtgtgccaccacactcagctaatttttgtattctcagtagagatgggttttaccatgttggccaggctggtctcgaactcctggcctcaagtgattcgcctgccttggcctcccaaaatgtgctaggattacaggcatgagccaccacgccccgcctaaattcaaaatctttttgtttttttttaga

SEQ ID NO: 315909 - DNA, 2473 bp, Homo sapiens
tcatttagcgtctttccggcggtgctcgcaagcgaggcagccatgtcttatcccgctgatgattatgagtctgaggcggcttatgacccctacgcttatcccagcgactatgatatgcacacaggagatccaaagcaggaccttgcttatgaacgtcagtatgaacagcaaacctatcaggtgatccctgaggtgatcaaaaacttcatccagtatttccacaaaactgtctcagatttgattgaccagaaagtgtatgagctacaggccagtcgtgtctccagtgatgtcattgaccagaaggtgtatgagatccaggacatctatgagaacagctggaccaagctgactgaaagattcttcaagaatacaccttggcccgaggctgaagccattgctccacaggttggcaatgatgctgtcttcctgattttatacaaagaattatactacaggcacatatatgccaaagtcagtgggggaccttccttggagcagaggtttgaatcctattacaactactgcaatctcttcaactacattcttaatgccgatggtcctgctccccttgaactacccaaccagtggctctgggatattatcgatgagttcatctaccagtttcagtcattcagtcagtaccgctgtaagactgccaagaagtcagaggaggagattgactttcttcgttccaatcccaaaatctggaatgttcatagtgtcctcaatgtccttcattccctggtagacaaatccaacatcaaccgacagttggaggtatacacaagcggaggtgaccctgagagtgtggctggggagtatgggcggcactccctctacaaaatgcttggttacttcagcctggtcgggcttctccgcctgcactccctgttaggagattactaccaggccatcaaggtgctggagaacatcgaactgaacaagaagagtatgtattcccgtgtgccagagtgccaggtcaccacatactattatgttgggtttgcatatttgatgatgcgtcgttaccaggatgccatccgggtcttcgccaacatcctcctctacatccagaggactgctcttggtcctctggatgtagcaagagcatgttccagaggaccacgtacaagtatgagatgattaacaagcagaatgagcagatgcatgcgctgctggccattgccctcacgatgtaccccatgcgtattgatgagagcattcacctccagctgcgggagaaatatggggacaagatgttgcgcatgcagaaaggtgacccacaagtctatgaagaacttttcagttactcctgccccaagttcctgtcgcctgtagtgcccaactatgataatgtgcaccccaactaccacaaagagcccttcctgcagcagctgaaggtgttttctgatgaagtacagcagcaggcccagctttcaaccatccgcagcttcctgaagctctacaccaccatgcctgtggccaagctggctggcttcctggacctcacagagcaggagttccggatccagcttcttgtcttcaaacacaagatgaagaacctcgtgtggaccagcggtatctcagccctggatggtgaatttcagtcagcctcagaggttgacttctacattgataaggacatgatccacatcgcggacaccaaggtcgccaggcgttatggggatttcttcatccgtcagatccacaaatttgaggagcttaatcgaaccctgaagaagatgggacagagaccttgatgatattcacacacattcaggaacctgttttgatgtattataggcaggaagtgtttttgctaccgtgaaacctttacctagatcagccatcagcctgtcaactcagttaacaagttaaggaccgaagtgtttcaagtggatctcagtaaaggatctttggagccagaaaaaaaaaaaacaaaaaaaaaattcgggggattcattgtgggggggggaaaaagcgggtatggaaggggcccaggggccaatagggtgtccctgtgacccaagtttcttgggcacaaagggggaaaactctggcgggctccccatatagggagctcgaaataaatctcgaatagagccggggtacccggaattatagaatcgcgagaaaaagcacggacacaccgcagaagcaccacgagcaacgcacagacgcgagacccaaacacgagcacgcacccacgtcaccacacagacccagcagcacacgcgacaccccacccacaacaccgccccgcacacaagacaaagacagcccgaggccgcaggcgcaggcagaagagggcgaagagggggccgggggtggggagggggggggcgcgagaggcgagagagaggggagggaggggggggaggagaggaggggaggcggcggcgggaacgaaggaggggaacgcgagggagggggaggaagcgagggaaggacgacaggggcggaagggcggaag

SEQ ID NO: 315910 - DNA, 2287 bp, Homo sapiens
tcatttagcgtctttccggcggtgctcgcaagcgaggcagccatgtcttatcccgctgatgattatgagtctgaggcggcttatgacccctacgcttatcccagcgactatgatatgcacacaggagatccaaagcaggaccttgcttatgaacgtcagtatgaacagcaaacctatcaggtgatccctgaggtgatcaaaaacttcatccagtatttccacaaaactgtctcagatttgattgaccagaaagtgtatgagctacaggccagtcgtgtctccagtgatgtcattgaccagaaggtgtatgagatccaggacatctatgagaacagctggaccaagctgactgaaagattcttcaagaatacaccttggcccgaggctgaagccattgctccacaggttggcaatgatgctgtcttcctgattttatacaaagaattatactacaggcacatatatgccaaagtcagtgggggaccttccttggagcagaggtttgaatcctattacaactactgcaatctcttcaactacattcttaatgccgatggtcctgctccccttgaactacccaaccagtggctctgggatattatcgatgagttcatctaccagtttcagtcattcagtcagtaccgctgtaagactgccaagaagtcagaggaggagattgactttcttcgttccaatcccaaaatctggaatgttcatagtgtcctcaatgtccttcattccctggtagacaaatccaacatcaaccgacagttggaggtatacacaagcggaggtgaccctgagagtgtggctggggagtatgggcggcactccctctacaaaatgcttggttacttcagcctggtcgggcttctccgcctgcactccctgttaggagattactaccaggccatcaaggtgctggagaacatcgaactgaacaagaagagtatgtattcccgtgtgccagagtgccaggtcaccacatactattatgttgggtttgcatatttgatgatgcgtcgttaccaggatgccatccgggtcttcgccaacatcctcctctacatccagaggaccaagagcatgttccagaggaccacgtacaagtatgagatgattaacaagcagaatgagcagatgcatgcgctgctggccattgccctcacgatgtaccccatgcgtattgatgagagcattcacctccagctgcgggagaaatatggggacaagatgttgcgcatgcagaaaggtgacccacaagtctatgaagaacttttcagttactcctgccccaagttcctgtcgcctgtagtgcccaactatgataatgtgcaccccaactaccacaaagagcccttcctgcagcagctgaaggtgttttctgatgaagtacagcagcaggcccagctttcaaccatccgcagcttcctgaagctctacaccaccatgcctgtggccaagctggctggcttcctggacctcacagagcaggagttccggatccagcttcttgtcttcaaacacaagatgaagaacctcgtgtggaccagcggtatctcagccctggatggtgaatttcagtcagcctcagaggttgacttctacattgataaggtatgcctgtcccctgggcttgggcttaatcgaaccctgaagaagatgggacagagaccttgatgatattcacacacattcaggaacctgttttgatgtattataggcaggaagtgtttttgctaccgtgaaacctttacctagatcagccatcagcctgtcaactcagttaacaagttaaggaccgaagtgtttcaagtggatctcagtaaaggatctttggagccagatttgtcgtctcattattgtaggagagaatttgtgggttgtggcagtaatacatttcccatgtgtcctgatgctttcaggatacatcagttgttagtgtttaaattgagttatttttattttgtgcttttgagatggagtctcactctgtctcccaggctggagtgcagtagcgtgatctcagttcgttgcatcctccgctgcccaggttcaagcagttctgcctcagccttccaagtagctgggattacaggcgtgtgccaccacactcagctaatttttgtattctcagtagagatgggttttaccatgttggccaggctggtctcgaactcctggcctcaagtgattcgcctgccttggcctcccaaaatgtgctaggattacaggcatgagccaccacgccccgcctaaattcaaaatctttttgtttttttttaga

SEQ ID NO: 315911 - DNA, 2495 bp, Homo sapiens
aaggaatcaggcaggtagaggccggtggttaatcaggaagaagatcacgtcgaaggacatagtgtgatcccgggtgaagagaagtattctgatggcgcgattatcgatacctgtgctctatccccaggacttcattgtatagcagatgaggtaaaactccgacggctctcccctatactagagatcggactaaattgcgcataaagccacgtgattcagctgactactcatagtgaggtgatcaaaaacttcatccagtatttccacaaaactgtctcagatttgattgaccagaaagtgtatgagctacaggccagtcgtgtctccagtgatgtcattgaccagaaggtgtatgagatccaggacatctatgagaacagctggaccaagctgactgaaagattcttcaagaatacaccttggcccgaggctgaagccattgctccacaggttggcaatgatgctgtcttcctgattttatacaaagaattatactacaggcacatatatgccaaagtcagtgggggaccttccttggagcagaggtttgaatcctattacaactactgcaatctcttcaactacattcttaatgccgatggtcctgctccccttgaactacccaaccagtggctctgggatattatcgatgagttcatctaccagtttcagtcattcagtcagtaccgctgtaagactgccaagaagtcagaggaggagattgactttcttcgttccaatcccaaaatctggaatgttcatagtgtcctcaatgtccttcattccctggtagacaaatccaacatcaaccgacagttggaggtatacacaagcggaggtgaccctgagagtgtggctggggagtatgggcggcactccctctacaaaatgcttggttacttcagcctggtcgggcttctccgcctgcactccctgttaggagattactaccaggccatcaaggtgctggagaacatcgaactgaacaagaagagtatgtattcccgtgtgccagagtgccaggtcaccacatactattatgttgggtttgcatatttgatgatgcgtcgttaccaggatgccatccgggtcttcgccaacatcctcctctacatccagaggaccaagagcatgttccagaggaccacgtacaagtatgagatgattaacaagcagaatgagcagatgcatgcgctgctggccattgccctcacgatgtaccccatgcgtattgatgagagcattcacctccagctgcgggagaaatatggggacaagatgttgcgcatgcagaaaggtgacccacaagtctatgaagaacttttcagttactcctgccccaagttcctgtcgcctgtagtgcccaactatgataatgtgcaccccaactaccacaaagagcccttcctgcagcagctgaaggtgttttctgatgaagtacagcagcaggcccagctttcaaccatccgcagcttcctgaagctctacaccaccatgcctgtggccaagctggctggcttcctggacctcacagagcaggagttccggatccagcttcttgtcttcaaacacaagatgaagaacctcgtgtggaccagcggtatctcagccctggatggtgaatttcagtcagcctcagaggttgacttctacattgataaggacatgatccacatcgcggacaccaaggtcgccaggcgttatggggatttcttcatccgtcagatccacaaatttgaggagcttaatcgaaccctgaagaagatgggacagagaccttgatgatattcacacacattcaggaacctgttttgatgtattataggcaggaagtgtttttgctaccgtgaaacctttacctagatcagccatcagcctgtcaactcagttaacaagttaaggaccgaagtgtttcaagtggatctcagtaaaggatctttggagccagaaaaaaaaaaaacaaaaaaaaaattcgggggattcattgtgggggggggaaaaagcgggtatggaaggggcccaggggccaatagggtgtccctgtgacccaagtttcttgggcacaaagggggaaaactctggcgggctccccatatagggagctcgaaataaatctcgaatagagccggggtacccggaattatagaatcgcgagaaaaagcacggacacaccgcagaagcaccacgagcaacgcacagacgcgagacccaaacacgagcacgcacccacgtcaccacacagacccagcagcacacgcgacaccccacccacaacaccgccccgcacacaagacaaagacagcccgaggccgcaggcgcaggcagaagagggcgaagagggggccgggggtggggagggggggggcgcgagaggcgagagagaggggagggaggggggggaggagaggaggggaggcggcggcgggaacgaaggaggggaacgcgagggagggggaggaagcgagggaaggacgacaggggcggaagggcggaag

SEQ ID NO: 315912 - DNA, 2390 bp, Homo sapiens
tcatttagcgtctttccggcggtgctcgcaagcgaggcagccatgtcttatcccgctgatgattatgagtctgaggcggcttatgacccctacgcttatcccagcgactatgatatgcacacaggagatccaaagcaggaccttgcttatgaacgtcagtatgaacagcaaacctatcaggtgatccctgaggtgatcaaaaacttcatccagtatttccacaaaactgtctcagatttgattgaccagaaagtgtatgagctacaggccagtcgtgtctccagtgatgtcattgaccagaaggtgtatgagatccaggacatctatgagaacagctggaccaagctgactgaaagattcttcaagaatacaccttggcccgaggctgaagccattgctccacaggttggcaatgatgctgtcttcctgattttatacaaagaattatactacaggcacatatatgccaaagtcagtgggggaccttccttggagcagaggtttgaatcctattacaactactgcaatctcttcaactacattcttaatgccgatggtcctgctccccttgaactacccaaccagtggctctgggatattatcgatgagttcatctaccagtttcagtcattcagtcagtaccgctgtaagactgccaagaagtcagaggaggagattgactttcttcgttccaatcccaaaatctggaatgttcatagtgtcctcaatgtccttcattccctggtagacaaatccaacatcaaccgacagttggaggtatacacaagcggaggtgaccctgagagtgtggctggggagtatgggcggcactcccgagattactaccaggccatcaaggtgctggagaacatcgaactgaacaagaagagtatgtattcccgtgtgccagagtgccaggtcaccacatactattatgttgggtttgcatatttgatgatgcgtcgttaccaggatgccatccgggtcttcgccaacatcctcctctacatccagaggaccaagagcatgttccagaggaccacgtacaagtatgagatgattaacaagcagaatgagcagatgcatgcgctgctggccattgccctcacgatgtaccccatgcgtattgatgagagcattcacctccagctgcgggagaaatatggggacaagatgttgcgcatgcagaaaggtgacccacaagtctatgaagaacttttcagttactcctgccccaagttcctgtcgcctgtagtgcccaactatgataatgtgcaccccaactaccacaaagagcccttcctgcagcagctgaaggtgttttctgatgaagtacagcagcaggcccagctttcaaccatccgcagcttcctgaagctctacaccaccatgcctgtggccaagctggctggcttcctggacctcacagagcaggagttccggatccagcttcttgtcttcaaacacaagatgaagaacctcgtgtggaccagcggtatctcagccctggatggtgaatttcagtcagcctcagaggttgacttctacattgataaggacatgatccacatcgcggacaccaaggtcgccaggcgttatggggatttcttcatccgtcagatccacaaatttgaggagcttaatcgaaccctgaagaagatgggacagagaccttgatgatattcacacacattcaggaacctgttttgatgtattataggcaggaagtgtttttgctaccgtgaaacctttacctagatcagccatcagcctgtcaactcagttaacaagttaaggaccgaagtgtttcaagtggatctcagtaaaggatctttggagccagaaaaaaaaaaaacaaaaaaaaaattcgggggattcattgtgggggggggaaaaagcgggtatggaaggggcccaggggccaatagggtgtccctgtgacccaagtttcttgggcacaaagggggaaaactctggcgggctccccatatagggagctcgaaataaatctcgaatagagccggggtacccggaattatagaatcgcgagaaaaagcacggacacaccgcagaagcaccacgagcaacgcacagacgcgagacccaaacacgagcacgcacccacgtcaccacacagacccagcagcacacgcgacaccccacccacaacaccgccccgcacacaagacaaagacagcccgaggccgcaggcgcaggcagaagagggcgaagagggggccgggggtggggagggggggggcgcgagaggcgagagagaggggagggaggggggggaggagaggaggggaggcggcggcgggaacgaaggaggggaacgcgagggagggggaggaagcgagggaaggacgacaggggcggaagggcggaag

SEQ ID NO: 315913 - DNA, 1634 bp, Homo sapiens
  misc_feature (1490)..(1490): n is a, c, g, or t
  misc_feature (1496)..(1496): n is a, c, g, or t
  misc_feature (1499)..(1499): n is a, c, g, or t
  misc_feature (1505)..(1505): n is a, c, g, or t
  misc_feature (1508)..(1508): n is a, c, g, or t
  misc_feature (1510)..(1510): n is a, c, g, or t
  misc_feature (1520)..(1521): n is a, c, g, or t
  misc_feature (1547)..(1547): n is a, c, g, or t
tcatttagcgtctttccggcggtgctcgcaagcgaggcagccatgtcttatcccgctgatgattatgagtctgaggcggcttatgacccctacgcttatcccagcgactatgatatgcacacaggagatccaaagcaggaccttgcttatgaacgtcagtatgaacagcaaacctatcaggtgatccctgaggtgatcaaaaacttcatccagtatttccacaaaactgtctcagatttgattgaccagaaagtgtatgagctacaggccagtcgtgtctccagtgatgtcattgaccagaaggtgtatgagatccaggacatctatgagaacagctggaccaagctgactgaaagattcttcaagaatacaccttggcccgaggctgaagccattgctccacaggttggcaatgatgctgtcttcctgattttatacaaagaattatactacaggcacatatatgccaaagtcagtgggggaccttccttggagcagaggtttgaatcctattacaactactgcaatctcttcaactacattcttaatgccgatggtcctgctccccttgaactacccaaccagtggctctgggatattatcgatgagttcatctaccagtttcagtcattcagtcagtaccgctgtaagactgccaagaagtcagaggaggagattgactttcttcgttccaatcccaaaatctggaatgttcatagtgtcctcaatgtccttcattccctggtagacaaatccaacatcaaccgacagttggaggtatacacaagcggaggtgaccctgagagtgtggctggggagtatgggcggcactccctctacaaaatgcttggttacttcagcctggtcgggcttctccgcctgcactccctgttaggagattactaccaggccatcaaggtgctggagaacatcgaactgaacaagaagagtatgtattcccgtgtgccagagtgccaggtcaccacatactattatgttgggtttgcatatttgatgatgcgtcgttaccaggatgccatccgggtcttcgccaacatcctcctctacatccagaggaccaagagcatgttccagaggaccacgtacaagtatgagatgattaacaagcagaatgagcagatgcatgcgctgctggccattgccctcacgatgtaccccatgcgtattgatgagagcattcacctccagctgcgggagaaatatggggacaagatgttgcgcatgcagaaaggtgacccacaagtctatgaagaacttttcagttactcctgccccaagttcctgtcgcctgtagtgcccaactatgataatgtgcaccccaactaccacaaagagcccttcctgcagcagctgaaggtgttttctgatgaagtacagcagcaggcccagctttcaaccatccgcagcttcctgaagctctacaccaccatgcctgtggccaagctggctggcttcctggacctcacagnccaagnagntcggancantntgtttaccannagaccgtggccggtcaccggggattnaacccagggcgcaggaggaccccggcaacgggccggggggtcccccagggacccaagggcgacaacgtggggccaaccccgctaaga

SEQ ID NO: 315914 - DNA, 2012 bp, Homo sapiens
cggacgcgtgggtcgacccacgcgtccgacccacgcgtcgggggaccttccttggagcagaggtttgaatcctattacaactactgcaatctcttcaactacattcttaatgccgatggtcctgctccccttgaactacccaaccagtggctctgggatattatcgatgagttcatctaccagtttcagtcattcagtcagtaccgctgtaagactgccaagaagtcagaggaggagattgactttcttcgttccaatcccaaaatctggaatgttcatagtgtcctcaatgtccttcattccctggtagacaaatccaacatcaaccgacagttggaggtatacacaagcggaggtgaccctgagagtgtggctggggagtatgggcggcactccctctacaaaatgcttggttacttcagcctggtcgggcttctccgcctgcactccctgttaggagattactaccaggccatcaaggtgctggagaacatcgaactgaacaagaagagtatgtattcccgtgtgccagagtgccaggtcaccacatactattatgttgggtttgcatatttgatgatgcgtcgttaccaggatgccatccgggtcttcgccaacatcctcctctacatccagaggaccaagagcatgttccagaggaccacgtacaagtatgagatgattaacaagcagaatgagcagatgcatgcgctgctggccattgccctcacgatgtaccccatgcgtattgatgagagcattcacctccagctgcgggagaaatatggggacaagatgttgcgcatgcagaaaggtgacccacaagtctatgaagaacttttcagttactcctgccccaagttcctgtcgcctgtagtgcccaactatgataatgtgcaccccaactaccacaaagagcccttcctgcagcagctgaaggtgttttctgatgaagtacagcagcaggcccagctttcaaccatccgcagcttcctgaagctctacaccaccatgcctgtggccaagctggctggcttcctggacctcacagagcaggagttccggatccagcttcttgtcttcaaacacaagatgaagaacctcgtgtggaccagcggtatctcagccctggatggtgaatttcagtcagcctcagaggttgacttctacattgataaggacatgatccacatcgcggacaccaaggtcgccaggcgttatggggatttcttcatccgtcagatccacaaatttgaggagcttaatcgaaccctgaagaagatgggacagagaccttgatgatattcacacacattcaggaacctgttttgatgtattataggcaggaagtgtttttgctaccgtgaaacctttacctagatcagccatcagcctgtcaactcagttaacaagttaaggaccgaagtgtttcaagtggatctcagtaaaggatctttggagccagaaaaaaaaaaaacaaaaaaaaaattcgggggattcattgtgggggggggaaaaagcgggtatggaaggggcccaggggccaatagggtgtccctgtgacccaagtttcttgggcacaaagggggaaaactctggcgggctccccatatagggagctcgaaataaatctcgaatagagccggggtacccggaattatagaatcgcgagaaaaagcacggacacaccgcagaagcaccacgagcaacgcacagacgcgagacccaaacacgagcacgcacccacgtcaccacacagacccagcagcacacgcgacaccccacccacaacaccgccccgcacacaagacaaagacagcccgaggccgcaggcgcaggcagaagagggcgaagagggggccgggggtggggagggggggggcgcgagaggcgagagagaggggagggaggggggggaggagaggaggggaggcggcggcgggaacgaaggaggggaacgcgagggagggggaggaagcgagggaaggacgacaggggcggaagggcggaag

SEQ ID NO: 315915 - DNA, 2517 bp, Homo sapiens
tcatttagcgtctttccggcggtgctcgcaagcgaggcagccatgtcttatcccgctgatgattatgagtctgaggcggcttatgacccctacgcttatcccagcgactatgatatgcacacaggagatccaaagcaggaccttgcttatgaacgtcagtatgaacagcaaacctatcaggtgatccctgaggtgatcaaaaacttcatccagtatttccacaaaactgtctcagatttgattgaccagaaagtgtatgagctacaggccagtcgtgtctccagtgatgtcattgaccagaaggtgtatgagatccaggacatctatgagaacagctggaccaagctgactgaaagattcttcaagaatacaccttggcccgaggctgaagccattgctccacaggttggcaatgatgctgctacttgcctgcattattatacaagagtaattatactcagcagaggacctagtattagtgacccaaatgatcagctggagaggacgcgttccattgagaggtcagacgtgtttagagatctctattacaatttactggcaagtctctgttcatatctaactacttcttaagaggccgatggaagctgttccccttaaacctagccacaatcgaggaggactcttcggagtagttactcgattgagatttatctaccagttttcggggtttcagtcattcagtcagtaccgctgtaagactgccaagaagtcagaggaggagattgactttcttcgttccaatcccaaaatctggaatgttcatagtgtcctcaatgtccttcattccctggtagacaaatccaacatcaaccgacagttggaggtatacacaagcggaggtgaccctgagagtgtggctggggagtatgggcggcactccctctacaaaatgcttggttacttcagcctggtcgggcttctccgcctgcactccctgttaggagattactaccaggccatcaaggtgctggagaacatcgaactgaacaagaagagtatgtattcccgtgtgccagagtgccaggtcaccacatactattatgttgggtttgcatatttgatgatgcgtcgttaccaggatgccatccgggtcttcgccaacatcctcctctacatccagaggaccaagagcatgttccagaggaccacgtacaagtatgagatgattaacaagcagaatgagcagatgcatgcgctgctggccattgccctcacgatgtaccccatgcgtattgatgagagcattcacctccagctgcgggagaaatatggggacaagatgttgcgcatgcagaaaggtgacccacaagtctatgaagaacttttcagttactcctgccccaagttcctgtcgcctgtagtgcccaactatgataatgtgcaccccaactaccacaaagagcccttcctgcagcagctgaaggtgttttctgatgaagtacagcagcaggcccagctttcaaccatccgcagcttcctgaagctctacaccaccatgcctgtggccaagctggctggcttcctggacctcacagagcaggagttccggatccagcttcttgtcttcaaacacaagatgaagaacctcgtgtggaccagcggtatctcagccctggatggtgaatttcagtcagcctcagaggttgacttctacattgataaggacatgatccacatcgcggacaccaaggtcgccaggcgttatggggatttcttcatccgtcagatccacaaatttgaggagcttaatcgaaccctgaagaagatgggacagagaccttgatgatattcacacacattcaggaacctgttttgatgtattataggcaggaagtgtttttgctaccgtgaaacctttacctagatcagccatcagcctgtcaactcagttaacaagttaaggaccgaagtgtttcaagtggatctcagtaaaggatctttggagccagaaaaaaaaaaaacaaaaaaaaaattcgggggattcattgtgggggggggaaaaagcgggtatggaaggggcccaggggccaatagggtgtccctgtgacccaagtttcttgggcacaaagggggaaaactctggcgggctccccatatagggagctcgaaataaatctcgaatagagccggggtacccggaattatagaatcgcgagaaaaagcacggacacaccgcagaagcaccacgagcaacgcacagacgcgagacccaaacacgagcacgcacccacgtcaccacacagacccagcagcacacgcgacaccccacccacaacaccgccccgcacacaagacaaagacagcccgaggccgcaggcgcaggcagaagagggcgaagagggggccgggggtggggagggggggggcgcgagaggcgagagagaggggagggaggggggggaggagaggaggggaggcggcggcgggaacgaaggaggggaacgcgagggagggggaggaagcgagggaaggacgacaggggcggaagggcggaag

SEQ ID NO: 315916 - DNA, 1622 bp, Homo sapiens
tcatttagcgtctttccggcggtgctcgcaagcgaggcagccatgtcttatcccgctgatgattatgagtctgaggcggcttatgacccctacgcttatcccagcgactatgatatgcacacaggagatccaaagcaggaccttgcttatgaacgtcagtatgaacagcaaacctatcaggtgatccctgaggtgatcaaaaacttcatccagtatttccacaaaactgtctcagatttgattgaccagaaagtgtatgagctacaggccagtcgtgtctccagtgatgtcattgaccagaaggtgtatgagatccaggacatctatgagaacagctggaccaagctgactgaaagattcttcaagaatacaccttggcccgaggctgaagccattgctccacaggttggcaatgatgctgtcttcctgattttatacaaagaattatactacaggcacatatatgccaaagtcagtgggggaccttccttggagcagaggtttgaatcctattacaactactgcaatctcttcaactacattcttaatgccgatggtcctgctccccttgaactacccaaccagtggctctgggatattatcgatgagttcatctaccagtttcagtcattcagtcagtaccgctgtaagactgccaagaagtcagaggaggagattgactttcttcgttccaatcccaaaatctggaatgttcatagtgtcctcaatgtccttcattccctggtagacaaatccaacatcaaccgacagttggaggtatacacaagcggaggtgaccctgagagtgtggctggggagtatgggcggcactccctctacaaaatgcttggttacttcagcctggtcgggcttctccgcctgcactccctgttaggagattactaccaggccatcaaggtgctggagaacatcgaactgaacaagaagagtatgtattcccgtgtgccagagtgccaggtcaccacatactattatgttgggtttgcatatttgatgatattcacacacattcaggaacctgttttgatgtattataggcaggaagtgtttttgctaccgtgaaacctttacctagatcagccatcagcctgtcaactcagttaacaagttaaggaccgaagtgtttcaagtggatctcagtaaaggatctttggagccagatttgtcgtctcattattgtaggagagaatttgtgggttgtggcagtaatacatttcccatgtgtcctgatgctttcaggatacatcagttgttagtgtttaaattgagttatttttattttgtgcttttgagatggagtctcactctgtctcccaggctggagtgcagtagcgtgatctcagttcgttgcatcctccgctgcccaggttcaagcagttctgcctcagccttccaagtagctgggattacaggcgtgtgccaccacactcagctaatttttgtattctcagtagagatgggttttaccatgttggccaggctggtctcgaactcctggcctcaagtgattcgcctgccttggcctcccaaaatgtgctaggattacaggcatgagccaccacgccccgcctaaattcaaaatctttttgtttttttttaga

SEQ ID NO: 315917 - DNA, 1520 bp, Homo sapiens
tcatttagcgtctttccggcggtgctcgcaagcgaggcagccatgtcttatcccgctgatgattatgagtctgaggcggcttatgacccctacgcttatcccagcgactatgatatgcacacaggagatccaaagcaggaccttgcttatgaacgtcagtatgaacagcaaacctatcaggtgatccctgaggtgatcaaaaacttcatccagtatttccacaaaactgtctcagatttgattgaccagaaagtgtatgagctacaggccagtcgtgtctccagtgatgtcattgaccagaaggtgtatgagatccaggacatctatgagaacagctggaccaagctgactgaaagattcttcaagaatacaccttggcccgaggctgaagccattgctccacaggttggcaatgatgctgtcttcctgattttatacaaagaattatactacaggcacatatatgccaaagtcagtgggggaccttccttggagcagaggtttgaatcctattacaactactgcaatctcttcaactacattcttaatgccgatggtcctgctccccttgaactacccaaccagtggctctgggatattatcgatgagttcatctaccagtttcagtcattcagtcagtaccgctgtaagactgccaagaagtcagaggaggagattgactttcttcgttccaatcccaaaatctggaatgttcatagtgtcctcaatgtccttcattccctggtagacaaatccaacatcaaccgacagttggaggtatacacaagcggaggtgaccctgagagtgtggctggggagtatgggcggcactccctctacaaaatgcttggttacttcagcctggtcgggcttctccgcctgcactccctgttaggagattactaccaggccatcaaggtgctggagaacatcgaactgaacaagaagagtatgtattcccgcaccttgatggcctggtagtacggacgcgtgggccacaatttgcgcgctctctttctgctgctccccagctctcggatacagccgacaccatgggtttcggagacctgaaaagccctgccggcctccaggtgctcaacgattacctggcggacaagagctacatcgaggggtatgtgccatcacaagcagatgtggcagtatttgaagccgtgtccagcccaccgctgccgacttgttgtccatgccctacgttgggtattaatcacattcaaggtctttaccgaacaacgggaaaaaagggcccagtctagggcagcggaggtgaacgaaaaggtttttgcgggcaaaatattggttcctggccgatgtgggaagaaacctacagggaaggtggagctaccgatagtacagaaggtggctgacttgacccctttggatttgatgctcaccggggaactgaaacagcaacggtatcgagaacgtttgccaatttgattcgaagccaacacctgctggttgcagctcccttcataatgtgactggtgtggacactggcg

SEQ ID NO: 315918 - DNA, 1561 bp, Homo sapiens
atgcgtatggcgtacggtaatacgtgctggtgcaggagaacatcgaactgaacaagaagagtatgtattcccgtgtgccagagtgccaggtcaccacatactattatgttgggtttgcatatttgatgatgcgtcgttaccaggatgccatccgggtcttcgccaacatcctcctctacatccagaggaccaagagcatgttccagaggaccacgtacaagtatgagatgattaacaagcagaatgagcagatgcatgcgctgctggccattgccctcacgatgtaccccatgcgtattgatgagagcattcacctccagctgcgggagaaatatggggacaagatgttgcgcatgcagaaaggtgacccacaagtctatgaagaacttttcagttactcctgccccaagttcctgtcgcctgtagtgcccaactatgataatgtgcaccccaactaccacaaagagcccttcctgcagcagctgaaggtgttttctgatgaagtacagcagcaggcccagctttcaaccatccgcagcttcctgaagctctacaccaccatgcctgtggccaagctggctggcttcctggacctcacagagcaggagttccggatccagcttcttgtcttcaaacacaagatgaagaacctcgtgtggaccagcggtatctcagccctggatggtgaatttcagtcagcctcagaggttgacttctacattgataaggacatgatccacatcgcggacaccaaggtcgccaggcgttatggggatttcttcatccgtcagatccacaaatttgaggagcttaatcgaaccctgaagaagatgggacagagaccttgatgatattcacacacattcaggaacctgttttgatgtattataggcaggaagtgtttttgctaccgtgaaacctttacctagatcagccatcagcctgtcaactcagttaacaagttaaggaccgaagtgtttcaagtggatctcagtaaaggatctttggagccagaaaaaaaaaaaacaaaaaaaaaattcgggggattcattgtgggggggggaaaaagcgggtatggaaggggcccaggggccaatagggtgtccctgtgacccaagtttcttgggcacaaagggggaaaactctggcgggctccccatatagggagctcgaaataaatctcgaatagagccggggtacccggaattatagaatcgcgagaaaaagcacggacacaccgcagaagcaccacgagcaacgcacagacgcgagacccaaacacgagcacgcacccacgtcaccacacagacccagcagcacacgcgacaccccacccacaacaccgccccgcacacaagacaaagacagcccgaggccgcaggcgcaggcagaagagggcgaagagggggccgggggtggggagggggggggcgcgagaggcgagagagaggggagggaggggggggaggagaggaggggaggcggcggcgggaacgaaggaggggaacgcgagggagggggaggaagcgagggaaggacgacaggggcggaagggcggaag

SEQ ID NO: 315919 - DNA, 1396 bp, Homo sapiens
tcatttagcgtctttccggcggtgctcgcaagcgaggcagccatgtcttatcccgctgatgattatgagtctgaggcggcttatgacccctacgcttatcccagcgactatgatatgcacacaggagatccaaagcaggaccttgcttatgaacgtcagtatgaacagcaaacctatcaggtgatccctgaggtgatcaaaaacttcatccagtatttccacaaaactgtctcagatttgattgaccagaaagtgtatgagctacaggccagtcgtgtctccagtgatgtcattgaccagaaggtgtatgagatccaggacatctatgagaacagctggaccaagctgactgaaagattcttcaagaatacaccttggcccgaggctgaagccattgctccacaggttggcaatgatgctgtcttcctgattttatacaaagaattatactacaggcacatatatgccaaagtcagtgggggaccttccttggagcagaggtttgaatcctattacaactactgcaatctcttcaactacattcttaatgccgatggtcctgctccccttgaactacccaaccagtggctctgggatattatcgatgagttcatctaccagtttcagtcattcagtcagtaccgctgtaagactgccaagaagtcagaggaggagattgactttcttcgttccaatcccaaaatctggaatgttcatagtgtcctcaatgtccttcattccctggtagacaaatccaacatcaaccgacagttggaggtatacacaagcggaggtgaccctgagagtgtggctggggagtatgggcggcactcccgagattactaccaggccatcaaggtgctggagaacatcgaactgaacaagaagagtatgtattcccgtgtgccagagtgccaggtcaccacatactattatgttgggtttgcatatttgatgatgcgtcgttaccaggatgccatccgggtcttcgccaacatcctcctctacatccagaggaccaagagcatgttccagaggaccacgtacaagtatgagatgattaacaagcagaatgagcagatgcatgcgctgctggccattgccctcacgatgtaccccatgcgtattgatgagagcattcacctccagctgcgggagaaatatggggacaagatgttgcgcatgcagaaaggtgacccacaagtctatgaagaacttttcagttactcctgccccaagttcctgtcgcctgtagtgcccaactatgataatgtgcaccccaactaccacaaagagcccttcctgcagcagctgaaggtgttttctgatgaagtacagagagggccgtttaacatcggggatcagaggttaacacaaacgtggacatggggtctga

SEQ ID NO: 315920 - DNA, 1410 bp, Homo sapiens
cggacgcgtgggtcgacccacgcgtccgacccacgcgtccaagagcatgttccagaggaccacgtacaagtatgagatgattaacaagcagaatgagcagatgcatgcgctgctggccattgccctcacgatgtaccccatgcgtattgatgagagcattcacctccagctgcgggagaaatatggggacaagatgttgcgcatgcagaaaggtgacccacaagtctatgaagaacttttcagttactcctgccccaagttcctgtcgcctgtagtgcccaactatgataatgtgcaccccaactaccacaaagagcccttcctgcagcagctgaaggtgttttctgatgaagtacagcagcaggcccagctttcaaccatccgcagcttcctgaagctctacaccaccatgcctgtggccaagctggctggcttcctggacctcacagagcaggagttccggatccagcttcttgtcttcaaacacaagatgaagaacctcgtgtggaccagcggtatctcagccctggatggtgaatttcagtcagcctcagaggttgacttctacattgataaggacatgatccacatcgcggacaccaaggtcgccaggcgttatggggatttcttcatccgtcagatccacaaatttgaggagcttaatcgaaccctgaagaagatgggacagagaccttgatgatattcacacacattcaggaacctgttttgatgtattataggcaggaagtgtttttgctaccgtgaaacctttacctagatcagccatcagcctgtcaactcagttaacaagttaaggaccgaagtgtttcaagtggatctcagtaaaggatctttggagccagaaaaaaaaaaaacaaaaaaaaaattcgggggattcattgtgggggggggaaaaagcgggtatggaaggggcccaggggccaatagggtgtccctgtgacccaagtttcttgggcacaaagggggaaaactctggcgggctccccatatagggagctcgaaataaatctcgaatagagccggggtacccggaattatagaatcgcgagaaaaagcacggacacaccgcagaagcaccacgagcaacgcacagacgcgagacccaaacacgagcacgcacccacgtcaccacacagacccagcagcacacgcgacaccccacccacaacaccgccccgcacacaagacaaagacagcccgaggccgcaggcgcaggcagaagagggcgaagagggggccgggggtggggagggggggggcgcgagaggcgagagagaggggagggaggggggggaggagaggaggggaggcggcggcgggaacgaaggaggggaacgcgagggagggggaggaagcgagggaaggacgacaggggcggaagggcggaag

SEQ ID NO: 315921 - DNA, 1262 bp, Homo sapiens
acctagaggatccctccacgttgaatattagatgattatcaagctagaatgagcaggcagaaaggtgacccacaagtctatgaagaacttttcagttactcctgccccaagttcctgtcgcctgtagtgcccaactatgataatgtgcaccccaactaccacaaagagcccttcctgcagcagctgaaggtgttttctgatgaagtacagcagcaggcccagctttcaaccatccgcagcttcctgaagctctacaccaccatgcctgtggccaagctggctggcttcctggacctcacagagcaggagttccggatccagcttcttgtcttcaaacacaagatgaagaacctcgtgtggaccagcggtatctcagccctggatggtgaatttcagtcagcctcagaggttgacttctacattgataaggacatgatccacatcgcggacaccaaggtcgccaggcgttatggggatttcttcatccgtcagatccacaaatttgaggagcttaatcgaaccctgaagaagatgggacagagaccttgatgatattcacacacattcaggaacctgttttgatgtattataggcaggaagtgtttttgctaccgtgaaacctttacctagatcagccatcagcctgtcaactcagttaacaagttaaggaccgaagtgtttcaagtggatctcagtaaaggatctttggagccagaaaaaaaaaaaacaaaaaaaaaattcgggggattcattgtgggggggggaaaaagcgggtatggaaggggcccaggggccaatagggtgtccctgtgacccaagtttcttgggcacaaagggggaaaactctggcgggctccccatatagggagctcgaaataaatctcgaatagagccggggtacccggaattatagaatcgcgagaaaaagcacggacacaccgcagaagcaccacgagcaacgcacagacgcgagacccaaacacgagcacgcacccacgtcaccacacagacccagcagcacacgcgacaccccacccacaacaccgccccgcacacaagacaaagacagcccgaggccgcaggcgcaggcagaagagggcgaagagggggccgggggtggggagggggggggcgcgagaggcgagagagaggggagggaggggggggaggagaggaggggaggcggcggcgggaacgaaggaggggaacgcgagggagggggaggaagcgagggaaggacgacaggggcggaagggcggaag

SEQ ID NO: 315922 - DNA, 2095 bp, Homo sapiens
agcgcgctgctgggctgcggcggcggcggcggcggtggttactatggcggagtcggccggagcctcctccttcttcccccttgttgtcctcctgctcgccggcagcggcgggtccgggccccggggggtccaggctctgctgtgtgcgtgcaccagctgcctccaggccaactacacgtgtgagacagatggggcctgcatggtttccattttcaatctggatgggatggagcaccatgtgcgcacctgcatccccaaagtggagctggtccctgccgggaagcccttctactgcctgagctcggaggacctgcgcaacacccactgctgctacactgactactgcaacaggatcgacttgagggtgcccagtggtcacctcaaggagcctgagcacccgtccatgtggggcccggtggagctggtaggcatcatcgccggcccggtgttcctcctgttcctcatcatcatcattgttttccttgtcattaactatcatcagcgtgtctatcacaaccgccagagactggacatggaagatccctcatgtgagatgtgtctctccaaagacaagacgctccaggatcttgtctacgatctctccacctcagggtctggctcagggttacccctctttgtccagcgcacagtggcccgaaccatcgttttacaagagattattggcaagggtcggtttggggaagtatggcggggccgctggaggggtggtgatgtggctgtgaaaatattctcttctcgtgaagaacggtcttggttcagggaagcagagatataccagacggtcatgctgcgccatgaaaacatccttggatttattgctgctgacaataaagataatggcacctggacacagctgtggcttgtttctgactatcatgagcacgggtccctgtttgattatctgaaccggtacacagtgacaattgaggggatgattaagctggccttgtctgctgctagtgggctggcacacctgcacatggagatcgtgggcacccaagggaagcctggaattgctcatcgagacttaaagtcaaagaacattctggtgaagaaaaatggcatgtgtgccatagcagacctgggcctggctgtccgtcatgatgcagtcactgacaccattgacattgccccgaatcagagggtggggaccaaacgatacatggcccctgaagtacttgatgaaaccattaatatgaaacactttgactcctttaaatgtgctgatatttatgccctcgggcttgtatattgggagattgctcgaagatgcaattctggaggtacctttcttttttgcctttgctcctacctcccattccaggatgctggatcacccaaagctgttttactgccccctttctttttacaacctgttggatgcctgttgccagagcctgaatcatcgtttaaggttgccatcaaaggtgtggaggtagctgtgcttagggtgcgtttattcttcagggatcagtttgttgaatagcgttgtgtgttatggtaaccattctgaaggctcgtttggctttataaacaaacaaacattgttttattagtccgtggcggggagtgccccggtgcgcatagcacgggattcatgcagtggtctccttcacatcagaagcagtatattctaacgcggtggctcccaagccacattcatgggaaaccctgctgtttcattgttaaaataatagtgctaatttctaaatttataaaagtgcatagatttttcttaaaagtgagttttttctcccatagttaaaaatcgttggcatttgcagctgcttattcatgacagaatccagtaagaaatagtatcagatttagcagaaacactttttattgtcaacttagtatatcagtattttatgataatttccatatattctgccacatgatcaagttccaggacctctagagccctactctcagccatttatctgtgatataagagattccagggcagtgaaagtgattgaaaaaaagaactggtggtgctcacttcgccagcacatatactaaaattggaacaatacagagaaggttagcatggcccctgcacaaggatgac

SEQ ID NO: 315923 - DNA, 4397 bp, Homo sapiens
  misc_feature (2558)..(2558): n is a, c, g, or t
agcgcgctgctgggctgcggcggcggcggcggcggtggttactatggcggagtcggccggagcctcctccttcttcccccttgttgtcctcctgctcgccggcagcggcgggtccgggccccggggggtccaggctctgctgtgtgcgtgcaccagctgcctccaggccaactacacgtgtgagacagatggggcctgcatggtttccattttcaatctggatgggatggagcaccatgtgcgcacctgcatccccaaagtggagctggtccctgccgggaagcccttctactgcctgagctcggaggacctgcgcaacacccactgctgctacactgactactgcaacaggatcgacttgagggtgcccagtggtcacctcaaggagcctgagcacccgtccatgtggggcccggtggagctggtaggcatcatcgccggcccggtgttcctcctgttcctcatcatcatcattgttttccttgtcattaactatcatcagcgtgtctatcacaaccgccagagactggacatggaagatccctcatgtgagatgtgtctctccaaagacaagacgctccaggatcttgtctacgatctctccacctcagggtctggctcagggttacccctctttgtccagcgcacagtggcccgaaccatcgttttacaagagattattggcaagggtcggtttggggaagtatggcggggccgctggaggggtggtgatgtggctgtgaaaatattctcttctcgtgaagaacggtcttggttcagggaagcagagatataccagacggtcatgctgcgccatgaaaacatccttggatttattgctgctgacaataaagataatggcacctggacacagctgtggcttgtttctgactatcatgagcacgggtccctgtttgattatctgaaccggtacacagtgacaattgaggggatgattaagctggccttgtctgctgctagtgggctggcacacctgcacatggagatcgtgggcacccaagggaagcctggaattgctcatcgagacttaaagtcaaagaacattctggtgaagaaaaatggcatgtgtgccatagcagacctgggcctggctgtccgtcatgatgcagtcactgacaccattgacattgccccgaatcagagggtggggaccaaacgatacatggcccctgaagtacttgatgaaaccattaatatgaaacactttgactcctttaaatgtgctgatatttatgccctcgggcttgtatattgggagattgctcgaagatgcaattctggaggagtccatgaagaatatcagctgccatattacgacttagtgccctctgacccttccattgaggaaatgcgaaaggttgtatgtgatcagaagctgcgtcccaacatccccaactggtggcagagttatgaggcactgcgggtgatggggaagatgatgcgagagtgttggtatgccaacggcgcagcccgcctgacggccctgcgcatcaagaagaccctctcccagctcagcgtgcaggaagacgtgaagatctaactgctccctctctccacacggagctcctggcagcgagaactacgcacagctgccgcgttgagcgtacgatggaggcctacctctcgtttctgcccagccctctgtggccaggagccctggcccgcaagagggacagagcccgggagagactcgctcactcccatgttgggtttgagacagacaccttttctatttacctcctaatggcatggagactctgagagcgaattgtgtggagaactcagtgccacacctcgaactggttgtagtgggaagtcccgcgaaacccggtgcatctggcacgtggccaggagccatgacaggggcgcttgggaggggccggaggaaccgaggtgttgccagtgctaagctgccctgagggtttccttcggggaccagcccacagcacaccaaggtggcccggaagaaccagaagtgcagcccctctcacaggcagctctgagccgcgctttcccctcctccctgggatggacgctgccgggagactgccagtggagacggaatctgccgctttgtctgtccagccgtgtgtgcatgtgccgaggtgcgtcccccgttgtgcctggttcgtgccatgcccttacacgtgcgtgtgagtgtgtgtgtgtgtctgtaggtgcgcacttacctgcttgagctttctgtgcatgtgcaggtcgggggtgtggtcgtcatgctgtccgtgcttgctggtgcctcttttcagtagtgagcagcatctagtttccctggtgcccttccctggaggtctctccctcccccagagcccctcatgccacagtggtactctgtgtctggcaggctactctgcccaccccagcatcagcacagctctcctcctccatctcagactgtggaaccaaagctggcccagttgtccatgacaaaagaggcttttgggccaaaatgtgagggtggtgggtgggatgggcagggaaggaatcctggtggaagtcttgggtgttagtgtcagccntgggaaatgagccagcccaagggcatcatcctcagcagcatcgaggaagggccgaggaatgtgaagccagatctcgggactcagattggaatgttacatctgtctttcatctcccagatcctggaaacagcagtgtatatttttggtggtggtgggtttggggtggggaagggaagggcgggcaaggagtggggagggagtctggggtgggagggaggcatctgcatgggtcttcttttactggactgtctgatcagggtggagggaaggtgagaggtttgcatccacttcaggagccctactgaagggaacagcctgagccgaacatgttatttaacctgagtatagtatttaacgaagcctagaagcacggctgtgggtggtgatttggtcagcatatcttaggtatataataactttgaagccataacttttaactggagtggtttgatttctttttttaattttattgggagggtttggattttaactttttttaatgttgttaaatattaagtttttgtaaaaggaaaaccatctctgtgattacctctcaatctatttgtttttaaagaaatccctaaaaaaaaaaaattatccaattgaacgcacatagctcaatcacactggaaatgtttgtccttgcacctgagcctgttcccactcagcagtgagagttcctctttgccctgaggctcagtctctctcgtattttgtccccacccccaattccttgagtggtttttgctctagggccctttcttgcactgtccagctggttgtaccctctccaggcatttattcaacaaatgtgggtgaagtgcctgctgggtgccaggtgctgggaatacatctgtggacaagacatgcttgggtcctactcctggagcactgtaaaaagagctgattcaagtaagtagatgcctgttttgagaccagaaggtttcataattggttctacgacccttttgagcctagaattattgttcttatataagatcactgaagaaagaggaacccccacaaccccctccacaaagagaccaggggcgggtgatgagacctggggtttagaaccccaggtgagacctcaaatcactgcattcattctgagcccccttcctgtccccaggggaggtgtattgtgtatgtagccttagagcatctctgcctccaacccagcagttctctgccaaagcttgtggaggagggagagccctgtccctgccctcaggctccccagtgctcctggcccttctatttatttgactgattattgcttctttccttgcattaaaggagatcttcccctaacctttgggccaatttactggccactaatttcgtttaaataccattgtgtcattggggggaccgtctttacccctgctgacctcccacctatccgccctgcagcagaaccttggcggtttataggtaatgatggaaaggtctttgggaagctcccacacccacctctgccactcttaacactaagtgagagttggggagaaactgaagccgtgtttttggccccccgaggctaaccctgatccatagtgctacctgcacctctggattctggattcacagaccaagtccaagcccgttcttacgtcgccataaaggcccccgaacggcattctcggtacttctgtttgtttttgtacattttattagaaaggactgtaaaatagccacttagacactttacctcttcagtatgcaaatgtaaataaattgtaatataggaaatcttttgttttaatataagaatgagcctgtccaatttctgctgtacattattaaaagttttattcacagaaactgctctggtgc

SEQ ID NO: 315924 - DNA, 4419 bp, Homo sapiens
  misc_feature (2433)..(2433): n is a, c, g, or t
agcgcgctgctgggctgcggcggcggcggcggcggtggttactatggcggagtcggccggagcctcctccttcttcccccttgttgtcctcctgctcgccggcagcggcgggtccgggccccggggggtccaggctctgctgtgtgcgtgcaccagctgcctccaggccaactacacgtgtgagacagatggggcctgcatggtttccattttcaatctggatgggatggagcaccatgtgcgcacctgcatccccaaagtggagctggtccctgccgggaagcccttctactgcctgagctcggaggacctgcgcaacacccactgctgctacactgactactgcaacaggatcgacttgagggtgcccagtggtcacctcaaggagcctgagcacccgtccatgtggggcccggtggagctggtaggcatcatcgccggcccggtgttcctcctgttcctcatcatcatcattgttttccttgtcattaactatcatcagcgtgtctatcacaaccgccagagactggacatggaagatccctcatgtgagatgtgtctctccaaagacaagacgctccaggatcttgtctacgatctctccacctcagggtctggctcagggttacccctctttgtccagcgcacagtggcccgaaccatcgttttacaagagattattggcaagggtcggtttggggaagtatggcggggccgctggaggggtggtgatgtggctgtgaaaatattctcttctcgtgaagaacggtcttggttcagggaagcagagatataccagacggtcatgctgcgccatgaaaacatccttggatttattgctgctgacaataaagataatggcacctggacacagctgtggcttgtttctgactatcatgagcacgggtccctgtttgattatctgaaccggtacacagtgacaattgaggggatgattaagctggccttgtctgctgctagtgggctggcacacctgcacatggagatcgtgggcacccaagggaagcctggaattgctcatcgagacttaaagtcaaagaacattctggtgaagaaaaatggcatgtgtgccatagcagacctgggcctggctgtccgtcatgatgcagtcactgacaccattgacattgccccgaatcagagggtggggaccaaacggagtccatgaagaatatcagctgccatattacgacttagtgccctctgacccttccattgaggaaatgcgaaaggttgtatgtgatcagaagctgcgtcccaacatccccaactggtggcagagttatgaggcactgcgggtgatggggaagatgatgcgagagtgttggtatgccaacggcgcagcccgcctgacggccctgcgcatcaagaagaccctctcccagctcagcgtgcaggaagacgtgaagatctaactgctccctctctccacacggagctcctggcagcgagaactacgcacagctgccgcgttgagcgtacgatggaggcctacctctcgtttctgcccagccctctgtggccaggagccctggcccgcaagagggacagagcccgggagagactcgctcactcccatgttgggtttgagacagacaccttttctatttacctcctaatggcatggagactctgagagcgaattgtgtggagaactcagtgccacacctcgaactggttgtagtgggaagtcccgcgaaacccggtgcatctggcacgtggccaggagccatgacaggggcgcttgggaggggccggaggaaccgaggtgttgccagtgctaagctgccctgagggtttccttcggggaccagcccacagcacaccaaggtggcccggaagaaccagaagtgcagcccctctcacaggcagctctgagccgcgctttcccctcctccctgggatggacgctgccgggagactgccagtggagacggaatctgccgctttgtctgtccagccgtgtgtgcatgtgccgaggtgcgtcccccgttgtgcctggttcgtgccatgcccttacacgtgcgtgtgagtgtgtgtgtgtgtctgtaggtgcgcacttacctgcttgagctttctgtgcatgtgcaggtcgggggtgtggtcgtcatgctgtccgtgcttgctggtgcctcttttcagtagtgagcagcatctagtttccctggtgcccttccctggaggtctctccctcccccagagcccctcatgccacagtggtactctgtgtctggcaggctactctgcccaccccagcatcagcacagctctcctcctccatctcagactgtggaaccaaagctggcccagttgtccatgacaaaagaggcttttgggccaaaatgtgagggtggtgggtgggatgggcagggaaggaatcctggtggaagtcttgggtgttagtgtcagccntgggaaatgagccagcccaagggcatcatcctcagcagcatcgaggaagggccgaggaatgtgaagccagatctcgggactcagattggaatgttacatctgtctttcatctcccagatcctggaaacagcagtgtatatttttggtggtggtgggtttggggtggggaagggaagggcgggcaaggagtggggagggagtctggggtgggagggaggcatctgcatgggtcttcttttactggactgtctgatcagggtggagggaaggtgagaggtttgcatccacttcaggagccctactgaagggaacagcctgagccgaacatgttatttaacctgagtatagtatttaacgaagcctagaagcacggctgtgggtggtgatttggtcagcatatcttaggtatataataactttgaagccataacttttaactggagtggtttgatttctttttttaattttattgggagggtttggattttaactttttttaatgttgttaaatattaagtttttgtaaaaggaaaaccatctctgtgattacctctcaatctatttgtttttaaagaaatccctaaaaaaaaaaaattatccaattgaacgcacatagctcaatcacactggaaatgtttgtccttgcacctgagcctgttcccactcagcagtgagagttcctctttgccctgaggctcagtctctctcgtattttgtccccacccccaattccttgagtggtttttgctctagggccctttcttgcactgtccagctggttgtaccctctccaggcatttattcaacaaatgtgggtgaagtgcctgctgggtgccaggtgctgggaatacatctgtggacaagacatgcttgggtcctactcctggagcactgtaaaaagagctgattcaagtaagtagatgcctgttttgagaccagaaggtttcataattggttctacgacccttttgagcctagaattattgttcttatataagatcactgaagaaagaggaacccccacaaccccctccacaaagagaccaggggcgggtgatgagacctggggtttagaaccccaggtgagacctcaaatcactgcattcattctgagcccccttcctgtccccaggggaggtgtattgtgtatgtagccttagagcatctctgcctccaacccagcagttctctgccaaagcttgtggaggagggagagccctgtccctgccctcaggctccccagtgctcctggcccttctatttatttgactgattattgcttctttccttgcattaaaggagatcttcccctaacctttgggccaatttactggccactaatttcgtttaaataccattgtgtcattggggggaccgtctttacccctgctgacctcccacctatccgccctgcagcagaaccttggcggtttataggtaatgatggaacttagactcctcttcccagagtcacaagtagcctctgggatctgccaacacacgtccactcccaagccactagcccactccccagttggcccttctgcccttaccccacacacagtccaactcttccacctctggggaagatggagcaggtctttgggaagctcccacacccacctctgccactcttaacactaagtgagagttggggagaaactgaagccgtgtttttggccccccgaggctaaccctgatccatagtgctacctgcacctctggattctggattcacagaccaagtccaagcccgttcttacgtcgccataaaggcccccgaacggcattctcggtacttctgtttgtttttgtacattttattagaaaggactgtaaaatagccacttagacactttacctcttcagtatgcaaatgtaaataaattgtaatataggaaatcttttgttttaatataagaatgagcctgtccaatttctgctgtacattattaaaagttttattcacagaaactgctctggtgc

SEQ ID NO: 315925 - DNA, 3715 bp, Homo sapiens
  misc_feature (1729)..(1729): n is a, c, g, or t
gggactcatctgtggttctctgcagataatggcacctggacacagctgtggcttgtttctgactatcatgagcacgggtccctgtttgattatctgaaccggtacacagtgacaattgaggggatgattaagctggccttgtctgctgctagtgggctggcacacctgcacatggagatcgtgggcacccaagggaagcctggaattgctcatcgagacttaaagtcaaagaacattctggtgaagaaaaatggcatgtgtgccatagcagacctgggcctggctgtccgtcatgatgcagtcactgacaccattgacattgccccgaatcagagggtggggaccaaacgatacatggcccctgaagtacttgatgaaaccattaatatgaaacactttgactcctttaaatgtgctgatatttatgccctcgggcttgtatattgggagattgctcgaagatgcaattctggaggagtccatgaagaatatcagctgccatattacgacttagtgccctctgacccttccattgaggaaatgcgaaaggttgtatgtgatcagaagctgcgtcccaacatccccaactggtggcagagttatgaggcactgcgggtgatggggaagatgatgcgagagtgttggtatgccaacggcgcagcccgcctgacggccctgcgcatcaagaagaccctctcccagctcagcgtgcaggaagacgtgaagatctaactgctccctctctccacacggagctcctggcagcgagaactacgcacagctgccgcgttgagcgtacgatggaggcctacctctcgtttctgcccagccctctgtggccaggagccctggcccgcaagagggacagagcccgggagagactcgctcactcccatgttgggtttgagacagacaccttttctatttacctcctaatggcatggagactctgagagcgaattgtgtggagaactcagtgccacacctcgaactggttgtagtgggaagtcccgcgaaacccggtgcatctggcacgtggccaggagccatgacaggggcgcttgggaggggccggaggaaccgaggtgttgccagtgctaagctgccctgagggtttccttcggggaccagcccacagcacaccaaggtggcccggaagaaccagaagtgcagcccctctcacaggcagctctgagccgcgctttcccctcctccctgggatggacgctgccgggagactgccagtggagacggaatctgccgctttgtctgtccagccgtgtgtgcatgtgccgaggtgcgtcccccgttgtgcctggttcgtgccatgcccttacacgtgcgtgtgagtgtgtgtgtgtgtctgtaggtgcgcacttacctgcttgagctttctgtgcatgtgcaggtcgggggtgtggtcgtcatgctgtccgtgcttgctggtgcctcttttcagtagtgagcagcatctagtttccctggtgcccttccctggaggtctctccctcccccagagcccctcatgccacagtggtactctgtgtctggcaggctactctgcccaccccagcatcagcacagctctcctcctccatctcagactgtggaaccaaagctggcccagttgtccatgacaaaagaggcttttgggccaaaatgtgagggtggtgggtgggatgggcagggaaggaatcctggtggaagtcttgggtgttagtgtcagccntgggaaatgagccagcccaagggcatcatcctcagcagcatcgaggaagggccgaggaatgtgaagccagatctcgggactcagattggaatgttacatctgtctttcatctcccagatcctggaaacagcagtgtatatttttggtggtggtgggtttggggtggggaagggaagggcgggcaaggagtggggagggagtctggggtgggagggaggcatctgcatgggtcttcttttactggactgtctgatcagggtggagggaaggtgagaggtttgcatccacttcaggagccctactgaagggaacagcctgagccgaacatgttatttaacctgagtatagtatttaacgaagcctagaagcacggctgtgggtggtgatttggtcagcatatcttaggtatataataactttgaagccataacttttaactggagtggtttgatttctttttttaattttattgggagggtttggattttaactttttttaatgttgttaaatattaagtttttgtaaaaggaaaaccatctctgtgattacctctcaatctatttgtttttaaagaaatccctaaaaaaaaaaaattatccaattgaacgcacatagctcaatcacactggaaatgtttgtccttgcacctgagcctgttcccactcagcagtgagagttcctctttgccctgaggctcagtctctctcgtattttgtccccacccccaattccttgagtggtttttgctctagggccctttcttgcactgtccagctggttgtaccctctccaggcatttattcaacaaatgtgggtgaagtgcctgctgggtgccaggtgctgggaatacatctgtggacaagacatgcttgggtcctactcctggagcactgtaaaaagagctgattcaagtaagtagatgcctgttttgagaccagaaggtttcataattggttctacgacccttttgagcctagaattattgttcttatataagatcactgaagaaagaggaacccccacaaccccctccacaaagagaccaggggcgggtgatgagacctggggtttagaaccccaggtgagacctcaaatcactgcattcattctgagcccccttcctgtccccaggggaggtgtattgtgtatgtagccttagagcatctctgcctccaacccagcagttctctgccaaagcttgtggaggagggagagccctgtccctgccctcaggctccccagtgctcctggcccttctatttatttgactgattattgcttctttccttgcattaaaggagatcttcccctaacctttgggccaatttactggccactaatttcgtttaaataccattgtgtcattggggggaccgtctttacccctgctgacctcccacctatccgccctgcagcagaaccttggcggtttataggtaatgatggaacttagactcctcttcccagagtcacaagtagcctctgggatctgccaacacacgtccactcccaagccactagcccactccccagttggcccttctgcccttaccccacacacagtccaactcttccacctctggggaagatggagcaggtctttgggaagctcccacacccacctctgccactcttaacactaagtgagagttggggagaaactgaagccgtgtttttggccccccgaggctaaccctgatccatagtgctacctgcacctctggattctggattcacagaccaagtccaagcccgttcttacgtcgccataaaggcccccgaacggcattctcggtacttctgtttgtttttgtacattttattagaaaggactgtaaaatagccacttagacactttacctcttcagtatgcaaatgtaaataaattgtaatataggaaatcttttgttttaatataagaatgagcctgtccaatttctgctgtacattattaaaagttttattcacagaaactgctctggtgc

SEQ ID NO: 315926 - DNA, 3641 bp, Homo sapiens
  misc_feature (1655)..(1655): n is a, c, g, or t
gagccaccgcacctggccaaataaacaaatcttgatggttaaaaatagagatacacatcagagtagcctggtattgccaaatctgtgctgaagtatttagaatcaaatttaaaacatgggagtttgcaatgaagagatgtgtacacttcttctgccccaagggactttatcagggtgatactcttccacattcagagggctcctgaatcaatactttgatttaaagagagcagtcatcattttctgtgcgtgaccatgtttgttttgctattgcagatacatggcccctgaagtacttgatgaaaccattaatatgaaacactttgactcctttaaatgtgctgatatttatgccctcgggcttgtatattgggagattgctcgaagatgcaattctggaggagtccatgaagaatatcagctgccatattacgacttagtgccctctgacccttccattgaggaaatgcgaaaggttgtatgtgatcagaagctgcgtcccaacatccccaactggtggcagagttatgaggcactgcgggtgatggggaagatgatgcgagagtgttggtatgccaacggcgcagcccgcctgacggccctgcgcatcaagaagaccctctcccagctcagcgtgcaggaagacgtgaagatctaactgctccctctctccacacggagctcctggcagcgagaactacgcacagctgccgcgttgagcgtacgatggaggcctacctctcgtttctgcccagccctctgtggccaggagccctggcccgcaagagggacagagcccgggagagactcgctcactcccatgttgggtttgagacagacaccttttctatttacctcctaatggcatggagactctgagagcgaattgtgtggagaactcagtgccacacctcgaactggttgtagtgggaagtcccgcgaaacccggtgcatctggcacgtggccaggagccatgacaggggcgcttgggaggggccggaggaaccgaggtgttgccagtgctaagctgccctgagggtttccttcggggaccagcccacagcacaccaaggtggcccggaagaaccagaagtgcagcccctctcacaggcagctctgagccgcgctttcccctcctccctgggatggacgctgccgggagactgccagtggagacggaatctgccgctttgtctgtccagccgtgtgtgcatgtgccgaggtgcgtcccccgttgtgcctggttcgtgccatgcccttacacgtgcgtgtgagtgtgtgtgtgtgtctgtaggtgcgcacttacctgcttgagctttctgtgcatgtgcaggtcgggggtgtggtcgtcatgctgtccgtgcttgctggtgcctcttttcagtagtgagcagcatctagtttccctggtgcccttccctggaggtctctccctcccccagagcccctcatgccacagtggtactctgtgtctggcaggctactctgcccaccccagcatcagcacagctctcctcctccatctcagactgtggaaccaaagctggcccagttgtccatgacaaaagaggcttttgggccaaaatgtgagggtggtgggtgggatgggcagggaaggaatcctggtggaagtcttgggtgttagtgtcagccntgggaaatgagccagcccaagggcatcatcctcagcagcatcgaggaagggccgaggaatgtgaagccagatctcgggactcagattggaatgttacatctgtctttcatctcccagatcctggaaacagcagtgtatatttttggtggtggtgggtttggggtggggaagggaagggcgggcaaggagtggggagggagtctggggtgggagggaggcatctgcatgggtcttcttttactggactgtctgatcagggtggagggaaggtgagaggtttgcatccacttcaggagccctactgaagggaacagcctgagccgaacatgttatttaacctgagtatagtatttaacgaagcctagaagcacggctgtgggtggtgatttggtcagcatatcttaggtatataataactttgaagccataacttttaactggagtggtttgatttctttttttaattttattgggagggtttggattttaactttttttaatgttgttaaatattaagtttttgtaaaaggaaaaccatctctgtgattacctctcaatctatttgtttttaaagaaatccctaaaaaaaaaaaattatccaattgaacgcacatagctcaatcacactggaaatgtttgtccttgcacctgagcctgttcccactcagcagtgagagttcctctttgccctgaggctcagtctctctcgtattttgtccccacccccaattccttgagtggtttttgctctagggccctttcttgcactgtccagctggttgtaccctctccaggcatttattcaacaaatgtgggtgaagtgcctgctgggtgccaggtgctgggaatacatctgtggacaagacatgcttgggtcctactcctggagcactgtaaaaagagctgattcaagtaagtagatgcctgttttgagaccagaaggtttcataattggttctacgacccttttgagcctagaattattgttcttatataagatcactgaagaaagaggaacccccacaaccccctccacaaagagaccaggggcgggtgatgagacctggggtttagaaccccaggtgagacctcaaatcactgcattcattctgagcccccttcctgtccccaggggaggtgtattgtgtatgtagccttagagcatctctgcctccaacccagcagttctctgccaaagcttgtggaggagggagagccctgtccctgccctcaggctccccagtgctcctggcccttctatttatttgactgattattgcttctttccttgcattaaaggagatcttcccctaacctttgggccaatttactggccactaatttcgtttaaataccattgtgtcattggggggaccgtctttacccctgctgacctcccacctatccgccctgcagcagaaccttggcggtttataggtaatgatggaacttagactcctcttcccagagtcacaagtagcctctgggatctgccaacacacgtccactcccaagccactagcccactccccagttggcccttctgcccttaccccacacacagtccaactcttccacctctggggaagatggagcaggtctttgggaagctcccacacccacctctgccactcttaacactaagtgagagttggggagaaactgaagccgtgtttttggccccccgaggctaaccctgatccatagtgctacctgcacctctggattctggattcacagaccaagtccaagcccgttcttacgtcgccataaaggcccccgaacggcattctcggtacttctgtttgtttttgtacattttattagaaaggactgtaaaatagccacttagacactttacctcttcagtatgcaaatgtaaataaattgtaatataggaaatcttttgttttaatataagaatgagcctgtccaatttctgctgtacattattaaaagttttattcacagaaactgctctggtgc

SEQ ID NO: 315927 - DNA, 937 bp, Homo sapiens
agcgcgctgctgggctgcggcggcggcggcggcggtggttactatggcggagtcggccggagcctcctccttcttcccccttgttgtcctcctgctcgccggcagcggcgggtccgggccccggggggtccaggctctgctgtgtgcgtgcaccagctgcctccaggccaactacacgtgtgagacagatggggcctgcatggtttccattttcaatctggatgggatggagcaccatgtgcgcacctgcatccccaaagtggagctggtccctgccgggaagcccttctactgcctgagctcggaggacctgcgcaacacccactgctgctacactgactactgcaacaggatcgacttgagggtgcccagtggtcacctcaaggagcctgagcacccgtccatgtggggcccggtggagctggtaggcatcatcgccggcccggtgttcctcctgttcctcatcatcatcattgttttccttgtcattaactatcatcagcgtgtctatcacaaccgccagagactggacatggaagatccctcatgtgagatgtgtctctccaaagacaagacgctccaggatcttgtctacgatctctccacctcagggtctggctcaggtaccaagttcttcagggcatcatgtctgtggttggctttcatcagtttcccagcaggatagagtgcttgtagagaaggctggaggccctgcatttgtttctaccagcattgagtcatttggtttcctagttccccttcttttggagtctgacgtgtaataagataagataatgggttcacagaaaatctctcattccgtgggattcccaaggtctagtacacaattatccactacagaagtcctgcctctctaagctttgcaactgtacgtacatctattaaaattcagctggtcccccctgaaaaaaaaaaa

SEQ ID NO: 315928 - DNA, 1785 bp, Homo sapiens
agcgcgctgctgggctgcggcggcggcggcggcggtggttactatggcggagtcggccggagcctcctccttcttcccccttgttgtcctcctgctcgccggcagcggcgggtccgggccccggggggtccaggctctgctgtgtgcgtgcaccagctgcctccaggccaactacacgtgtgagacagatggggcctgcatggtttccattttcaatctggatgggatggagcaccatgtgcgcacctgcatccccaaagtggagctggtccctgccgggaagcccttctactgcctgagctcggaggacctgcgcaacacccactgctgctacactgactactgcaacaggatcgacttgagggtgcccagtggtcacctcaaggagcctgagcacccgtccatgtggggcccggtggagctggtaggcatcatcgccggcccggtgttcctcctgttcctcatcatcatcattgttttccttgtcattaactatcatcagcgtgtctatcacaaccgccagagactggacatggaagatccctcatgtgagatgtgtctctccaaagacaagacgctccaggatcttgtctacgatctctccacctcagggtctggctcagggttacccctctttgtccagcgcacagtggcccgaaccatcgttttacaagagattattggcaagggtcggtttggggaagtatggcggggccgctggaggggtggtgatgtggctgtgaaaatattctcttctcgtgaagaacggtcttggttcagggaagcagagatataccagacggtcatgctgcgccatgaaaacatccttggatttattgctgctgacaataaagataatggcacctggacacagctgtggcttgtttctgactatcatgagcacgggtccctgtttgattatctgaaccggtacacagtgacaattgaggggatgattaagctggccttgtctgctgctagtgggctggcacacctgcacatggagatcgtgggcacccaagggaagcctggaattgctcatcgagacttaaagtcaaagaacattctggtgaagaaaaatggcatgtgtgccatagcagacctgggcctggctgtccgtcatgatgcagtcactgacaccattgacattgccccgaatcagagggtggggaccaaacgatacatggcccctgaagtacttgatgaaaccattaatatgaaacactttgactcctttaaatgtgctgatatttatgccctcgggcttgtatattgggagattgctcgaagatgcaattctggaggagtccatgaagaatatcagctgccatattacgacttagtgccctctgacccttccattgaggaaatgcgaaaggttgtatgtgatcagaagctgcgtcccaacatccccaactggtggcagagttatgaggtaagaagctggcctcctgctgctttcccatcagcctgatttctccaccttagaaaagggtttcttgacaatggggtcaggccccagaggagccccctgagagtgtcagttattatttactattacgtgctattttacatatcccaagccctttagggctacagtctcttgtcctggaccctgtagggtgccatttggagttcacagcctagaagaagaaaaggctttgggcctggtgtggtggcataggcctgtaatcgtagcgctttgagaggctgaggcaggaagatagcttgagctcagagagttcgagacaaacctgggcaatgtggggagaccccatctctaca

SEQ ID NO: 315929 - DNA, 4544 bp, Homo sapiens
  misc_feature (2558)..(2558): n is a, c, g, or t
agcgcgctgctgggctgcggcggcggcggcggcggtggttactatggcggagtcggccggagcctcctccttcttcccccttgttgtcctcctgctcgccggcagcggcgggtccgggccccggggggtccaggctctgctgtgtgcgtgcaccagctgcctccaggccaactacacgtgtgagacagatggggcctgcatggtttccattttcaatctggatgggatggagcaccatgtgcgcacctgcatccccaaagtggagctggtccctgccgggaagcccttctactgcctgagctcggaggacctgcgcaacacccactgctgctacactgactactgcaacaggatcgacttgagggtgcccagtggtcacctcaaggagcctgagcacccgtccatgtggggcccggtggagctggtaggcatcatcgccggcccggtgttcctcctgttcctcatcatcatcattgttttccttgtcattaactatcatcagcgtgtctatcacaaccgccagagactggacatggaagatccctcatgtgagatgtgtctctccaaagacaagacgctccaggatcttgtctacgatctctccacctcagggtctggctcagggttacccctctttgtccagcgcacagtggcccgaaccatcgttttacaagagattattggcaagggtcggtttggggaagtatggcggggccgctggaggggtggtgatgtggctgtgaaaatattctcttctcgtgaagaacggtcttggttcagggaagcagagatataccagacggtcatgctgcgccatgaaaacatccttggatttattgctgctgacaataaagataatggcacctggacacagctgtggcttgtttctgactatcatgagcacgggtccctgtttgattatctgaaccggtacacagtgacaattgaggggatgattaagctggccttgtctgctgctagtgggctggcacacctgcacatggagatcgtgggcacccaagggaagcctggaattgctcatcgagacttaaagtcaaagaacattctggtgaagaaaaatggcatgtgtgccatagcagacctgggcctggctgtccgtcatgatgcagtcactgacaccattgacattgccccgaatcagagggtggggaccaaacgatacatggcccctgaagtacttgatgaaaccattaatatgaaacactttgactcctttaaatgtgctgatatttatgccctcgggcttgtatattgggagattgctcgaagatgcaattctggaggagtccatgaagaatatcagctgccatattacgacttagtgccctctgacccttccattgaggaaatgcgaaaggttgtatgtgatcagaagctgcgtcccaacatccccaactggtggcagagttatgaggcactgcgggtgatggggaagatgatgcgagagtgttggtatgccaacggcgcagcccgcctgacggccctgcgcatcaagaagaccctctcccagctcagcgtgcaggaagacgtgaagatctaactgctccctctctccacacggagctcctggcagcgagaactacgcacagctgccgcgttgagcgtacgatggaggcctacctctcgtttctgcccagccctctgtggccaggagccctggcccgcaagagggacagagcccgggagagactcgctcactcccatgttgggtttgagacagacaccttttctatttacctcctaatggcatggagactctgagagcgaattgtgtggagaactcagtgccacacctcgaactggttgtagtgggaagtcccgcgaaacccggtgcatctggcacgtggccaggagccatgacaggggcgcttgggaggggccggaggaaccgaggtgttgccagtgctaagctgccctgagggtttccttcggggaccagcccacagcacaccaaggtggcccggaagaaccagaagtgcagcccctctcacaggcagctctgagccgcgctttcccctcctccctgggatggacgctgccgggagactgccagtggagacggaatctgccgctttgtctgtccagccgtgtgtgcatgtgccgaggtgcgtcccccgttgtgcctggttcgtgccatgcccttacacgtgcgtgtgagtgtgtgtgtgtgtctgtaggtgcgcacttacctgcttgagctttctgtgcatgtgcaggtcgggggtgtggtcgtcatgctgtccgtgcttgctggtgcctcttttcagtagtgagcagcatctagtttccctggtgcccttccctggaggtctctccctcccccagagcccctcatgccacagtggtactctgtgtctggcaggctactctgcccaccccagcatcagcacagctctcctcctccatctcagactgtggaaccaaagctggcccagttgtccatgacaaaagaggcttttgggccaaaatgtgagggtggtgggtgggatgggcagggaaggaatcctggtggaagtcttgggtgttagtgtcagccntgggaaatgagccagcccaagggcatcatcctcagcagcatcgaggaagggccgaggaatgtgaagccagatctcgggactcagattggaatgttacatctgtctttcatctcccagatcctggaaacagcagtgtatatttttggtggtggtgggtttggggtggggaagggaagggcgggcaaggagtggggagggagtctggggtgggagggaggcatctgcatgggtcttcttttactggactgtctgatcagggtggagggaaggtgagaggtttgcatccacttcaggagccctactgaagggaacagcctgagccgaacatgttatttaacctgagtatagtatttaacgaagcctagaagcacggctgtgggtggtgatttggtcagcatatcttaggtatataataactttgaagccataacttttaactggagtggtttgatttctttttttaattttattgggagggtttggattttaactttttttaatgttgttaaatattaagtttttgtaaaaggaaaaccatctctgtgattacctctcaatctatttgtttttaaagaaatccctaaaaaaaaaaaattatccaattgaacgcacatagctcaatcacactggaaatgtttgtccttgcacctgagcctgttcccactcagcagtgagagttcctctttgccctgaggctcagtctctctcgtattttgtccccacccccaattccttgagtggtttttgctctagggccctttcttgcactgtccagctggttgtaccctctccaggcatttattcaacaaatgtgggtgaagtgcctgctgggtgccaggtgctgggaatacatctgtggacaagacatgcttgggtcctactcctggagcactgtaaaaagagctgattcaagtaagtagatgcctgttttgagaccagaaggtttcataattggttctacgacccttttgagcctagaattattgttcttatataagatcactgaagaaagaggaacccccacaaccccctccacaaagagaccaggggcgggtgatgagacctggggtttagaaccccaggtgagacctcaaatcactgcattcattctgagcccccttcctgtccccaggggaggtgtattgtgtatgtagccttagagcatctctgcctccaacccagcagttctctgccaaagcttgtggaggagggagagccctgtccctgccctcaggctccccagtgctcctggcccttctatttatttgactgattattgcttctttccttgcattaaaggagatcttcccctaacctttgggccaatttactggccactaatttcgtttaaataccattgtgtcattggggggaccgtctttacccctgctgacctcccacctatccgccctgcagcagaaccttggcggtttataggtaatgatggaacttagactcctcttcccagagtcacaagtagcctctgggatctgccaacacacgtccactcccaagccactagcccactccccagttggcccttctgcccttaccccacacacagtccaactcttccacctctggggaagatggagcaggtctttgggaagctcccacacccacctctgccactcttaacactaagtgagagttggggagaaactgaagccgtgtttttggccccccgaggctaaccctgatccatagtgctacctgcacctctggattctggattcacagaccaagtccaagcccgttcttacgtcgccataaaggcccccgaacggcattctcggtacttctgtttgtttttgtacattttattagaaaggactgtaaaatagccacttagacactttacctcttcagtatgcaaatgtaaataaattgtaatataggaaatcttttgttttaatataagaatgagcctgtccaatttctgctgtacattattaaaagttttattcacagaaactgctctggtgc

SEQ ID NO: 315930 - DNA, 598 bp, Homo sapiens
tttatgtgcgactgtaagaatcgggctttggactttggttctgtgaatctcagaagctcagaggtgcaggtagcactatggattcagggtagcctctgggatctgccaacacacgtccactcccaagccactagcccactccccagttggcccttctgcccttaccccacacacagtccaactcttccacctctggggaagatggagcaggtctttgggaagctcccacacccacctctgccactcttaacactaagtgagagttggggagaaactgaagccgtgtttttggccccccgaggctaaccctgatccatagtgctacctgcacctctggattctggattcacagaccaagtccaagcccgttcttacgtcgccataaaggcccccgaacggcattctcggtacttctgtttgtttttgtacattttattagaaaggactgtaaaatagccacttagacactttacctcttcagtatgcaaatgtaaataaattgtaatataggaaatcttttgttttaatataagaatgagcctgtccaatttctgctgtacattattaaaagttttattcacagaaactgctctggtgc

SEQ ID NO: 315931 - DNA, 470 bp, Homo sapiens
agctgcctccaggccaactacacgtgtgagacagatggggcctgcatggtttccattttcaatctggatgggatggagcaccatgtgcgcacctgcatccccaaagtggagctggtccctgccgggaagcccttctactgcctgagctcggaggacctgcgcaacacccactgctgctacactgactactgcaacaggatcgacttgagggtgcccagtggtgagtgcatgcccttgttgggctagtggctcagcttggagatagggtaccccgtcatttcatttttttctactcttgcccactcacttggtttgacgataaagatgccttttggatgttcccgaaggtgacaaaggctggggtttctcagcagttgcttttgtagattagagggtgaggaagcagattttcaagttagtcccagaggtgcccgcagtgtttagagtagtggcttagcagccataggcag

SEQ ID NO: 315932 - DNA, 1483 bp, Homo sapiens
ggtccgcggctgctgctgcgtccgacccccggccggcgcgggtatggagcttgggggtcactgggacatgaactcggccccgaggctggtctcggagaccgcagagcggaaacaggagcagaagacaggaaccgaggcggaggctgccgactccggtgccgtcggagcccgccgcttcctgctctgtctctacttggtgggcttcttggatttgtttggtgtcagcatggttgtgcctttattgagccttcatgtcaagtcccttggagcaagtccaacagttgctggaatagtaggctcctcctatggcattttgcaactcttttctagcacattggtgggctgctggagcgatgtagtgggaagacggtcttccttgctggcatgcattctactcagtgctctgggctatctccttctcggagcagccaccaatgtgtttctgtttgtcctggctagagtcccggcaggtatttttaaacacactctctccatctcaagggctctactttctgatgtggttccagagaaggaacggccgcttgtaatcggacacttcaacacagcctccggtgtgggcttcatcttgggccccgtggtcggtggctatctcactgaattagaggatgggttttatctcacagccttcatctgctttttggtcttcattctcaatgctggtctcgtttggttctttccatggagggaagcaaaaccgggcagtacagagaagggcctgccattgcgaaagacccatgtgctgttgggaaggagccatgacacagtgcaggaggcagccaccagccgcagagccagggccagcaagaagactgcccagccctgggtcgaagtagtgttggccttgcggaacatgaagaacctgctgttttccgaaatgtgggacatatttctggtgcgcttgctgatggccatggcagtcatgctgtactacagtaactttgtcctggccctggaggagcgctttggggtgcggcccaaggtgacaggctacctcatcagttacagcagcatgctgggggccgtggccggccttgccctggggccaatcctacggctgtacaagcacaactcgcaggcactgctgctgcattccagcatactcacctgcacactgctgctgctctactccttggcccccaccatgggtgcagttgtcctctcctccactctcctgtccttctccactgccattggcaggacgtgcatcacggacctccagctgactgtgggcggggcccaggccagcggcacccttattggcgtggggcagtctgtgactgcagtgggccgcatcatcgcccctctcctctcgggggttgcccaggaggtcagcccttgcggcccccccagcctgggcgctgtgttagccttagtggccattttcataatgtctctaaacaagcgacactctagtggtgatgggaatagtaaattaaaaagtgagtagatggatttggacaac

SEQ ID NO: 315933 - DNA, 5352 bp, Homo sapiens
ggtccgcggctgctgctgcgtccgacccccggccggcgcgggtatggagcttgggggtcactgggacatgaactcggccccgaggctggtctcggagaccgcagagcggaaacaggagcagaagacaggaaccgaggcggaggctgccgactccggtgccgtcggagcccgccgcttcctgctctgtctctacttggtgggcttcttggatttgtttggtgtcagcatggttgtgcctttattgagccttcatgtcaagtcccttggagcaagtccaacagttgctggaatagtagacgacgtatgttcaaagagattttgagatttgagcactataaccaagtcccatgccactagtggcaacaggtacttatggagcctctgcaaggagctggctgtgtgtataaaagggctcctcctatggcattttgcaactcttttctagcacattggtgggctgctggagcgatgtagtgggaagacggtcttccttgctggcatgcattctactcagtgctctgggctatctccttctcggagcagccaccaatgtgtttctgtttgtcctggctagagtcccggcagggctctactttctgatgtggttccagagaaggaacggccgcttgtaatcggacacttcaacacagcctccggtgtgggcttcatcttgggccccgtggtcggtggctatctcactgaattagaggatgggttttatctcacagccttcatctgctttttggtcttcattctcaatgctggtctcgtttggttctttccatggagggaagcaaaaccgggcagtacagagaagggcctgccattgcgaaagacccatgtgctgttgggaaggagccatgacacagtgcaggaggcagccaccagccgcagagccagggccagcaagaagactgcccagccctgggtcgaagtagtgttggccttgcggaacatgaagaacctgctgttttccgaaatgtgggacatatttctggtgcgcttgctgatggccatggcagtcatgctgtactacagtaactttgtcctggccctggaggagcgctttggggtgcggcccaaggtgacaggctacctcatcagttacagcagcatgctgggggccgtggccggccttgccctggggccaatcctacggctgtacaagcacaactcgcaggcactgctgctgcattccagcatactcacctgcacactgctgctgctctactccttggcccccaccatgggtgcagttgtcctctcctccactctcctgtccttctccactgccattggcaggacgtgcatcacggacctccagctgactgtgggcggggcccaggccagcggcacccttattggcgtggggcagtctgtgactgcagtgggccgcatcatcgcccctctcctctcgggggttgcccaggaggtcagcccttgcggcccccccagcctgggcgctgtgttagccttagtggccattttcataatgtctctaaacaagcgacactctagtggtgatgggaatagtaaattaaaaagtgagtagatggatttggacaacataaagcaacaaaatttgagatggttgaatgagggccggaggccatgatgaaaagggcactttggaaagggttggggtggaagggaaatatttccgggtgggtgtgagctgttgggcttccaggtcagctcttggccatgcagccatgcctgcaggatgatcagaagtcacggcacctcatgggaaggttaagactggagcaaagcttttccaaggtgagcatattcagcgtttacctggaagtctcttcttcccacctgggctaatcaggttacaattttcaagggtaaacaaactaccagctacaggatagggaagtggtggtggaataagagaacatgatacctggaggaagggaagaaaccacaagcattttcctactgaaaaatagggtgacatgtcagtcaaattctgatcaactggaacttgagtttccagttaaattccatacactaggagggagttttctatcaaaatcctgcagattgaagaagctggtttattagaaccagcctgtcgcttttcaaagctgcttaaaaataagatactgacctcacccctagagatgattcagtgggcctgggtggggccaagaaatccgtggtgttttgtaagcactgctggcgatttctcatggcagtaaagaccacactgagactgcactgattttgattaaagtacataggcttggctgtttttacacagctaactaaatttggactcttaaaattgtgtttgtaatcacagtgtgttacacctttcccagctctcagcagttgtactgcatgatggagcagcgggcccctgggacctgttccctgtgctccctgcctctgagagcccagcttgctctgaagttggactaaaccacttagatgctggggttgccacagcctgctcctggaagcctgcattccagtcaggttgcatccttctggtgctgacagaacccagtggtgaagccaaagcacaggaatgctttaaaaatgaacagtttatgcagaataagggtcaggagtcatgccagaccagaacttgatgctactgtgtcttgtgttaagaatcatttcctggccaggctcggtggctcaggcctgtaatcccagcactttgggaggctgaggcaggtgaatcacttggtcaggagatggagaccattctggctaacatggtgaaaccccgtctctactaaaaatacaaaaaaaaaattagccgggcgtgatggcgggcgcctgcagtcccagctattcgggaggctgaggtagaatggcgtgaacctgggaggcggagcttgcggtgagccaagattgtgccactgctctccagcctgggcgacagagtgagactccgtctcaaaaaaaaaagaatcatttcctttatttttagtttcacgcctgcaaacacaagcattctgttgatcaacggaaatattttgatgtgccatttcttgtctaaacaagtttcatatacagcaccgagggggccacgagaggcagaggcccagacagaaggtgaacatagccttgcagggagacatatgccaggcaggatgaccattgggattgcatcaagtattaatcagttacttaagggcttcctgtcagacagttgaagttcacattccttttacttttcttaattagtccactaggatggtatgcctgttttcaacttaacacatgcatacttgtaaatattttagtatgctacagtaatttgtcatatctttaatatttattgtttgtaaagcagtaaacatttctgtattttagaagtcatggagtaaaatcaaatatttatgataaataattggaagtatgttttagtttgaagattgtcctttttcctatcttgctgcaaggaaaaatggacttctgattaggttttacaattgtgaacttttatgtaaatgttaagtgctttcgaggagaccaaactattattaatatataaaatggccttgcccttaaggagcaaattaaatctcatggagattagactcaaaaggcaataaataatcgagggtttatgcaatgaaatagaatttcagaagagtttggatctcaaagattgtccttcactctcagaaacaggcaagtttcttaaaagcccttatagtcgtgtttttattttaaaaatcgtagcactttatttttgaagtttaaaaagcccataaacttaatgagtctttataatcagacacatggaaatatagaaaaccaaagactgatcttagaatatagagtagagagacatgtttgttattctccactagtgactttagtattttgttatgtgatgttttttaggtgcaccttttctcatgactccttttactttatctaatgtcttcctctttaaagtgtgacccagagaccagtagcatcagcatcacctgagacctgtgaacactgaagctccagctcagacatgttggggaccattttaataagatacctagctgattttttgcacagcaaactttgaaaacccctggtctaaggggtagtatttgtatcacttatggaatataatctcagggaaattaaatctgctcaattgacatttgtggtgtttcattttttaaattctcttgagtaacttctgtagccctttccagtgtgtcaggttgagccacatgaagttgctatttttgtaagtcaaaaatatcttcatagggtgcaactcactattctatggaatcttattttaggagtattgaaccttcctgaaatgtctttgaaggaagtgtcaccctttccaacactctgccagccataactgcttgggaacaggtctccaggatttgggttccatagagcagaaggtaggcctctgccctcatgtctagagggatgaataacattctgaaaaggtacagggtgtgtctagtcacaggagtcacctgcaaggctccaaactcaggctggatggccccttggggagtgaattctgcaagagttgcacctggggccaacagaaggagctggaatcactgattctgtatcctggctacatgccttagaccacaggaaccagactctgaagcaccacagatgtttctgtgaacatctggagttgggaatcactgagttagatcaagaatggattcggctgccatgctcgggttgagattgtattgacggatgaaggggaatgacggaagaattcctgcggtaaagtgctgtgaagacactcctgttttagaaagagctctctagccgcagcaaggaggattaactggaggcccaaggagtagtctggactttggggcagtaactttaggggggccctgagggagagctggtcgcgaggacagggacagcaggcagaggttgtggcccacagggcaatcgcaggagaggttgtgaataattcccaggtgatgagtgtgcagctttgaggaatttcaaagggttgcttggcgtcttttcctgaagacacttctataaggtatttagaaatctatcaggagtgagaatcagtccagtcagaaaattttaggcatttgggcaactgcattcagaaaacagctatttatttggaatgcataataaaagccatgagactgaatctccatgcctctttgccccctagtagccttcaagaagtctctaaaacagggttaccacagatttagccaggatgatgtgtagcagcttttcttggaacaggttgatggattaaaataactttttttcagctctaatgtttttttcttgaatttgccagtcacatgataattttcttcaaaaataaaactttataattgtaaaaaaaaaaag

SEQ ID NO: 315934 - DNA, 2626 bp, Homo sapiens
ggtccgcggctgctgctgcgtccgacccccggccggcgcgggtatggagcttgggggtcactgggacatgaactcggccccgaggctggtctcggagaccgcagagcggaaacaggagcagaagacaggaaccgaggcggaggctgccgactccggtgccgtcggagcccgccgcttcctgctctgtctctacttggtgggcttcttggatttgtttggtgtcagcatggttgtgcctttattgagccttcatgtcaagtcccttggagcaagtccaacagttgctggaatagtagacgacgtatgttcaaagagattttgagatttgagcactataaccaagtcccatgccactagtggcaacaggtacttatggagcctctgcaaggagctggctgtgtgtataaaagggctcctcctatggcattttgcaactcttttctagcacattggtgggctgctggagcgatgtagtgggaagacggtcttccttgctggcatgcattctactcagtgctctgggctatctccttctcggagcagccaccaatgtgtttctgtttgtcctggctagagtcccggcaggtatttttaaacacactctctccatctcaagggctctactttctgatgtggttccagagaaggaacggccgcttgtaatcggacacttcaacacagcctccggtgtgggcttcatcttgggccccgtggtcggtggctatctcactgaattagaggatgggttttatctcacagccttcatctgctttttggtcttcattctcaatgctggtctcgtttggttctttccatggagggaagcaaaaccgggcagtacagagaagggcctgccattgcgaaagacccatgtgctgttgggaaggagccatgacacagtgcaggaggcagccaccagccgcagagccagggccagcaagaagactgcccagccctgggtcgaagtagtgttggccttgcggaacatgaagaacctgctgttttccgaaatgtgggacatatttctggtgcgcttgctgatggccatggcagtcatgctgtactacagtaactttgtcctggccctggaggagcgctttggggtgcggcccaaggtgacaggctacctcatcagttacagcagcatgctgggggccgtggccggccttgccctggggccaatcctacggctgtacaagcacaactcgcaggcactgctgctgcattccagcatactcacctgcacactgctgctgctctactccttggcccccaccatgggtgcagttgtcctctcctccactctcctgtccttctccactgccattggcaggacgtgcatcacggacctccagctgactgtgggcggggcccaggccagcggcacccttattggcgtggggcagtctgtgactgcagtgggccgcatcatcgcccctctcctctcgggggttgcccaggaggtcagcccttgcggcccccccagcctgggcgctgtgttagccttagtggccattttcataatgtctctaaacaagcgacactctagtggtgatgggaatagtaaattaaaaagtgagtagatggatttggacaacataaagcaacaaaatttgagatggttgaatgagggccggaggccatgatgaaaagggcactttggaaagggttggggtggaagggaaatatttccgggtgggtgtgagctgttgggcttccaggtcagctcttggccatgcagccatgcctgcaggatgatcagaagtcacggcacctcatgggaaggttaagactggagcaaagcttttccaaggtgagcatattcagcgtttacctggaagtctcttcttcccacctgggctaatcaggttacaattttcaagggtaaacaaactaccagctacaggatagggaagtggtggtggaataagagaacatgatacctggaggaagggaagaaaccacaagcattttcctactgaaaaatagggtgacatgtcagtcaaattctgatcaactggaacttgagtttccagttaaattccatacactaggagggagttttctatcaaaatcctgcagattgaagaagctggtttattagaaccagcctgtcgcttttcaaagctgcttaaaaataagatactgacctcacccctagagatgattcagtgggcctgggtggggccaagaaatccgtggtgttttgtaagcactgctggcgatttctcatggcagtaaagaccacactgagactgcactgattttgattaaagtacataggcttggctgtttttacacagctaactaaatttggactcttaaaattgtgtttgtaatcacagctataatctcagcactttggagggctgaggtgggagaattgcctgagcccaggagttcaagaccagcttgtgcaatatagggagactccggctctacaaaaaagagtttttcaaaattagccaggcgaagtggcacacatctgtggtcccaggtgctcaggaagctgaggtgggaggatcacttgagcccaattcaaagctgcagtgagctgtaattgcatcactgcactccaacctgggcaacagagtaagcccttgtcttaaaaaaaaataacaccata

SEQ ID NO: 315935 - DNA, 5383 bp, Homo sapiens
ggtccgcggctgctgctgcgtccgacccccggccggcgcgggtatggagcttgggggtcactgggacatgaactcggccccgaggctggtctcggagaccgcagagcggaaacaggagcagaagacaggaaccgaggcggaggctgccgactccggtgccgtcggagcccgccgcttcctgctctgtctctacttggtgggcttcttggatttgtttggtgtcagcatggttgtgcctttattgagccttcatgtcaagtcccttggagcaagtccaacagttgctggaatagtagacgacgtatgttcaaagagattttgagatttgagcactataaccaagtcccatgccactagtggcaacaggtacttatggagcctctgcaaggagctggctgtgtgtataaaagggctcctcctatggcattttgcaactcttttctagcacattggtgggctgctggagcgatgtagtgggaagacggtcttccttgctggcatgcattctactcagtgctctgggctatctccttctcggagcagccaccaatgtgtttctgtttgtcctggctagagtcccggcaggtatttttaaacacactctctccatctcaagggctctactttctgatgtggttccagagaaggaacggccgcttgtaatcggacacttcaacacagcctccggtgtgggcttcatcttgggccccgtggtcggtggctatctcactgaattagaggatgggttttatctcacagccttcatctgctttttggtcttcattctcaatgctggtctcgtttggttctttccatggagggaagcaaaaccgggcagtacagagaagggcctgccattgcgaaagacccatgtgctgttgggaaggagccatgacacagtgcaggaggcagccaccagccgcagagccagggccagcaagaagactgcccagccctgggtcgaagtagtgttggccttgcggaacatgaagaacctgctgttttccgaaatgtgggacatatttctggtgcgcttgctgatggccatggcagtcatgctgtactacagtaactttgtcctggccctggaggagcgctttggggtgcggcccaaggtgacaggctacctcatcagttacagcagcatgctgggggccgtggccggccttgccctggggccaatcctacggctgtacaagcacaactcgcaggcactgctgctgcattccagcatactcacctgcacactgctgctgctctactccttggcccccaccatgggtgcagttgtcctctcctccactctcctgtccttctccactgccattggcaggacgtgcatcacggacctccagctgactgtgggcggggcccaggccagcggcacccttattggcgtggggcagtctgtgactgcagtgggccgcatcatcgcccctctcctctcgggggttgcccaggaggtcagcccttgcggcccccccagcctgggcgctgtgttagccttagtggccattttcataatgtctctaaacaagcgacactctagtggtgatgggaatagtaaattaaaaagtgagtagatggatttggacaacataaagcaacaaaatttgagatggttgaatgagggccggaggccatgatgaaaagggcactttggaaagggttggggtggaagggaaatatttccgggtgggtgtgagctgttgggcttccaggtcagctcttggccatgcagccatgcctgcaggatgatcagaagtcacggcacctcatgggaaggttaagactggagcaaagcttttccaaggtgagcatattcagcgtttacctggaagtctcttcttcccacctgggctaatcaggttacaattttcaagggtaaacaaactaccagctacaggatagggaagtggtggtggaataagagaacatgatacctggaggaagggaagaaaccacaagcattttcctactgaaaaatagggtgacatgtcagtcaaattctgatcaactggaacttgagtttccagttaaattccatacactaggagggagttttctatcaaaatcctgcagattgaagaagctggtttattagaaccagcctgtcgcttttcaaagctgcttaaaaataagatactgacctcacccctagagatgattcagtgggcctgggtggggccaagaaatccgtggtgttttgtaagcactgctggcgatttctcatggcagtaaagaccacactgagactgcactgattttgattaaagtacataggcttggctgtttttacacagctaactaaatttggactcttaaaattgtgtttgtaatcacagtgtgttacacctttcccagctctcagcagttgtactgcatgatggagcagcgggcccctgggacctgttccctgtgctccctgcctctgagagcccagcttgctctgaagttggactaaaccacttagatgctggggttgccacagcctgctcctggaagcctgcattccagtcaggttgcatccttctggtgctgacagaacccagtggtgaagccaaagcacaggaatgctttaaaaatgaacagtttatgcagaataagggtcaggagtcatgccagaccagaacttgatgctactgtgtcttgtgttaagaatcatttcctggccaggctcggtggctcaggcctgtaatcccagcactttgggaggctgaggcaggtgaatcacttggtcaggagatggagaccattctggctaacatggtgaaaccccgtctctactaaaaatacaaaaaaaaaattagccgggcgtgatggcgggcgcctgcagtcccagctattcgggaggctgaggtagaatggcgtgaacctgggaggcggagcttgcggtgagccaagattgtgccactgctctccagcctgggcgacagagtgagactccgtctcaaaaaaaaaagaatcatttcctttatttttagtttcacgcctgcaaacacaagcattctgttgatcaacggaaatattttgatgtgccatttcttgtctaaacaagtttcatatacagcaccgagggggccacgagaggcagaggcccagacagaaggtgaacatagccttgcagggagacatatgccaggcaggatgaccattgggattgcatcaagtattaatcagttacttaagggcttcctgtcagacagttgaagttcacattccttttacttttcttaattagtccactaggatggtatgcctgttttcaacttaacacatgcatacttgtaaatattttagtatgctacagtaatttgtcatatctttaatatttattgtttgtaaagcagtaaacatttctgtattttagaagtcatggagtaaaatcaaatatttatgataaataattggaagtatgttttagtttgaagattgtcctttttcctatcttgctgcaaggaaaaatggacttctgattaggttttacaattgtgaacttttatgtaaatgttaagtgctttcgaggagaccaaactattattaatatataaaatggccttgcccttaaggagcaaattaaatctcatggagattagactcaaaaggcaataaataatcgagggtttatgcaatgaaatagaatttcagaagagtttggatctcaaagattgtccttcactctcagaaacaggcaagtttcttaaaagcccttatagtcgtgtttttattttaaaaatcgtagcactttatttttgaagtttaaaaagcccataaacttaatgagtctttataatcagacacatggaaatatagaaaaccaaagactgatcttagaatatagagtagagagacatgtttgttattctccactagtgactttagtattttgttatgtgatgttttttaggtgcaccttttctcatgactccttttactttatctaatgtcttcctctttaaagtgtgacccagagaccagtagcatcagcatcacctgagacctgtgaacactgaagctccagctcagacatgttggggaccattttaataagatacctagctgattttttgcacagcaaactttgaaaacccctggtctaaggggtagtatttgtatcacttatggaatataatctcagggaaattaaatctgctcaattgacatttgtggtgtttcattttttaaattctcttgagtaacttctgtagccctttccagtgtgtcaggttgagccacatgaagttgctatttttgtaagtcaaaaatatcttcatagggtgcaactcactattctatggaatcttattttaggagtattgaaccttcctgaaatgtctttgaaggaagtgtcaccctttccaacactctgccagccataactgcttgggaacaggtctccaggatttgggttccatagagcagaaggtaggcctctgccctcatgtctagagggatgaataacattctgaaaaggtacagggtgtgtctagtcacaggagtcacctgcaaggctccaaactcaggctggatggccccttggggagtgaattctgcaagagttgcacctggggccaacagaaggagctggaatcactgattctgtatcctggctacatgccttagaccacaggaaccagactctgaagcaccacagatgtttctgtgaacatctggagttgggaatcactgagttagatcaagaatggattcggctgccatgctcgggttgagattgtattgacggatgaaggggaatgacggaagaattcctgcggtaaagtgctgtgaagacactcctgttttagaaagagctctctagccgcagcaaggaggattaactggaggcccaaggagtagtctggactttggggcagtaactttaggggggccctgagggagagctggtcgcgaggacagggacagcaggcagaggttgtggcccacagggcaatcgcaggagaggttgtgaataattcccaggtgatgagtgtgcagctttgaggaatttcaaagggttgcttggcgtcttttcctgaagacacttctataaggtatttagaaatctatcaggagtgagaatcagtccagtcagaaaattttaggcatttgggcaactgcattcagaaaacagctatttatttggaatgcataataaaagccatgagactgaatctccatgcctctttgccccctagtagccttcaagaagtctctaaaacagggttaccacagatttagccaggatgatgtgtagcagcttttcttggaacaggttgatggattaaaataactttttttcagctctaatgtttttttcttgaatttgccagtcacatgataattttcttcaaaaataaaactttataattgtaaaaaaaaaaag

SEQ ID NO: 315936 - DNA, 5268 bp, Homo sapiens
ggtccgcggctgctgctgcgtccgacccccggccggcgcgggtatggagcttgggggtcactgggacatgaactcggccccgaggctggtctcggagaccgcagagcggaaacaggagcagaagacaggaaccgaggcggaggctgccgactccggtgccgtcggagcccgccgcttcctgctctgtctctacttggtgggcttcttggatttgtttggtgtcagcatggttgtgcctttattgagccttcatgtcaagtcccttggagcaagtccaacagttgctggaatagtaggctcctcctatggcattttgcaactcttttctagcacattggtgggctgctggagcgatgtagtgggaagacggtcttccttgctggcatgcattctactcagtgctctgggctatctccttctcggagcagccaccaatgtgtttctgtttgtcctggctagagtcccggcaggtatttttaaacacactctctccatctcaagggctctactttctgatgtggttccagagaaggaacggccgcttgtaatcggacacttcaacacagcctccggtgtgggcttcatcttgggccccgtggtcggtggctatctcactgaattagaggatgggttttatctcacagccttcatctgctttttggtcttcattctcaatgctggtctcgtttggttctttccatggagggaagcaaaaccgggcagtacagagaagggcctgccattgcgaaagacccatgtgctgttgggaaggagccatgacacagtgcaggaggcagccaccagccgcagagccagggccagcaagaagactgcccagccctgggtcgaagtagtgttggccttgcggaacatgaagaacctgctgttttccgaaatgtgggacatatttctggtgcgcttgctgatggccatggcagtcatgctgtactacagtaactttgtcctggccctggaggagcgctttggggtgcggcccaaggtgacaggctacctcatcagttacagcagcatgctgggggccgtggccggccttgccctggggccaatcctacggctgtacaagcacaactcgcaggcactgctgctgcattccagcatactcacctgcacactgctgctgctctactccttggcccccaccatgggtgcagttgtcctctcctccactctcctgtccttctccactgccattggcaggacgtgcatcacggacctccagctgactgtgggcggggcccaggccagcggcacccttattggcgtggggcagtctgtgactgcagtgggccgcatcatcgcccctctcctctcgggggttgcccaggaggtcagcccttgcggcccccccagcctgggcgctgtgttagccttagtggccattttcataatgtctctaaacaagcgacactctagtggtgatgggaatagtaaattaaaaagtgagtagatggatttggacaacataaagcaacaaaatttgagatggttgaatgagggccggaggccatgatgaaaagggcactttggaaagggttggggtggaagggaaatatttccgggtgggtgtgagctgttgggcttccaggtcagctcttggccatgcagccatgcctgcaggatgatcagaagtcacggcacctcatgggaaggttaagactggagcaaagcttttccaaggtgagcatattcagcgtttacctggaagtctcttcttcccacctgggctaatcaggttacaattttcaagggtaaacaaactaccagctacaggatagggaagtggtggtggaataagagaacatgatacctggaggaagggaagaaaccacaagcattttcctactgaaaaatagggtgacatgtcagtcaaattctgatcaactggaacttgagtttccagttaaattccatacactaggagggagttttctatcaaaatcctgcagattgaagaagctggtttattagaaccagcctgtcgcttttcaaagctgcttaaaaataagatactgacctcacccctagagatgattcagtgggcctgggtggggccaagaaatccgtggtgttttgtaagcactgctggcgatttctcatggcagtaaagaccacactgagactgcactgattttgattaaagtacataggcttggctgtttttacacagctaactaaatttggactcttaaaattgtgtttgtaatcacagtgtgttacacctttcccagctctcagcagttgtactgcatgatggagcagcgggcccctgggacctgttccctgtgctccctgcctctgagagcccagcttgctctgaagttggactaaaccacttagatgctggggttgccacagcctgctcctggaagcctgcattccagtcaggttgcatccttctggtgctgacagaacccagtggtgaagccaaagcacaggaatgctttaaaaatgaacagtttatgcagaataagggtcaggagtcatgccagaccagaacttgatgctactgtgtcttgtgttaagaatcatttcctggccaggctcggtggctcaggcctgtaatcccagcactttgggaggctgaggcaggtgaatcacttggtcaggagatggagaccattctggctaacatggtgaaaccccgtctctactaaaaatacaaaaaaaaaattagccgggcgtgatggcgggcgcctgcagtcccagctattcgggaggctgaggtagaatggcgtgaacctgggaggcggagcttgcggtgagccaagattgtgccactgctctccagcctgggcgacagagtgagactccgtctcaaaaaaaaaagaatcatttcctttatttttagtttcacgcctgcaaacacaagcattctgttgatcaacggaaatattttgatgtgccatttcttgtctaaacaagtttcatatacagcaccgagggggccacgagaggcagaggcccagacagaaggtgaacatagccttgcagggagacatatgccaggcaggatgaccattgggattgcatcaagtattaatcagttacttaagggcttcctgtcagacagttgaagttcacattccttttacttttcttaattagtccactaggatggtatgcctgttttcaacttaacacatgcatacttgtaaatattttagtatgctacagtaatttgtcatatctttaatatttattgtttgtaaagcagtaaacatttctgtattttagaagtcatggagtaaaatcaaatatttatgataaataattggaagtatgttttagtttgaagattgtcctttttcctatcttgctgcaaggaaaaatggacttctgattaggttttacaattgtgaacttttatgtaaatgttaagtgctttcgaggagaccaaactattattaatatataaaatggccttgcccttaaggagcaaattaaatctcatggagattagactcaaaaggcaataaataatcgagggtttatgcaatgaaatagaatttcagaagagtttggatctcaaagattgtccttcactctcagaaacaggcaagtttcttaaaagcccttatagtcgtgtttttattttaaaaatcgtagcactttatttttgaagtttaaaaagcccataaacttaatgagtctttataatcagacacatggaaatatagaaaaccaaagactgatcttagaatatagagtagagagacatgtttgttattctccactagtgactttagtattttgttatgtgatgttttttaggtgcaccttttctcatgactccttttactttatctaatgtcttcctctttaaagtgtgacccagagaccagtagcatcagcatcacctgagacctgtgaacactgaagctccagctcagacatgttggggaccattttaataagatacctagctgattttttgcacagcaaactttgaaaacccctggtctaaggggtagtatttgtatcacttatggaatataatctcagggaaattaaatctgctcaattgacatttgtggtgtttcattttttaaattctcttgagtaacttctgtagccctttccagtgtgtcaggttgagccacatgaagttgctatttttgtaagtcaaaaatatcttcatagggtgcaactcactattctatggaatcttattttaggagtattgaaccttcctgaaatgtctttgaaggaagtgtcaccctttccaacactctgccagccataactgcttgggaacaggtctccaggatttgggttccatagagcagaaggtaggcctctgccctcatgtctagagggatgaataacattctgaaaaggtacagggtgtgtctagtcacaggagtcacctgcaaggctccaaactcaggctggatggccccttggggagtgaattctgcaagagttgcacctggggccaacagaaggagctggaatcactgattctgtatcctggctacatgccttagaccacaggaaccagactctgaagcaccacagatgtttctgtgaacatctggagttgggaatcactgagttagatcaagaatggattcggctgccatgctcgggttgagattgtattgacggatgaaggggaatgacggaagaattcctgcggtaaagtgctgtgaagacactcctgttttagaaagagctctctagccgcagcaaggaggattaactggaggcccaaggagtagtctggactttggggcagtaactttaggggggccctgagggagagctggtcgcgaggacagggacagcaggcagaggttgtggcccacagggcaatcgcaggagaggttgtgaataattcccaggtgatgagtgtgcagctttgaggaatttcaaagggttgcttggcgtcttttcctgaagacacttctataaggtatttagaaatctatcaggagtgagaatcagtccagtcagaaaattttaggcatttgggcaactgcattcagaaaacagctatttatttggaatgcataataaaagccatgagactgaatctccatgcctctttgccccctagtagccttcaagaagtctctaaaacagggttaccacagatttagccaggatgatgtgtagcagcttttcttggaacaggttgatggattaaaataactttttttcagctctaatgtttttttcttgaatttgccagtcacatgataattttcttcaaaaataaaactttataattgtaaaaaaaaaaag

SEQ ID NO: 315937 - DNA, 5252 bp, Homo sapiens
ggtccgcggctgctgctgcgtccgacccccggccggcgcgggtatggagcttgggggtcactgggacatgaactcggccccgaggctggtctcggagaccgcagagcggaaacaggagcagaagacaggaaccgaggcggaggctgccgactccggtgccgtcggagcccgccgcttcctgctctgtctctacttggtgggcttcttgatctgggcatttgtcatggatagtcagtcatgggttgtgccatttatgtgaagctctatcattgttcaatggtcctctatgagtagacaaagtactcaacacgttgactcggaactatgtatggctcctcctatggtcatttgtgcaagcatcttttctaagcacattggtgggctgctggagcgatgtagtgggaagacggtcttccttgctggcatgcattctactcagtgctctgggctatctccttctcggagcagccaccaatgtgtttctgtttgtcctggctagagtcccggcagggctctactttctgatgtggttccagagaaggaacggccgcttgtaatcggacacttcaacacagcctccggtgtgggcttcatcttgggccccgtggtcggtggctatctcactgaattagaggatgggttttatctcacagccttcatctgctttttggtcttcattctcaatgctgggaagcaaaaccgggcagtacagagaagggcctgccattgcgaaagacccatgtgctgttgggaaggagccatgacacagtgcaggaggcagccaccagccgcagagccagggccagcaagaagactgcccagccctgggtcgaagtagtgttggccttgcggaacatgaagaacctgctgttttccgaaatgtgggacatatttctggtgcgcttgctgatggccatggcagtcatgctgtactacagtaactttgtcctggccctggaggagcgctttggggtgcggcccaaggtgacaggctacctcatcagttacagcagcatgctgggggccgtggccggccttgccctggggccaatcctacggctgtacaagcacaactcgcaggcactgctgctgcattccagcatactcacctgcacactgctgctgctctactccttggcccccaccatgggtgcagttgtcctctcctccactctcctgtccttctccactgccattggcaggacgtgcatcacggacctccagctgactgtgggcggggcccaggccagcggcacccttattggcgtggggcagtctgtgactgcagtgggccgcatcatcgcccctctcctctcgggggttgcccaggaggtcagcccttgcggcccccccagcctgggcgctgtgttagccttagtggccattttcataatgtctctaaacaagcgacactctagtggtgatgggaatagtaaattaaaaagtgagtagatggatttggacaacataaagcaacaaaatttgagatggttgaatgagggccggaggccatgatgaaaagggcactttggaaagggttggggtggaagggaaatatttccgggtgggtgtgagctgttgggcttccaggtcagctcttggccatgcagccatgcctgcaggatgatcagaagtcacggcacctcatgggaaggttaagactggagcaaagcttttccaaggtgagcatattcagcgtttacctggaagtctcttcttcccacctgggctaatcaggttacaattttcaagggtaaacaaactaccagctacaggatagggaagtggtggtggaataagagaacatgatacctggaggaagggaagaaaccacaagcattttcctactgaaaaatagggtgacatgtcagtcaaattctgatcaactggaacttgagtttccagttaaattccatacactaggagggagttttctatcaaaatcctgcagattgaagaagctggtttattagaaccagcctgtcgcttttcaaagctgcttaaaaataagatactgacctcacccctagagatgattcagtgggcctgggtggggccaagaaatccgtggtgttttgtaagcactgctggcgatttctcatggcagtaaagaccacactgagactgcactgattttgattaaagtacataggcttggctgtttttacacagctaactaaatttggactcttaaaattgtgtttgtaatcacagtgtgttacacctttcccagctctcagcagttgtactgcatgatggagcagcgggcccctgggacctgttccctgtgctccctgcctctgagagcccagcttgctctgaagttggactaaaccacttagatgctggggttgccacagcctgctcctggaagcctgcattccagtcaggttgcatccttctggtgctgacagaacccagtggtgaagccaaagcacaggaatgctttaaaaatgaacagtttatgcagaataagggtcaggagtcatgccagaccagaacttgatgctactgtgtcttgtgttaagaatcatttcctggccaggctcggtggctcaggcctgtaatcccagcactttgggaggctgaggcaggtgaatcacttggtcaggagatggagaccattctggctaacatggtgaaaccccgtctctactaaaaatacaaaaaaaaaattagccgggcgtgatggcgggcgcctgcagtcccagctattcgggaggctgaggtagaatggcgtgaacctgggaggcggagcttgcggtgagccaagattgtgccactgctctccagcctgggcgacagagtgagactccgtctcaaaaaaaaaagaatcatttcctttatttttagtttcacgcctgcaaacacaagcattctgttgatcaacggaaatattttgatgtgccatttcttgtctaaacaagtttcatatacagcaccgagggggccacgagaggcagaggcccagacagaaggtgaacatagccttgcagggagacatatgccaggcaggatgaccattgggattgcatcaagtattaatcagttacttaagggcttcctgtcagacagttgaagttcacattccttttacttttcttaattagtccactaggatggtatgcctgttttcaacttaacacatgcatacttgtaaatattttagtatgctacagtaatttgtcatatctttaatatttattgtttgtaaagcagtaaacatttctgtattttagaagtcatggagtaaaatcaaatatttatgataaataattggaagtatgttttagtttgaagattgtcctttttcctatcttgctgcaaggaaaaatggacttctgattaggttttacaattgtgaacttttatgtaaatgttaagtgctttcgaggagaccaaactattattaatatataaaatggccttgcccttaaggagcaaattaaatctcatggagattagactcaaaaggcaataaataatcgagggtttatgcaatgaaatagaatttcagaagagtttggatctcaaagattgtccttcactctcagaaacaggcaagtttcttaaaagcccttatagtcgtgtttttattttaaaaatcgtagcactttatttttgaagtttaaaaagcccataaacttaatgagtctttataatcagacacatggaaatatagaaaaccaaagactgatcttagaatatagagtagagagacatgtttgttattctccactagtgactttagtattttgttatgtgatgttttttaggtgcaccttttctcatgactccttttactttatctaatgtcttcctctttaaagtgtgacccagagaccagtagcatcagcatcacctgagacctgtgaacactgaagctccagctcagacatgttggggaccattttaataagatacctagctgattttttgcacagcaaactttgaaaacccctggtctaaggggtagtatttgtatcacttatggaatataatctcagggaaattaaatctgctcaattgacatttgtggtgtttcattttttaaattctcttgagtaacttctgtagccctttccagtgtgtcaggttgagccacatgaagttgctatttttgtaagtcaaaaatatcttcatagggtgcaactcactattctatggaatcttattttaggagtattgaaccttcctgaaatgtctttgaaggaagtgtcaccctttccaacactctgccagccataactgcttgggaacaggtctccaggatttgggttccatagagcagaaggtaggcctctgccctcatgtctagagggatgaataacattctgaaaaggtacagggtgtgtctagtcacaggagtcacctgcaaggctccaaactcaggctggatggccccttggggagtgaattctgcaagagttgcacctggggccaacagaaggagctggaatcactgattctgtatcctggctacatgccttagaccacaggaaccagactctgaagcaccacagatgtttctgtgaacatctggagttgggaatcactgagttagatcaagaatggattcggctgccatgctcgggttgagattgtattgacggatgaaggggaatgacggaagaattcctgcggtaaagtgctgtgaagacactcctgttttagaaagagctctctagccgcagcaaggaggattaactggaggcccaaggagtagtctggactttggggcagtaactttaggggggccctgagggagagctggtcgcgaggacagggacagcaggcagaggttgtggcccacagggcaatcgcaggagaggttgtgaataattcccaggtgatgagtgtgcagctttgaggaatttcaaagggttgcttggcgtcttttcctgaagacacttctataaggtatttagaaatctatcaggagtgagaatcagtccagtcagaaaattttaggcatttgggcaactgcattcagaaaacagctatttatttggaatgcataataaaagccatgagactgaatctccatgcctctttgccccctagtagccttcaagaagtctctaaaacagggttaccacagatttagccaggatgatgtgtagcagcttttcttggaacaggttgatggattaaaataactttttttcagctctaatgtttttttcttgaatttgccagtcacatgataattttcttcaaaaataaaactttataattgtaaaaaaaaaaag

SEQ ID NO: 315938 - DNA, 4163 bp, Homo sapiens
ggtccgcggctgctgctgcgtccgacccccggccggcgcgggtatggagcttgggggtcactgggacatgaactcggccccgaggctggtctcggagaccgcagagcggaaacaggagcagaagacaggaaccgaggcggaggctgccgactccggtgccgtcggagcccgccgcttcctgctctgtctctacttggtgggcttcttggatttgtttggtgtcagcatggttgtgcctttattgagccttcatgtcaagtcccttggagcaagtccaacagttgctggaatagtagacgacgtatgttcaaagagattttgagatttgagcactataaccaagtcccatgccactagtggcaacaggtacttatggagcctctgcaaggagctggctgtgtgtataaaagggctcctcctatggcattttgcaactcttttctagcacattggtgggctgctggagcgatgtagtgggaagacggtcttccttgctggcatgcattctactcagtgctctgggctatctccttctcggagcagccaccaatgtgtttctgtttgtcctggctagagtcccggcaggtatttttaaacacactctctccatctcaagggctctactttctgatgtggttccagagaaggaacggccgcttgtaatcggacacttcaacacagcctccggtgtgggcttcatcttgggccccgtggtcggtggctatctcactgaattagaggatgggttttatctcacagccttcatctgctttttggtcttcattctcaatgctggtctcgtttggttctttccatggagggaagcaaaaccgggcagtacagagaagggcctgccattgcgaaagacccatgtgctgttgggaaggagccatgacacagtgcaggaggcagccaccagccgcagagccagggccagcaagaagactgcccagccctgggtcgaagtagtgttggccttgcggaacatgaagaacctgctgttttccgaaatgtgggacatatttctggtgcgcttgctgatggccatggcagtcatgctgtactacagtaactttgtcctggccctggaggagcgctttggggtgcggcccaaggtgacaggctacctcatcagttacagcagcatgctgggggccgtggccggccttgccctggggccaatcctacggctgtacaagcacaactcgcaggcactgctgctgcattccagcatactcacctgcacactgctgctgctctactccttggcccccaccatgggtgcagttgtcctctcctccactctcctgtccttctccactgccattggcaggacgtgcatcacggacctccagctgactgtgggcggggcccaggccagcggcacccttattggcgtggggcagtctgtgactgcagtgggccgcatcatcgcccctctcctctcgggggttgcccaggaggtcagcccttgcggcccccccagcctgggcgctgtgttagccttagtggccattttcataatgtctctaaacaagcgacactctagtggtgatgggaatagtaaattaaaaagtgagtagatggatttggacaacataaagcaacaaaatttgagatggttgaatgagggccggaggccatgatgaaaagggcactttggaaagggttggggtggaagggaaatatttccgggtgggtgtgagctgttgggcttccaggtcagctcttggccatgcagccatgcctgcaggatgatcagaagtcacggcacctcatgggaaggttaagactggagcaaagcttttccaaggtgagcatattcagcgtttacctggaagtctcttcttcccacctgggctaatcaggttacaattttcaagggtaaacaaactaccagctacaggatagggaagtggtggtggaataagagaacatgatacctggaggaagggaagaaaccacaagcattttcctactgaaaaatagggtgacatgtcagtcaaattctgatcaactggaacttgagtttccagttaaattccatacactaggagggagttttctatcaaaatcctgcagattgaagaagctggtttattagaaccagcctgtcgcttttcaaagctgcttaaaaataagatactgacctcacccctagagatgattcagtgggcctgggtggggccaagaaatccgtggtgttttgtaagcactgctggcgatttctcatggcagtaaagaccacactgagactgcactgattttgattaaagtacataggcttggctgtttttacacagctaactaaatttggactcttaaaattgtgtttgtaatcacagtgtgttacacctttcccagctctcagcagttgtactgcatgatggagcagcgggcccctgggacctgttccctgtgctccctgcctctgagagcccagcttgctctgaagttggactaaaccacttagatgctggggttgccacagcctgctcctggaagcctgcattccagtcaggttgcatccttctggtgctgacagaacccagtggtgaagccaaagcacaggaatgctttaaaaatgaacagtttatgcagaataagggtcaggagtcatgccagaccagaacttgatgctactgtgtcttgtgttaagaatcatttcctggccaggctcggtggctcaggcctgtaatcccagcactttgggaggctgaggcaggtgaatcacttggtcaggagatggagaccattctggctaacatggtgaaaccccgtctctactaaaaatacaaaaaaaaaattagccgggcgtgatggcgggcgcctgcagtcccagctattcgggaggctgaggtagaatggcgtgaacctgggaggcggagcttgcggtgagccaagattgtgccactgctctccagcctgggcgacagagtgagactccgtctcaaaaaaaaaagaatcatttcctttatttttagtttcacgcctgcaaacacaagcattctgttgatcaacggaaatattttgatgtgccatttcttgtctaaacaagtttcatatacagcaccgagggggccacgagaggcagaggcccagacagaaggtgaacatagccttgcagggagacatatgccaggcaggatgaccattgggattgcatcaagtattaatcagttacttaagggcttcctgtcagacagttgaagttcacattccttttacttttcttaattagtccactaggatggtatgcctgttttcaacttaacacatgcatacttgtaaatattttagtatgctacagtaatttgtcatatctttaatatttattgtttgtaaagcagtaaacatttctgtattttagaagtcatggagtaaaatcaaatatttatgataaataattggaagtatgttttagtttgaagattgtcctttttcctatcttgctgcaaggaaaaatggacttctgattaggttttacaattgtgaacttttatgtaaatgttaagtgctttcgaggagaccaaactattattaatatataaaatggccttgcccttaaggagcaaattaaatctcatggagattagactcaaaaggcaataaataatcgagggtttatgcaatgaaatagaatttcagaagagtttggatctcaaagattgtccttcactctcagaaacaggcaagtttcttaaaagcccttatagtcgtgtttttattttaaaaatcgtagcactttatttttgaagtttaaaaagcccataaacttaatgagtctttataatcagacacatggaaatatagaaaaccaaagactgatcttagaatatagagtagagagacatgtttgttattctccactagtgactttagtattttgttatgtgatgttttttaggtgcaccttttctcatgactccttttactttatctaatgtcttcctctttaaagtgtgacccagagaccagtagcatcagcatcacctgagacctgtgaacactgaagctccagctcagacatgttggggaccattttaataagatacctagctgattttttgcacagcaaactttgaaaacccctggtctaaggggtagtatttgtatcacttatggaatataatctcagggaaattaaatctgctcaattgaca

SEQ ID NO: 315939 - DNA, 2564 bp, Homo sapiens
ggcagggagagggggcggaatcggggcggtcccgggagcgccccgccccctccgcctccgcagcgttgacagccgcccgccaccgagagatcagctgtcagagatcagaggaagaggaaggggcggagctgctttgcggccggccgcggagcagtcagccgactacagagaagggtaatcgggtgtccccggcgccgcccggggccctgagggctggctagggtccaggccgggggggacgggacagacgaaccagccccgtgtaggaagcgcgacaatgccccgctacggagcgtcactccgccagagctgccccaggtccggccgggagcagggacaagacgggaccgccggagcccccggactcctttggatgggcctggcgctggcgctggcgctggcgctggcgctggcgctggctctgtctgactctcgggttctctgggctccggcagaggctcaccctctttctccccaaggccatcctgccaggttacatcgcatagtgccccggctccgagatgtctttgggtgggggaacctcacctgcccaatctgcaaaggtctattcaccgccatcaacctcgggctgaagaaggaacccaatgtggctcgcgtgggctccgtggccatcaagctgtgcaatctgctgaagatagcaccacctgccgtgtgccaatccattgtccacctctttgaggatgacatggtggaggtgtggagacgctcagtgctgagcccatctgaggcctgtggcctgctcctgggctccacctgtgggcactgggacattttctcatcttggaacatctctttgcctactgtgccgaagccgccccccaaaccccctagccccccagccccaggtgcccctgtcagccgcatcctcttcctcactgacctgcactgggatcatgactacctggagggcacggaccctgactgtgcagacccactgtgctgccgccggggttctggcctgccgcccgcatcccggccaggtgccggatactggggcgaatacagcaagtgtgacctgcccctgaggaccctggagagcctgttgagtgggctgggcccagccggcccttttgatatggtgtactggacaggagacatccccgcacatgatgtctggcaccagactcgtcaggaccaactgcgggccctgaccaccgtcacagcacttgtgaggaagttcctggggccagtgccagtgtaccctgctgtgggtaaccatgaaagcacacctgtcaatagcttccctccccccttcattgagggcaaccactcctcccgctggctctatgaagcgatggccaaggcttgggagccctggctgcctgccgaagccctgcgcaccctcagaattggggggttctatgctctttccccataccccggtctccgcctcatctctctcaatatgaatttttgttcccgtgagaacttctggctcttgatcaactccacggatcccgcaggacagctccagtggctggtgggggagcttcaggctgctgaggatcgaggagacaaagtgcatataattggccacattcccccagggcactgtctgaagagctggagctggaattattaccgaattgtagccaggtatgagaacaccctggctgctcagttctttggccacactcatgtggatgaatttgaggtcttctatgatgaagagactctgagccggccgctggctgtagccttcctggcacccagtgcaactacctacatcggccttaatcctggttaccgtgtgtaccaaatagatggaaactactccgggagctctcacgtggtcctggaccatgagacctacatcctgaatctgacccaggcaaacataccgggagccataccgcactggcagcttctctacagggctcgagaaacctatgggctgcccaacacactgcctaccgcctggcacaacctggtatatcgcatgcggggcgacatgcaacttttccagaccttctggtttctctaccataagggccacccaccctcggagccctgtggcacgccctgccgtctggctactctttgtgcccagctctctgcccgtgctgacagccctgctctgtgccgccacctgatgccagatgggagcctcccagaggcccagagcctgtggccaaggccactgttttgctagggccccagggcccacatttgggaaagttcttgatgtaggaaagggtgaaaaagcccaaatgctgctgtggttcaaccaggcaagatcatccggtgaaagaaccagtccctgggccccaaggatgccggggaaacaggaccttctcctttcctggagctggtttagctggatatgggagggggtttggctgcctgtgcccaggagctagactgccttgaggctgctgtcctttcacagccatggagtagaggcctaagttgacactgccctgggcagacaagacaggagctgtcgccccaggcctgtgctgcccagccaggaaccctgtactgctgctgcgacctgatgctgccagtctgttaaaataaagataagagacttggactccaga

SEQ ID NO: 315940 - DNA, 2721 bp, Homo sapiens
ggcagggagagggggcggaatcggggcggtcccgggagcgccccgccccctccgcctccgcagcgttgacagccgcccgccaccgagagatcagctgtcagagatcagaggaagaggaaggggcggagctgctttgcggccggccgcggagcagtcagccgactacagagaagggtaatcgggtgtccccggcgccgcccggggccctgagggctggctagggtccaggccgggggggacgggacagacgaaccagccccgtgtaggaagcgcgacaatgccccgctacggagcgtcactccgccagagctgccccaggtccggccgggagcagggacaagacgggaccgccggagcccccggactcctttggatgggcctggcgctggcgctggcgctggcgctggcgctggcgctggctctgtctgactctcgggttctctgggctccggcagaggctcaccctctttctccccaaggccatcctgccaggttacatcgcatagtgccccggctccgagatgtctttgggtgggggaacctcacctgcccaatctgcaaaggtctattcaccgccatcaacctcgggctgaagaaggaacccaatgtggctcgcgtgggctccgtggccatcaagctgtgcaatctgctgaagatagcaccacctgccgtgtgccaatccattgtccacctctttgaggatgacatggtggaggtgtggagacgctcagtgctgagcccatctgaggcctgtggcctgctcctgggctccacctgtgggcactgggacattttctcatcttggaacatctctttgcctactgtgccgaagccgccccccaaaccccctagccccccagccccaggtgcccctgtcagccgcatcctcttcctcactgacctgcactgggatcatgactacctggagggcacggaccctgactgtgcagacccactgtgctgccgccggggttctggcctgccgcccgcatcccggccaggtgccggatactggggcgaatacagcaagtgtgacctgcccctgaggaccctggagagcctgttgagtgggctgggcccagccggcccttttgatatggtgtactggacaggagacatccccgcacatgatgtctggcaccagactcgtcaggaccaactgcgggccctgaccaccgtcacagcacttgtgaggaagttcctggggccagtgccagtgtaccctgctgtgggtaaccatgaaagcacacctgtcaatagcttccctccccccttcattgagggcaaccactcctcccgctggctctatgaagcgatggccaaggcttgggagccctggctgcctgccgaagccctgcgcaccctcagaattggggggttctatgctctttccccataccccggtctccgcctcatctctctcaatatgaatttttgttcccgtgagaacttctggctcttgatcaactccacggatcccgcaggacagctccagtggctggtgggggagcttcaggctgctgaggatcgaggagacaaagtgcatataattggccacattcccccagggcactgtctgaagagctggagctggaattattaccgaattgtagccaggtatgagaacaccctggctgctcagttctttggccacactcatgtggatgaatttgaggtcttctatgatgaagagactctgagccggccgctggctgtagccttcctggcacccagtgcaactacctacatcggccttaatcctggtgagtgaggcagaagggagcctcccttatcctggagttggtgggataggggaaggaggttggagccagagcctgcaaagcatgggcaggatgtgtggcccctccctggagttacccttgctccttgcccctccagtcagccccacatccttgcagggttaccgtgtgtaccaaatagatggaaactactccgggagctctcacgtggtcctggaccatgagacctacatcctgaatctgacccaggcaaacataccgggagccataccgcactggcagcttctctacagggctcgagaaacctatgggctgcccaacacactgcctaccgcctggcacaacctggtatatcgcatgcggggcgacatgcaacttttccagaccttctggtttctctaccataagggccacccaccctcggagccctgtggcacgccctgccgtctggctactctttgtgcccagctctctgcccgtgctgacagccctgctctgtgccgccacctgatgccagatgggagcctcccagaggcccagagcctgtggccaaggccactgttttgctagggccccagggcccacatttgggaaagttcttgatgtaggaaagggtgaaaaagcccaaatgctgctgtggttcaaccaggcaagatcatccggtgaaagaaccagtccctgggccccaaggatgccggggaaacaggaccttctcctttcctggagctggtttagctggatatgggagggggtttggctgcctgtgcccaggagctagactgccttgaggctgctgtcctttcacagccatggagtagaggcctaagttgacactgccctgggcagacaagacaggagctgtcgccccaggcctgtgctgcccagccaggaaccctgtactgctgctgcgacctgatgctgccagtctgttaaaataaagataagagacttggactccaga

SEQ ID NO: 315941 - DNA, 3100 bp, Homo sapiens
ggcagggagagggggcggaatcggggcggtcccgggagcgccccgccccctccgcctccgcagcgttgacagccgcccgccaccgagagatcagctgtcagagatcagaggaagaggaaggggcggagctgctttgcggccggccgcggagcagtcagccgactacagagaagggtaatcgggtgtccccggcgccgcccggggccctgagggctggctagggtccaggccgggggggacgggacagacgaaccagccccgtgtaggaagcgcgacaatgccccgctacggagcgtcactccgccagagctgccccaggtccggccgggagcagggacaagacgggaccgccggagcccccggactcctttggatgggcctggcgctggcgctggcgctggcgctggcgctggcgctggctctgtctgactctcgggttctctgggctccggcagaggctcaccctctttctccccaaggccatcctgccaggttacatcgcatagtgccccggctccgagatgtctttgggtgggggaacctcacctgcccaatctgcaaaggtctattcaccgccatcaacctcgggctgaagaaggaacccaatgtggctcgcgtgggctccgtggccatcaagctgtgcaatctgctgaagatagcaccacctgccgtgtgccaatccattgtccacctctttgaggatgacatggtggaggtgtggagacgctcagtgctgagcccatctgaggcctgtggcctgctcctgggctccacctgtgggcactgggacattttctcatcttggaacatctctttgcctactgtgccgaagccgccccccaaaccccctagccccccagccccaggtgcccctgtcagccgcatcctcttcctcactgacctgcactgggatcatgactacctggagggcacggaccctgactgtgcagacccactgtgctgccgccggggttctggcctgccgcccgcatcccggccaggtgccggatactggggcgaatacagcaagtgtgacctgcccctgaggaccctggagagcctgttgagtgggctgggcccagccggcccttttgatatggtgtactggacaggagacatccccgcacatgatgtctggcaccagactcgtcaggaccaactgcgggccctgaccaccgtcacagcacttgtgaggaagttcctggggccagtgccagtgtaccctgctgtgggtaaccatgaaagcacacctgtcaatagcttccctccccccttcattgagggcaaccactcctcccgctggctctatgaagcgatggccaaggcttgggagccctggctgcctgccgaagccctgcgcaccctcagaattggggggttctatgctctttccccataccccggtctccgcctcatctctctcaatatgaatttttgttcccgtgagaacttctggctcttgatcaactccacggatcccgcaggacagctccagtggctggtgggggagcttcaggctgctgaggatcgaggagacaaagtgcatataattggccacattcccccagggcactgtctgaagagctggagctggaattattaccgaattgtagccaggtatgagaacaccctggctgctcagttctttggccacactcatgtggatgaatttgaggtcttctatgatgaagagactctgagccggccgctggctgtagccttcctggcacccagtgcaactacctacatcggccttaatcctggttaccgtgtgtaccaaatagatggaaactactccgggagctctcacgtggtcctggaccatgagacctacatcctgaatctgacccaggcaaacataccgggagccataccgcactggcagcttctctacagggctcgagaaacctatgggctgcccaacacactgcctaccgcctggcacaacctggtatatcgcatgcggggcgacatgcaacttttccagaccttctggtttctctaccataagggccacccaccctcggagccctgtggcacgccctgccgtctggctactctttgtgcccagctctctgcccgtgctgacagccctgctctgtgccgccacctgatgccagatgggagcctcccagaggcccagagcctgtggccaaggccactgttttgctagggccccagggcccacatttgggaaagttcttgatgtaggaaagggtgaaaaagcccaaatgctgctgtggttcaaccaggcaagatcatccggtgaaagaaccagtccctgggccccaaggatgccggggaaacaggaccttctcctttcctggagctggtttagctggatatgggagggggtttggctgcctgtgcccaggagctagactgccttgaggctgctgtcctttcacagccatggagtagaggcctaagttgacactgccctgggcagacaagacaggagctgtcgccccaggcctgtgctgcccagccaggaaccctgtactgctgctgcgacctgatgctgccagtctgttaaaataaagataagagacttggactccagaaaaaaaaaaaaaaaaaaaaaaaaaaaaaaagggggggcgcgttaaaatttcccctcggaaaggggccccgaattttaacgccgttacccgcagtttttttgttccaagaggtggtcccctaataggtgaaggtcgatattatataaggcctgatgcacgatggcgacgccgtttaacactgtgcgatgaacggtgaaaaactcgtggctacctgggggaatctgtggagaagaggaaacctttaagtatcggggggggggtgggtgaaccaatagtttgggtgcaacagaaattttatctctataacaggagagaatttttaagaggggccctctatagggggggggtatagactttttataagaaattttttacacggtgtgttatatagtgtcggtgttttaagaatataggttaggacaatatttgtctattgggtgagttttggaatagagttttggggaatacacgaggagttatatgagtttatagtagacaaattttttattacaaggggagctaaggtgaaaataaga

SEQ ID NO: 315942 - DNA, 2418 bp, Homo sapiens
ggcagggagagggggcggaatcggggcggtcccgggagcgccccgccccctccgcctccgcagcgttgacagccgcccgccaccgagagatcagctgtcagagatcagaggaagaggaaggggcggagctgctttgcggccggccgcggagcagtcagccgactacagagaagggtaatcgggtgtccccggcgccgcccggggccctgagggctggctagggtccaggccgggggggacgggacagacgaaccagccccgtgtaggaagcgcgacaatgccccgctacggagcgtcactccgccagagctgccccaggtccggccgggagcagggacaagacgggaccgccggagcccccggactcctttggatgggcctggcgctggcgctggcgctggcgctggcgctggcgctggctctgtctgactctcgggttctctgggctccggcagaggctcaccctctttctccccaaggccatcctgccaggttacatcgcatagtgccccggctccgagatgtctttgggtgggggaacctcacctgcccaatctgcaaaggtctattcaccgccatcaacctcgggctgaagaaggaacccaatgtggctcgcgtgggctccgtggccatcaagctgtgcaatctgctgaagatagcaccacctgccgtgtgccaatccattgtccacctctttgaggatgacatggtggaggtgtggagacgctcagtgctgagcccatctgaggcctgtggcctgctcctgggctccacctgtgggcactgggacattttctcatcttggaacatctctttgcctactgtgccgaagccgccccccaaaccccctagccccccagccccaggtgcccctgtcagccgcatcctcttcctcactgacctgcactgggatcatgactacctggagggcacggaccctgactgtgcagacccactgtgctgccgccggggttctggcctgccgcccgcatcccggccaggtgccggatactggggcgaatacagcaagtgtgacctgcccctgaggaccctggagagcctgttgagtgggctgggcccagccggcccttttgatatggtgtactggacaggagacatccccgcacatgatgtctggcaccagactcgtcaggaccaactgcgggccctgaccaccgtcacagcacttgtgaggaagttcctggggccagtgccagtgtaccctgctgtgggtaaccatgaaagcacacctgtcaatagcttccctccccccttcattgagggcaaccactcctcccgctggctctatgaagcgatggccaaggcttgggagccctggctgcctgccgaagccctgcgcaccctcagaattggggggttctatgctctttccccataccccggtctccgcctcatctctctcaatatgaatttttgttcccgtgagaacttctggctcttgatcaactccacggatcccgcaggacagctccagtggctggtgggggagcttcaggctgctgaggatcgaggagacaaagtgcatataattggccacattcccccagggcactgtctgaagagctggagctggaattattaccgaattgtagccaggttaccgtgtgtaccaaatagatggaaactactccgggagctctcacgtggtcctggaccatgagacctacatcctgaatctgacccaggcaaacataccgggagccataccgcactggcagcttctctacagggctcgagaaacctatgggctgcccaacacactgcctaccgcctggcacaacctggtatatcgcatgcggggcgacatgcaacttttccagaccttctggtttctctaccataagggccacccaccctcggagccctgtggcacgccctgccgtctggctactctttgtgcccagctctctgcccgtgctgacagccctgctctgtgccgccacctgatgccagatgggagcctcccagaggcccagagcctgtggccaaggccactgttttgctagggccccagggcccacatttgggaaagttcttgatgtaggaaagggtgaaaaagcccaaatgctgctgtggttcaaccaggcaagatcatccggtgaaagaaccagtccctgggccccaaggatgccggggaaacaggaccttctcctttcctggagctggtttagctggatatgggagggggtttggctgcctgtgcccaggagctagactgccttgaggctgctgtcctttcacagccatggagtagaggcctaagttgacactgccctgggcagacaagacaggagctgtcgccccaggcctgtgctgcccagccaggaaccctgtactgctgctgcgacctgatgctgccagtctgttaaaataaagataagagacttggactccaga

SEQ ID NO: 315943 - DNA, 1476 bp, Homo sapiens
  misc_feature (98)..(98): n is a, c, g, or t
  misc_feature (127)..(127): n is a, c, g, or t
cctatgatggcctgctgggtaataatcagatctttcccaagacaggccttctgataatcgtcctgggcacaattgcaatggagggcgacacgcctctnaggaggaaatctgggaggagctgggtgtnatgggggtgtatgatggtgtactggacaggagacatccccgcacatgatgtctggcaccagactcgtcaggaccaactgcgggccctgaccaccgtcacagcacttgtgaggaagttcctggggccagtgccagtgtaccctgctgtgggtaaccatgaaagcacacctgtcaatagcttccctccccccttcattgagggcaaccactcctcccgctggctctatgaagcgatggccaaggcttgggagccctggctgcctgccgaagccctgcgcaccctcaggtacttatcgtccgtggaaacccaggaagggaaaagaaaggtgcatataattggccacattcccccagggcactgtctgaagagctggagctggaattattaccgaattgtagccaggtatgagaacaccctggctgctcagttctttggccacactcatgtggatgaatttgaggtcttctatgatgaagagactctgagccggccgctggctgtagccttcctggcacccagtgcaactacctacatcggccttaatcctggttaccgtgtgtaccaaatagatggaaactactccgggagctctcacgtggtcctggaccatgagacctacatcctgaatctgacccaggcaaacataccgggagccataccgcactggcagcttctctacagggctcgagaaacctatgggctgcccaacacactgcctaccgcctggcacaacctggtatatcgcatgcggggcgacatgcaacttttccagaccttctggtttctctaccataagggccacccaccctcggagccctgtggcacgccctgccgtctggctactctttgtgcccagctctctgcccgtgctgacagccctgctctgtgccgccacctgatgccagatgggagcctcccagaggcccagagcctgtggccaaggccactgttttgctagggccccagggcccacatttgggaaagttcttgatgtaggaaagggtgaaaaagcccaaatgctgctgtggttcaaccaggcaagatcatccggtgaaagaaccagtccctgggccccaaggatgccggggaaacaggaccttctcctttcctggagctggtttagctggatatgggagggggtttggctgcctgtgcccaggagctagactgccttgaggctgctgtcctttcacagccatggagtagaggcctaagttgacactgccctgggcagacaagacaggagctgtcgccccaggcctgtgctgcccagccaggaaccctgtactgctgctgcgacctgatgctgccagtctgttaaaataaagataagagacttggactccaga

SEQ ID NO: 315944 - DNA, 1280 bp, Homo sapiens
tggtcactgttgaaagccttcattcagtccccctttctctagccagggctgcctggacccctggatgccctgattaccatccttaattctccctactaggtgcatataattggccacattcccccagggcactgtctgaagagctggagctggaattattaccgaattgtagccaggtatgagaacaccctggctgctcagttctttggccacactcatgtggatgaatttgaggtcttctatgatgaagagactctgagccggccgctggctgtagccttcctggcacccagtgcaactacctacatcggccttaatcctggtgagtgaggcagaagggagcctcccttatcctggagttggtgggataggggaaggaggttggagccagagcctgcaaagcatgggcaggatgtgtggcccctccctggagttacccttgctccttgcccctccagtcagccccacatccttgcagggttaccgtgtgtaccaaatagatggaaactactccgggagctctcacgtggtcctggaccatgagacctacatcctgaatctgacccaggcaaacataccgggagccataccgcactggcagcttctctacagggctcgagaaacctatgggctgcccaacacactgcctaccgcctggcacaacctggtatatcgcatgcggggcgacatgcaacttttccagaccttctggtttctctaccataagggccacccaccctcggagccctgtggcacgccctgccgtctggctactctttgtgcccagctctctgcccgtgctgacagccctgctctgtgccgccacctgatgccagatgggagcctcccagaggcccagagcctgtggccaaggccactgttttgctagggccccagggcccacatttgggaaagttcttgatgtaggaaagggtgaaaaagcccaaatgctgctgtggttcaaccaggcaagatcatccggtgaaagaaccagtccctgggccccaaggatgccggggaaacaggaccttctcctttcctggagctggtttagctggatatgggagggggtttggctgcctgtgcccaggagctagactgccttgaggctgctgtcctttcacagccatggagtagaggcctaagttgacactgccctgggcagacaagacaggagctgtcgccccaggcctgtgctgcccagccaggaaccctgtactgctgctgcgacctgatgctgccagtctgttaaaataaagataagagacttggactccaga

SEQ ID NO: 315945 - DNA, 1245 bp, Homo sapiens
ttgagcatctcaccatccctgttgtcccatggagtggggaggctcctcactagaacaggttggagaaagagggcatcctatctccccagatgtcttcctacccctccctagaatcttctgaatgtagtaccttctggccaggtatgagaacaccctggctgctcagttctttggccacactcatgtggatgaatttgaggtcttctatgatgaagagactctgagccggccgctggctgtagccttcctggcacccagtgcaactacctacatcggccttaatcctggtgagtgaggcagaagggagcctcccttatcctggagttggtgggataggggaaggaggttggagccagagcctgcaaagcatgggcaggatgtgtggcccctccctggagttacccttgctccttgcccctccagtcagccccacatccttgcagggttaccgtgtgtaccaaatagatggaaactactccgggagctctcacgtggtcctggaccatgagacctacatcctgaatctgacccaggcaaacataccgggagccataccgcactggcagcttctctacagggctcgagaaacctatgggctgcccaacacactgcctaccgcctggcacaacctggtatatcgcatgcggggcgacatgcaacttttccagaccttctggtttctctaccataagggccacccaccctcggagccctgtggcacgccctgccgtctggctactctttgtgcccagctctctgcccgtgctgacagccctgctctgtgccgccacctgatgccagatgggagcctcccagaggcccagagcctgtggccaaggccactgttttgctagggccccagggcccacatttgggaaagttcttgatgtaggaaagggtgaaaaagcccaaatgctgctgtggttcaaccaggcaagatcatccggtgaaagaaccagtccctgggccccaaggatgccggggaaacaggaccttctcctttcctggagctggtttagctggatatgggagggggtttggctgcctgtgcccaggagctagactgccttgaggctgctgtcctttcacagccatggagtagaggcctaagttgacactgccctgggcagacaagacaggagctgtcgccccaggcctgtgctgcccagccaggaaccctgtactgctgctgcgacctgatgctgccagtctgttaaaataaagataagagacttggactccaga

SEQ ID NO: 315946 - DNA, 1041 bp, Homo sapiens
gtaagcagtcgggtagtgtctgcaggtgggaccgaagaacggtggcggtgatatcaaaggatgctctttcgaacagtgttgcatcttccgtcagtagatgttagtactgcagagatgatgccagaaaatcttaggaaaaatttaactgaattgcttagagcagctttaaaaattagaatatgcctagaaaagcagcctgacccttttgcaccaagacaaaagaaaacactgcaggaggttcaggaagattttgtgttttcaaagtatcgtcatagagcccttcttttacctgagttgcgagctgcctgtgcccaggagctagactgccttgaggctgctgtcctttcacagccatggagtagaggcctaagttgacactgccctgggcagacaagacaggagctgtcgccccaggcctgtgctgcccagccaggaaccctgtactgctgctgcgacctgatgctgccagtctgttaaaataaagataagagacttggactccagaaaaaaaaaaaaaaaaaaaaaaaaaaaaaaagggggggcgcgttaaaatttcccctcggaaaggggccccgaattttaacgccgttacccgcagtttttttgttccaagaggtggtcccctaataggtgaaggtcgatattatataaggcctgatgcacgatggcgacgccgtttaacactgtgcgatgaacggtgaaaaactcgtggctacctgggggaatctgtggagaagaggaaacctttaagtatcggggggggggtgggtgaaccaatagtttgggtgcaacagaaattttatctctataacaggagagaatttttaagaggggccctctatagggggggggtatagactttttataagaaattttttacacggtgtgttatatagtgtcggtgttttaagaatataggttaggacaatatttgtctattgggtgagttttggaatagagttttggggaatacacgaggagttatatgagtttatagtagacaaattttttattacaaggggagctaaggtgaaaataaga

SEQ ID NO: 315947 - DNA, 2432 bp, Homo sapiens
ggcagggagagggggcggaatcggggcggtcccgggagcgccccgccccctccgcctccgcagcgttgacagccgcccgccaccgagagatcagctgtcagagatcagaggaagaggaaggggcggagctgctttgcggccggccgcggagcagtcagccgactacagagaagggtaatcgggtgtccccggcgccgcccggggccctgagggctggctagggtccaggccgggggggacgggacagacgaaccagccccgtgtaggaagcgcgacaatgccccgctacggagcgtcactccgccagagctgccccaggtccggccgggagcagggacaagacgggaccgccggagcccccggactcctttggatgggcctggcgctggcgctggcgctggcgctggcgctggcgctggctctgtctgactctcgggttctctgggctccggcagaggctcaccctctttctccccaaggccatcctgccaggttacatcgcatagtgccccggctccgagatgtctttgggtgggggaacctcacctgcccaatctgcaaaggtctattcaccgccatcaacctcgggctgaagaaggaacccaatgtggctcgcgtgggctccgtggccatcaagctgtgcaatctgctgaagatagcaccacctgccgtgtgccaatccattgtccacctctttgaggatgacatggtggaggtgtggagacgctcagtgctgagcccatctgaggcctgtggcctgctcctgggctccacctgtgggcactgggacattttctcatcttggaacatctctttgcctactgtgccgaagccgccccccaaaccccctagccccccagccccaggtgcccctgtcagccgcatcctcttcctcactgacctgcactgggatcatgactacctggagggcacggaccctgactgtgcagacccactgtgctgccgccggggttctggcctgccgcccgcatcccggccaggtgccggatactggggcgaatacagcaagtgtgacctgcccctgaggaccctggagagcctgttgagtgggctgggcccagccggcccttttgatatggtgtactggacaggagacatccccgcacatgatgtctggcaccagactcgtcaggaccaactgcgggccctgaccaccgtcacagcacttgtgaggaagttcctggggccagtgccagtgtaccctgctgtgggtaaccatgaaagcacacctgtcaatagcttccctccccccttcattgagggcaaccactcctcccgctggctctatgaagcgatggccaaggcttgggagccctggctgcctgccgaagccctgcgcaccctcaggtacttatcgtccgtggaaacccaggaagggaaaagaaaggtgcatataattggccacattcccccagggcactgtctgaagagctggagctggaattattaccgaattgtagccaggtatgagaacaccctggctgctcagttctttggccacactcatgtggatgaatttgaggtcttctatgatgaagagactctgagccggccgctggctgtagccttcctggcacccagtgcaactacctacatcggccttaatcctggttaccgtgtgtaccaaatagatggaaactactccgggagctctcacgtggtcctggaccatgagacctacatcctgaatctgacccaggcaaacataccgggagccataccgcactggcagcttctctacagggctcgagaaacctatgggctgcccaacacactgcctaccgcctggcacaacctggtatatcgcatgcggggcgacatgcaacttttccagaccttctggtttctctaccataagggccacccaccctcggagccctgtggcacgccctgccgtctggctactctttgtgcccagctctctgcccgtgctgacagccctgctctgtgccgccacctgatgccagatgggagcctcccagaggcccagagcctgtggccaaggccactgttttgctagggccccagggcccacatttgggaaagttcttgatgtaggaaagggtgaaaaagcccaaatgctgctgtggttcaaccaggcaagatcatccggtgaaagaaccagtccctgggccccaaggatgccggggaaacaggaccttctcctttcctggagctggtttagctggatatgggagggggtttggctgcctgtgcccaggagctagactgccttgaggctgctgtcctttcacagccatggagtagaggcctaagttgacactgccctgggcagacaagacaggagctgtcgccccaggcctgtgctgcccagccaggaaccctgtactgctgctgcgacctgatgctgccagtctgttaaaataaagataagagacttggactccaga

SEQ ID NO: 315948 - DNA, 2604 bp, Homo sapiens
ggcagggagagggggcggaatcggggcggtcccgggagcgccccgccccctccgcctccgcagcgttgacagccgcccgccaccgagagatcagctgtcagagatcagaggaagaggaaggggcggagctgctttgcggccggccgcggagcagtcagccgactacagagaagggtaatcgggtgtccccggcgccgcccggggccctgagggctggctagggtccaggccgggggggacgggacagacgaaccagccccgtgtaggaagcgcgacaatgccccgctacggagcgtcactccgccagagctgccccaggtccggccgggagcagggacaagacgggaccgccggagcccccggactcctttggatgggcctggcgctggcgctggcgctggcgctggcgctggcgctggctctgtctgactctcgggttctctgggctccggcagaggctcaccctctttctccccaaggccatcctgccaggttacatcgcatagtgccccggctccgagatgtctttgggtgggggaacctcacctgcccaatctgcaaaggtctattcaccgccatcaacctcgggctgaagaaggaacccaatgtggctcgcgtgggctccgtggccatcaagctgtgcaatctgctgaagatagcaccacctgccgtgtgccaatccattgtccacctctttgaggatgacatggtggaggtgtggagacgctcagtgctgagcccatctgaggcctgtggcctgctcctgggctccacctgtgggcactgggacattttctcatcttggaacatctctttgcctactgtgccgaagccgccccccaaaccccctagccccccagccccaggtgcccctgtcagccgcatcctcttcctcactgacctgcactgggatcatgactacctggagggcacggaccctgactgtgcagacccactgtgctgccgccggggttctggcctgccgcccgcatcccggccaggtgccggatactggggcgaatacagcaagtgtgacctgcccctgaggaccctggagagcctgttgagtgggctgggcccagccggcccttttgatatggtgtactggacaggagacatccccgcacatgatgtctggcaccagactcgtcaggaccaactgcgggccctgaccaccgtcacagcacttgtgaggaagttcctggggccagtgccagtgtaccctgctgtgggtaaccatgaaagcacacctgtcaatagcttccctccccccttcattgagggcaaccactcctcccgctggctctatgaagcgatggccaaggcttgggagccctggctgcctgccgaagccctgcgcaccctcaggtacttatcgtccgtggaaacccaggaagggaaaagaaagaattggggggttctatgctctttccccataccccggtctccgcctcatctctctcaatatgaatttttgttcccgtgagaacttctggctcttgatcaactccacggatcccgcaggacagctccagtggctggtgggggagcttcaggctgctgaggatcgaggagacaaagtgcatataattggccacattcccccagggcactgtctgaagagctggagctggaattattaccgaattgtagccaggtatgagaacaccctggctgctcagttctttggccacactcatgtggatgaatttgaggtcttctatgatgaagagactctgagccggccgctggctgtagccttcctggcacccagtgcaactacctacatcggccttaatcctggttaccgtgtgtaccaaatagatggaaactactccgggagctctcacgtggtcctggaccatgagacctacatcctgaatctgacccaggcaaacataccgggagccataccgcactggcagcttctctacagggctcgagaaacctatgggctgcccaacacactgcctaccgcctggcacaacctggtatatcgcatgcggggcgacatgcaacttttccagaccttctggtttctctaccataagggccacccaccctcggagccctgtggcacgccctgccgtctggctactctttgtgcccagctctctgcccgtgctgacagccctgctctgtgccgccacctgatgccagatgggagcctcccagaggcccagagcctgtggccaaggccactgttttgctagggccccagggcccacatttgggaaagttcttgatgtaggaaagggtgaaaaagcccaaatgctgctgtggttcaaccaggcaagatcatccggtgaaagaaccagtccctgggccccaaggatgccggggaaacaggaccttctcctttcctggagctggtttagctggatatgggagggggtttggctgcctgtgcccaggagctagactgccttgaggctgctgtcctttcacagccatggagtagaggcctaagttgacactgccctgggcagacaagacaggagctgtcgccccaggcctgtgctgcccagccaggaaccctgtactgctgctgcgacctgatgctgccagtctgttaaaataaagataagagacttggactccaga

SEQ ID NO: 315949 - DNA, 1608 bp, Homo sapiens
  misc_feature (98)..(98): n is a, c, g, or t
  misc_feature (127)..(127): n is a, c, g, or t
cctatgatggcctgctgggtaataatcagatctttcccaagacaggccttctgataatcgtcctgggcacaattgcaatggagggcgacacgcctctnaggaggaaatctgggaggagctgggtgtnatgggggtgtatgatggtgtactggacaggagacatccccgcacatgatgtctggcaccagactcgtcaggaccaactgcgggccctgaccaccgtcacagcacttgtgaggaagttcctggggccagtgccagtgtaccctgctgtgggtaaccatgaaagcacacctgtcaatagcttccctccccccttcattgagggcaaccactcctcccgctggctctatgaagcgatggccaaggcttgggagccctggctgcctgccgaagccctgcgcaccctcagaattggggggttctatgctctttccccataccccggtctccgcctcatctctctcaatatgaatttttgttcccgtgagaacttctggctcttgatcaactccacggatcccgcaggacagctccagtggctggtgggggagcttcaggctgctgaggatcgaggagacaaagtgcatataattggccacattcccccagggcactgtctgaagagctggagctggaattattaccgaattgtagccaggtatgagaacaccctggctgctcagttctttggccacactcatgtggatgaatttgaggtcttctatgatgaagagactctgagccggccgctggctgtagccttcctggcacccagtgcaactacctacatcggccttaatcctggttaccgtgtgtaccaaatagatggaaactactccgggagctctcacgtggtcctggaccatgagacctacatcctgaatctgacccaggcaaacataccgggagccataccgcactggcagcttctctacagggctcgagaaacctatgggctgcccaacacactgcctaccgcctggcacaacctggtatatcgcatgcggggcgacatgcaacttttccagaccttctggtttctctaccataagggccacccaccctcggagccctgtggcacgccctgccgtctggctactctttgtgcccagctctctgcccgtgctgacagccctgctctgtgccgccacctgatgccagatgggagcctcccagaggcccagagcctgtggccaaggccactgttttgctagggccccagggcccacatttgggaaagttcttgatgtaggaaagggtgaaaaagcccaaatgctgctgtggttcaaccaggcaagatcatccggtgaaagaaccagtccctgggccccaaggatgccggggaaacaggaccttctcctttcctggagctggtttagctggatatgggagggggtttggctgcctgtgcccaggagctagactgccttgaggctgctgtcctttcacagccatggagtagaggcctaagttgacactgccctgggcagacaagacaggagctgtcgccccaggcctgtgctgcccagccaggaaccctgtactgctgctgcgacctgatgctgccagtctgttaaaataaagataagagacttggactccaga

SEQ ID NO: 315950 - DNA, 1347 bp, Homo sapiens
gtagagaagctgccagtgcggtatggctcccggtatgtttgcctgggtcagattcaggatgtaggtctcatggtccaggaccacgtgagagctcctggagtagtttccatctatttggtacacacggtaaccaggattaaggccgatgtaggtagttgcactgggtgccaggaaggctacagccagcggccggctcagagtctctcaatatgaatttttgttcccgtgagaacttctggctcttgatcaactccacggatcccgcaggacagctccagtggctggtgggggagcttcaggctgctgaggatcgaggagacaaagtgcatataattggccacattcccccagggcactgtctgaagagctggagctggaattattaccgaattgtagccaggtatgagaacaccctggctgctcagttctttggccacactcatgtggatgaatttgaggtcttctatgatgaagagactctgagccggccgctggctgtagccttcctggcacccagtgcaactacctacatcggccttaatcctggttaccgtgtgtaccaaatagatggaaactactccgggagctctcacgtggtcctggaccatgagacctacatcctgaatctgacccaggcaaacataccgggagccataccgcactggcagcttctctacagggctcgagaaacctatgggctgcccaacacactgcctaccgcctggcacaacctggtatatcgcatgcggggcgacatgcaacttttccagaccttctggtttctctaccataagggccacccaccctcggagccctgtggcacgccctgccgtctggctactctttgtgcccagctctctgcccgtgctgacagccctgctctgtgccgccacctgatgccagatgggagcctcccagaggcccagagcctgtggccaaggccactgttttgctagggccccagggcccacatttgggaaagttcttgatgtaggaaagggtgaaaaagcccaaatgctgctgtggttcaaccaggcaagatcatccggtgaaagaaccagtccctgggccccaaggatgccggggaaacaggaccttctcctttcctggagctggtttagctggatatgggagggggtttggctgcctgtgcccaggagctagactgccttgaggctgctgtcctttcacagccatggagtagaggcctaagttgacactgccctgggcagacaagacaggagctgtcgccccaggcctgtgctgcccagccaggaaccctgtactgctgctgcgacctgatgctgccagtctgttaaaataaagataagagacttggactccaga

SEQ ID NO: 315951 - DNA, 1037 bp, Homo sapiens
gcgcgcgggaggagggagccgggaggagggggcggggccgcgccgcccgcgccgcgctgggcgctctcggccaatgagcggcgtccacatgccgcggcggcggcgaaaggggaggcagcggccgataaatgctattagagcagccgccgcggagccgtccccgacgccacctccttttccttcgccgcagtttcctccgccgctgtcgggcgtgcggcgctgagggacccgggcgagcgcgccgcgcaccgccccgccggctcgcctccctcgccgcgttccgccctcagtggtctgccgggcgccccctcctccggcccgggcggggcctctgatcgcctcaagagagcggggagggggctcgggggccgcggcctgccctcccggcgggcggctgagggcgagggaggccctcccttctggcgaggggagggagggtgggtcaggagcccccaacccgccctgcggagctcggggccgcgcgaggggcggttgtctgggggagggggcgcggggtgattcagcgcccggcgaggcggaagcggccgcaagaggaggaggggagagcccgtccgcgcctgggctcccggggtggcacgagcccgcggccggagtgcgaggcggaggcgaggaggccgcggggacgggaggcgaggccggccgggcccccgaagccatggagaacgcgcacaccaagacggtggaggaggtgctgggccacttcggcgtcaacgagagtacggggctgagcctggaacaggtcaagaagcttaaggagagatggggctccaacgagttaccggctgaagaaggaaaaaccttgctggaacttgtgattgagcagtttgaagacttgctagttaggattttattactggcagcatgtatatcttttgtaagtataaaaaaatttattttctttccccccaaaagctgaaagtattccatagataaatcagaaaacaaatgatgtccattgggtgaaaacatatttggagttgcaagctgtgtctctatgtttaaaaacaatctgggca

SEQ ID NO: 315952 - DNA, 1073 bp, Homo sapiens
gcgcgcgggaggagggagccgggaggagggggcggggccgcgccgcccgcgccgcgctgggcgctctcggccaatgagcggcgtccacatgccgcggcggcggcgaaaggggaggcagcggccgataaatgctattagagcagccgccgcggagccgtccccgacgccacctccttttccttcgccgcagtttcctccgccgctgtcgggcgtgcggcgctgagggacccgggcgagcgcgccgcgcaccgccccgccggctcgcctccctcgccgcgttccgccctcagtggtctgccgggcgccccctcctccggcccgggcggggcctctgatcgcctcaagagagcggggagggggctcgggggccgcggcctgccctcccggcgggcggctgagggcgagggaggccctcccttctggcgaggggagggagggtgggtcaggagcccccaacccgccctgcggagctcggggccgcgcgaggggcggttgtctgggggagggggcgcggggtgattcagcgcccggcgaggcggaagcggccgcaagaggaggaggggagagcccgtccgcgcctgggctcccggggtggcacgagcccgcggccggagtgcgaggcggaggcgaggaggccgcggggacgggaggcgaggccggccgggcccccgaagccatggagaacgcgcacaccaagacggtggaggaggtgctgggccacttcggcgtcaacgagagtacggggctgagcctggaacaggtcaagaagcttaaggagagatggggctccaacgagttaccggctgaagagcgctccgctgcaggggcccggcgcggccgggagagccagggaagatggctgaccgggctccacctcgtgggcttcggctccgcgcccgccgacagctgcgggcggagggtcgggccagcgcgccggccccgcgggagagaaaggggctgcggtcctcgcctcgccttccctggacctcttcgcttctcgggccctcgaccttttcggcgcgcaaggctcggaggcttctctccagcagcagccggccccggtggagggaggg

SEQ ID NO: 315953 - DNA, 723 bp, Homo sapiens
gcgcgcgggaggagggagccgggaggagggggcggggccgcgccgcccgcgccgcgctgggcgctctcggccaatgagcggcgtccacatgccgcggcggcggcgaaaggggaggcagcggccgataaatgctattagagcagccgccgcggagccgtccccgacgccacctccttttccttcgccgcagtttcctccgccgctgtcgggcgtgcggcgctgagggacccgggcgagcgcgccgcgcaccgccccgccggctcgcctccctcgccgcgttccgccctcagtggtctgccgggcgccccctcctccggcccgggcggggcctctgatcgcctcaagagagcggggagggggctcgggggccgcggcctgccctcccggcgggcggctgagggcgagggaggccctcccttctggcgaggggagggagggtgggtcaggagcccccaacccgccctgcggagctcggggccgcgcgaggggcggttgtctgggggagggggcgcggggtgattcagcgcccggcgaggcggaagcggccgcaagaggaggaggggagagcccgtccgcgcctgggctcccggggtggcacgagcccgcggccggagtgcgaggcggaggcgaggaggccgcggggacgggaggcgaggccggccgggcccccgaagccatggagaacgcgcacaccaagactttttcaaaaaaaacctcgtgccg

SEQ ID NO: 315954 - DNA, 704 bp, Homo sapiens
tgacctcaggtgatcgcctgccttggcctcccaaagtgctgggattacaggcctgagccaccatgctcggccagtgctagccactttttaaaaaagtgacattaagcctaaaaagacacattctaacgtgccatttctcttctaggttttggcttggtttgaagaaggtgaagaaacaattacagcctttgtagaaccttttgtaattttactcatattagtagccaatgcaattgtgggtgtatggcaggtaagcaaaaattcctgtactgcaaaatttcaataagttatgtaagtgattagggctgtattaatctttctgttatctgtttttcctgatgtgttgagtaaaaatatgtttgcgggaagtttacatgtattttccctttattccataaattaattgttttctgacacagtctcactctgttgcccaggctggagtgcaatggtgttgtctcggctcactgcaacctcttcctcccaggttcaagtggttctcgtgcctcagcctcccaagtagctgggactacaggcacgcaccaccacgcccagctcatttttgtattttttggtaagagacagggtttcaccatgttggccaggctggtcttgagctcctgacctcaagtgatccgccctcctcagcctcccaaagtgctgggattacagacgtgagccaccatgcccggcctattaattta

SEQ ID NO: 315955 - DNA, 636 bp, Homo sapiens
gacagtactgctgatgctgagtgagcctcagtgagttttattaaagttgttttcgtaaatgaaagaggttgtttgcctttgtcctaagctaacaaaggtagtttatttgtgtagcattttttaaaaatcccttttaaatactctgatgcgctctccccctacagatgttcattctggacagagtggaaggtgatacttgttcccttaatgagtttaccataactggatcaacttatgcacctattggagaagtgcataaagatgataaaccagtgaattgtcaccagtatgatggtctggtagaattagcaacaatttgtgctctttgtaatgactctgctttggattacaatgaggcaaagggtgtgtatgaaaaagttggagaagctacagagactgctctcacttgcctagtagagaagatgaatgtatttgataccgaattgaagggtctttctaaaatagaacgtgcaaatgcctgcaactcagtgagtatttgaacctggtttattgttcatgctgcttatcagtcgtactatatatacttagtgtctgcactgtcctactctcttagaaaactaattataccttatctcctcaaacttacagtatttccttccccatattcactctcag

SEQ ID NO: 315956 - DNA, 531 bp, Homo sapiens
aggatcacaggacagttcttcccttcccaaaagaaaggagaacaggcaataccagttttaaaagcatgagctgtcgtcacctccaggaagtagtgggagtgcttagccctgtgtttcttaggagctcttccttaaaagaaaccgtgggggccaaaaataggaactttggtacccctgtatgccagcacccacagggaaggaacctcaccctttcacacagacaaatggtaccatccagttaagcccgtgacaaaaatggaaatttctaaatagcccaagtctccagggcaattgggaacagctttgaacccactaagatggggtctgctatgccaaaacatagatacagaattcacagtttgtcctgcattaggacattctcttcaactttgccactgtagaaagtggaggtaggtcagcggatggtgccacattaacagccgccttactgaagtgtagtccaacagggtccatctgcctgtccatgtcgctccactttctacctggcgggatcctctagatcacccagca

SEQ ID NO: 315957 - DNA, 8431 bp, Homo sapiens
gcgcgcgggaggagggagccgggaggagggggcggggccgcgccgcccgcgccgcgctgggcgctctcggccaatgagcggcgtccacatgccgcggcggcggcgaaaggggaggcagcggccgataaatgctattagagcagccgccgcggagccgtccccgacgccacctccttttccttcgccgcagtttcctccgccgctgtcgggcgtgcggcgctgagggacccgggcgagcgcgccgcgcaccgccccgccggctcgcctccctcgccgcgttccgccctcagtggtctgccgggcgccccctcctccggcccgggcggggcctctgatcgcctcaagagagcggggagggggctcgggggccgcggcctgccctcccggcgggcggctgagggcgagggaggccctcccttctggcgaggggagggagggtgggtcaggagcccccaacccgccctgcggagctcggggccgcgcgaggggcggttgtctgggggagggggcgcggggtgattcagcgcccggcgaggcggaagcggccgcaagaggaggaggggagagcccgtccgcgcctgggctcccggggtggcacgagcccgcggccggagtgcgaggcggaggcgaggaggccgcggggacgggaggcgaggccggccgggcccccgaagccatggagaacgcgcacaccaagacggtggaggaggtgctgggccacttcggcgtcaacgagagtacggggctgagcctggaacaggtcaagaagcttaaggagagatggggctccaacgagttaccggctgaagaaggaaaaaccttgctggaacttgtgattgagcagtttgaagacttgctagttaggattttattactggcagcatgtatatcttttgttttggcttggtttgaagaaggtgaagaaacaattacagcctttgtagaaccttttgtaattttactcatattagtagccaatgcaattgtgggtgtatggcaggaaagaaatgctgaaaatgccatcgaagcccttaaggaatatgagcctgaaatgggcaaagtgtatcgacaggacagaaagagtgtgcagcggattaaagctaaagacatagttcctggtgatattgtagaaattgctgttggtgacaaagttcctgctgatataaggttaacttccatcaaatctaccacactaagagttgaccagtcaattctcacaggtgaatctgtctctgtcatcaagcacactgatcccgtccctgacccacgagctgtcaaccaagataaaaagaacatgctgttttctggtacaaacattgctgctgggaaagctatgggagtggtggtagcaactggagttaacaccgaaattggcaagatccgggatgaaatggtggcaacagaacaggagagaacaccccttcagcaaaaactagatgaatttggggaacagctttccaaagtcatctcccttatttgcattgcagtctggatcataaatattgggcacttcaatgacccggttcatggagggtcctggatcagaggtgctatttactactttaaaattgcagtggccctggctgtagcagccattcctgaaggtctgcctgcagtcatcaccacctgcctggctcttggaactcgcagaatggcaaagaaaaatgccattgttcgaagcctcccgtctgtggaaacccttggttgtacttctgttatctgctcagacaagactggtacacttacaacaaaccagatgtcagtctgcaggatgttcattctggacagagtggaaggtgatacttgttcccttaatgagtttaccataactggatcaacttatgcacctattggagaagtgcataaagatgataaaccagtgaattgtcaccagtatgatggtctggtagaattagcaacaatttgtgctctttgtaatgactctgctttggattacaatgaggcaaagggtgtgtatgaaaaagttggagaagctacagagactgctctcacttgcctagtagagaagatgaatgtatttgataccgaattgaagggtctttctaaaatagaacgtgcaaatgcctgcaactcagtcattaaacagctgatgaaaaaggaattcactctagagttttcacgtgacagaaagtcaatgtcggtttactgtacaccaaataaaccaagcaggacatcaatgagcaagatgtttgtgaagggtgctcctgaaggtgtcattgacaggtgcacccacattcgagttggaagtactaaggttcctatgacctctggagtcaaacagaagatcatgtctgtcattcgagagtggggtagtggcagcgacacactgcgatgcctggccctggccactcatgacaacccactgagaagagaagaaatgcaccttgaggactctgccaactttattaaatatgagaccaatctgaccttcgttggctgcgtgggcatgctggatcctccgagaatcgaggtggcctcctccgtgaagctgtgccggcaagcaggcatccgggtcatcatgatcactggggacaacaagggcactgctgtggccatctgtcgccgcatcggcatcttcgggcaggatgaggacgtgacgtcaaaagctttcacaggccgggagtttgatgaactcaacccctccgcccagcgagacgcctgcctgaacgcccgctgttttgctcgagttgaaccctcccacaagtctaaaatcgtagaatttcttcagtcttttgatgagattacagctatgactggcgatggcgtgaacgatgctcctgctctgaagaaagccgagattggcattgctatgggctctggcactgcggtggctaaaaccgcctctgagatggtcctggcggatgacaacttctccaccattgtggctgccgttgaggaggggcgggcaatctacaacaacatgaaacagttcatccgctacctcatctcgtccaacgtcggggaagttgtctgtattttcctgacagcagcccttggatttcccgaggctttgattcctgttcagctgctctgggtcaatctggtgacagatggcctgcctgccactgcactggggttcaaccctcctgatctggacatcatgaataaacctccccggaacccaaaggaaccattgatcagcgggtggctctttttccgttacttggctattggctgttacgtcggcgctgctaccgtgggtgctgctgcatggtggttcattgctgctgacggtggtccaagagtgtccttctaccagctgagtcatttcctacagtgtaaagaggacaacccggactttgaaggcgtggattgtgcaatctttgaatccccatacccgatgacaatggcgctctctgttctagtaactatagaaatgtgtaacgccctcaacagcttgtccgaaaaccagtccttgctgaggatgcccccctgggagaacatctggctcgtgggctccatctgcctgtccatgtcactccacttcctgatcctctatgtcgaacccttgccactcatcttccagatcacaccgctgaacgtgacccagtggctgatggtgctgaaaatctccttgcccgtgattctcatggatgagacgctcaagtttgtggcccgcaactacctggaacctgctggtaaagagtgtgtgcagcctgccaccaaatcctgctcgttctcggcatgcaccgatgggatttcctggccgtttgtgctgctcataatgcccctggtgatctgggtctatagcacagacactaactttagcgatatgttctggtcttgactgacagttttccataaagaagatgtttaacttaatcaattaatttttttattgtttaaagcaactgtctatttctgctgaattttcacatgaacatactggctggtgatggaggtttcatactctagattttgttttgctttttctgactccagtggggcaagattttccttttttatacacataattaaagtgtccattgacatgtacagagaactaacactattttatgcaaatatttttttgtagatgaaaaagcatgtacagtgttctgtttaatactcatccttgtataaaaaaaatagttgagccagcagacattgtcagcaaattaattggcagcagattttaggaaatgaatgtgtgtggttttttttctaaaactaaatagcatgtattgtgtcttttgcatgatgatccggatttaatttgatatcacagtctaatttttattcataagccaatttttctgcactgagcagagtcttgctacctcagtcagtattgttttggtttgctacttccctcacccactttggcctccgttcaccccaccccaccccacctctccccaccttacccccgccccgcttggcttcttctttaggattgtgatggttcgttctgtttacatcagttttaacgagaggtatgcctgtactcgcttgtgcagaaaacattgttccagattcaatcgactgggtttatgtcccttcacatagtttttaaggttatttatttaaatgtctaatgtattttattgtaacagacattgttttgccaacattgcctatttcagtggcacgtcatctagttttaaaaaaataaaacattttaaatggacagagaaaaataactgtcttgtctttaactcgtaagtggcttacctgggactaacagacatgtccaactttctctccagttcttagctcagaactttagttgtactctgcttgaggggaagaaggctcctgctctgctgtgtaggtagtcataggaattgtattcttaatgtacaggcactaattgtcatctgtgatgtacattttatgcaagtttctgctggcctggtatagagaacataagggcaagtgtgtatgtgtgtgtatgtgtgtgttttgtaaaatctgtaaatagcacatgaccaaatgaacatattgtatagaactatttttatttgaatgtggcactaaccaccaccaccgttactacgatcaatgtttgcgcatgttcgagatgagtctcaccaacagtgtgtaagtcattaacagtcctaactgtggtgttttcctccaatgccttccaacatccatcaactaacgtgagtattttcttcctgggatttggatgctttagcctaaaggtgactgccaccaagtgagataactgtatgtcactaacttataagccgcctccatggcagatgctgctgtgctccctgatgccctgtgagcaccggggttgcctgtggcgcctgccatgtgactcgggcgcagcatcagctggctggaggtgtggctttcatagacctccacaggctgcctaggacaagatgaccaggagggcccaagccagacaaaagccggagtggggagagaggcatttcagccagaccaacaggctgaaggagctgtgcagactattgctaaaatgagggttcgcagctgccaggagtcatcccagaacattgctacttatttattaaaaagctaaaaactagtgaaagcaagtaactgaaccagtgaactctgggtatcgataggttcgtcttaaataggccacttccccactcccccacccccccttgcttggtcttgtccttggtggctaagacttagctctgcaggggatgttaaagcacagttagtaggacgtggctctgcacagcccaaaaaccagcttactccttagccagggtgtgaggcctcgactatattcttcaaaatgtacttaggctctggttactgggatggccagtagatgtaatgcagatggttggagtttggggagggttaggaggcatcaagcaggacaaggtgctgctgagttcagagggcccacgttcaagggatggaggtggaacctggagaccgactcttaaaagcacagtccgtggttgggtgtggtggctcatgcctgtaagtaagtctcagccctttggaggccacagcagaaggattgcttgagcccaggtactcaaaccagcctgggcaacagagtgaggccctgtcaaaaaaaaatcagccttactgtgaagcctccaaggctgctcgcaggcagctgtggctctcgggaagggaggctgctttgcccagcagggaacatttggggcagggggtaaattttgccagtttgagcatcatgaggtgtaacaagaaatgggttgaatgggccaaatgcaaggagtgcatctctgggctgcaaactgacttgagtgctgcactattgctattccgtgcaaacaaaactcagcttttcctgactcagttccttgacttagtggcctttacaaaaaaagttgagtagtgtgtggcctgctgtcgcacagcccctagttagcttcatggtttctcagcttcagacccctccagcccacagaggagcccatggagggacccacttcccttggtccagacagctgggagtgggttaggcccactgctgttttgagcagggccacttgctccatttcactgaaggctttgctgggtgaaaacacttcagcatctcctcctcaggtcaacccataaagaccaggtccagcaccgtggtcttggcacatccctggcctcaggccctcacctaacagtgaggcagcagctgcccagccccgcaatgtgcctgctgtcaggcagctcttgcctgaaacttacttccacattctttcctgatgggcaggtggctgaaggcccagccatcagtgtcgcttgttgccaccccgtgcctcccttggcctctctgagctttgcccagaagaccaacaatcatacataccctaactgggacaccactctgcagaatgcagatgatccattctggaggaagctgtcccttgagctcagtgagctcccaggcaagcagggcatctggccgacttccctcacaacagctgctcccacatcccctcggactggagcttcagccctgactgaggtgggcagacctaagacctgagaccacaagattagctcagtgtctaccaagcatctagccactgtccagggccagagcataccacgtctgcagtgcctgtgagcagagccagcagttgccctgtgactgtaaccaccaaattgtccaaacacccgctgcagttagcaagaagggtaggcttcaccctcctttactgaggagaatgatgcggaggagtttcctctccagggctaggcaaggcaggcgagcagccagaagccgggtgcccacagggcagggacaggaaggctgtgctgctactggctgctcacttctccatcaacctcaccctctgcaccactaaccaagaccttgtcctcttgcctgtctcgctgctttcacagctgcaacgattgtgtctgcctcatggggttttcctccagagcctttattctgtagccagacgacacgaggagtctgtgtcactgagccagtgcttctagatgctaccctgtgtgggcggcacctcagggacagtaaatcagaaatgctggtcttgaaaccttgaaaagatcaagctgaatgttccttttcatctgtcgctgttgatcttcatctatttaaataggtattctaacgtttcctctctgtatttcatgaagctgatttcctctctctttccttttcagcaatactggagtaaccgcttcctaaaccattttgcagaaatgtaagggtgttcggttgcgtgcatgtgcgtttttagcaacacatctaccaaccctgtgcatgactgatgttggggaaaaagaaaagtaaaaaacttcccaactcactttgtgttatgtggaggaaatgtgtattaccaatggggttgttagcttttaaatcaaaatactgattacagatgtacaatttagcttaatcagaaagcctctccagagaagtttggtttctttgctgcaagaggaatgaggctctgtaaccttatctaagaacttggaagccgtcagccaagtcgccacatttctctgcaaaatgtcatagcttatataaatgtacagtattcaattgtaatgcatgccttcggttgtaagtagccagatccctctccagtgacattggaacatgctactttttaattggccctgtacagtttgcttatttataaattcattaaaaacactacaggtgttgaatggttaaaatgtaggcctccagttcattttcagttattttctgagtgtgcagacagctatttcgcactgtattaaatgtaacttatttaatgaaatcagaagcagtagacagatgttggtgcaatacaaatattgtgatgcatttatcttaataaaatgctaaatgtcaatttatcactgcgcatgtttgactttagactgtaaatagagatcagtttgtttctttctgtgctggtaacaatgagcgtcgcacagacatggtttcaggtaaataaatctattctatgataaa

SEQ ID NO: 315958 - DNA, 8377 bp, Homo sapiens
gcgcgcgggaggagggagccgggaggagggggcggggccgcgccgcccgcgccgcgctgggcgctctcggccaatgagcggcgtccacatgccgcggcggcggcgaaaggggaggcagcggccgataaatgctattagagcagccgccgcggagccgtccccgacgccacctccttttccttcgccgcagtttcctccgccgctgtcgggcgtgcggcgctgagggacccgggcgagcgcgccgcgcaccgccccgccggctcgcctccctcgccgcgttccgccctcagtggtctgccgggcgccccctcctccggcccgggcggggcctctgatcgcctcaagagagcggggagggggctcgggggccgcggcctgccctcccggcgggcggctgagggcgagggaggccctcccttctggcgaggggagggagggtgggtcaggagcccccaacccgccctgcggagctcggggccgcgcgaggggcggttgtctgggggagggggcgcggggtgattcagcgcccggcgaggcggaagcggccgcaagaggaggaggggagagcccgtccgcgcctgggctcccggggtggcacgagcccgcggccggagtgcgaggcggaggcgaggaggccgcggggacgggaggcgaggccggccgggcccccgaagccatggagaacgcgcacaccaagacggtggaggaggtgctgggccacttcggcgtcaacgagagtacggggctgagcctggaacaggtcaagaagcttaaggagagatggggctccaacgagttaccggctgaagaaggaaaaaccttgctggaacttgtgattgagcagtttgaagacttgctagttaggattttattactggcagcatgtatatcttttgttttggcttggtttgaagaaggtgaagaaacaattacagcctttgtagaaccttttgtaattttactcatattagtagccaatgcaattgtgggtgtatggcaggaaagaaatgctgaaaatgccatcgaagcccttaaggaatatgagcctgaaatgggcaaagtgtatcgacaggacagaaagagtgtgcagcggattaaagctaaagacatagttcctggtgatattgtagaaattgctgttggtgacaaagttcctgctgatataaggttaacttccatcaaatctaccacactaagagttgaccagtcaattctcacaggtgaatctgtctctgtcatcaagcacactgatcccgtccctgacccacgagctgtcaaccaagataaaaagaacatgctgttttctggtacaaacattgctgctgggaaagctatgggagtggtggtagcaactggagttaacaccgaaattggcaagatccgggatgaaatggtggcaacagaacaggagagaacaccccttcagcaaaaactagatgaatttggggaacagctttccaaagtcatctcccttatttgcattgcagtctggatcataaatattgggcacttcaatgacccggttcatggagggtcctggatcagaggtgctatttactactttaaaattgcagtggccctggctgtagcagccattcctgaaggtctgcctgcagtcatcaccacctgcctggctcttggaactcgcagaatggcaaagaaaaatgccattgttcgaagcctcccgtctgtggaaacccttggttgtacttctgttatctgctcagacaagactggtacacttacaacaaaccagatgtcagtctgcaggatgttcattctggacagagtggaaggtgatacttgttcccttaatgagtttaccataactggatcaacttatgcacctattggagaagtgcataaagatgataaaccagtgaattgtcaccagtatgatggtctggtagaattagcaacaatttgtgctctttgtaatgactctgctttggattacaatgaggcaaagggtgtgtatgaaaaagttggagaagctacagagactgctctcacttgcctagtagagaagatgaatgtatttgataccgaattgaagggtctttctaaaatagaacgtgcaaatgcctgcaactcagtcattaaacagctgatgaaaaaggaattcactctagagttttcacgtgacagaaagtcaatgtcggtttactgtacaccaaataaaccaagcaggacatcaatgagcaagatgtttgtgaagggtgctcctgaaggtgtcattgacaggtgcacccacattcgagttggaagtactaaggttcctatgacctctggagtcaaacagaagatcatgtctgtcattcgagagtggggtagtggcagcgacacactgcgatgcctggccctggccactcatgacaacccactgagaagagaagaaatgcaccttgaggactctgccaactttattaaatatgagaccaatctgaccttcgttggctgcgtgggcatgctggatcctccgagaatcgaggtggcctcctccgtgaagctgtgccggcaagcaggcatccgggtcatcatgatcactggggacaacaagggcactgctgtggccatctgtcgccgcatcggcatcttcgggcaggatgaggacgtgacgtcaaaagctttcacaggccgggagtttgatgaactcaacccctccgcccagcgagacgcctgcctgaacgcccgctgttttgctcgagttgaaccctcccacaagtctaaaatcgtagaatttcttcagtcttttgatgagattacagctatgactggcgatggcgtgaacgatgctcctgctctgaagaaagccgagattggcattgctatgggctctggcactgcggtggctaaaaccgcctctgagatggtcctggcggatgacaacttctccaccattgtggctgccgttgaggaggggcgggcaatctacaacaacatgaaacagttcatccgctacctcatctcgtccaacgtcggggaagttgtctgtattttcctgacagcagcccttggatttcccgaggctttgattcctgttcagctgctctgggtcaatctggtgacagatggcctgcctgccactgcactggggttcaaccctcctgatctggacatcatgaataaacctccccggaacccaaaggaaccattgatcagcgggtggctctttttccgttacttggctattggctgttacgtcggcgctgctaccgtgggtgctgctgcatggtggttcattgctgctgacggtggtccaagagtgtccttctaccagctgagtcatttcctacagtgtaaagaggacaacccggactttgaaggcgtggattgtgcaatctttgaatccccatacccgatgacaatggcgctctctgttctagtaactatagaaatgtgtaacgccctcaacagcttgtccgaaaaccagtccttgctgaggatgcccccctgggagaacatctggctcgtgggctccatctgcctgtccatgtcactccacttcctgatcctctatgtcgaacccttgccactcatcttccagatcacaccgctgaacgtgacccagtggctgatggtgctgaaaatctccttgcccgtgattctcatggatgagacgctcaagtttgtggcccgcaactacctggaacctgctggtaaagagtgtgtgcagcctgccaccaaatcctgctcgttctcggcatgcaccgatgggatttcctggccgtttgtgctgctcataatgcccctggtgatctgggtctatagcacagacactaactttagcgatatgttctggtcttgactgacagttttccataaagaagatgtttaacttaatcaattaatttttttattgtttaaagcaactgtctatttctgctgaattttcacatgaacatactggctggtgatggaggtttcatactctagattttgttttgctttttctgactccagtggggcaagattttccttttttatacacataattaaagtgtccattgacatgtacagagaactaacactattttatgcaaatatttttttgtagatgaaaaagcatgtacagtgttctgtttaatactcatccttgtataaaaaaaatagttgagccagcagacattgtcagcaaattaattggcagcagattttaggaaatgaatgtgtgtggttttttttctaaaactaaatagcatgtattgtgtcttttgcatgatgatccggatttaatttgatatcacagtctaatttttattcataagccaatttttctgcactgagcagagtcttgctacctcagtcagtattgttttggtttgctacttccctcacccactttggcctccgttcaccccaccccaccccacctctccccaccttacccccgccccgcttggcttcttctttaggattgtgatggttcgttctgtttacatcagttttaacgagaggtatgcctgtactcgcttgtgcagaaagttatttatttaaatgtctaatgtattttattgtaacagacattgttttgccaacattgcctatttcagtggcacgtcatctagttttaaaaaaataaaacattttaaatggacagagaaaaataactgtcttgtctttaactcgtaagtggcttacctgggactaacagacatgtccaactttctctccagttcttagctcagaactttagttgtactctgcttgaggggaagaaggctcctgctctgctgtgtaggtagtcataggaattgtattcttaatgtacaggcactaattgtcatctgtgatgtacattttatgcaagtttctgctggcctggtatagagaacataagggcaagtgtgtatgtgtgtgtatgtgtgtgttttgtaaaatctgtaaatagcacatgaccaaatgaacatattgtatagaactatttttatttgaatgtggcactaaccaccaccaccgttactacgatcaatgtttgcgcatgttcgagatgagtctcaccaacagtgtgtaagtcattaacagtcctaactgtggtgttttcctccaatgccttccaacatccatcaactaacgtgagtattttcttcctgggatttggatgctttagcctaaaggtgactgccaccaagtgagataactgtatgtcactaacttataagccgcctccatggcagatgctgctgtgctccctgatgccctgtgagcaccggggttgcctgtggcgcctgccatgtgactcgggcgcagcatcagctggctggaggtgtggctttcatagacctccacaggctgcctaggacaagatgaccaggagggcccaagccagacaaaagccggagtggggagagaggcatttcagccagaccaacaggctgaaggagctgtgcagactattgctaaaatgagggttcgcagctgccaggagtcatcccagaacattgctacttatttattaaaaagctaaaaactagtgaaagcaagtaactgaaccagtgaactctgggtatcgataggttcgtcttaaataggccacttccccactcccccacccccccttgcttggtcttgtccttggtggctaagacttagctctgcaggggatgttaaagcacagttagtaggacgtggctctgcacagcccaaaaaccagcttactccttagccagggtgtgaggcctcgactatattcttcaaaatgtacttaggctctggttactgggatggccagtagatgtaatgcagatggttggagtttggggagggttaggaggcatcaagcaggacaaggtgctgctgagttcagagggcccacgttcaagggatggaggtggaacctggagaccgactcttaaaagcacagtccgtggttgggtgtggtggctcatgcctgtaagtaagtctcagccctttggaggccacagcagaaggattgcttgagcccaggtactcaaaccagcctgggcaacagagtgaggccctgtcaaaaaaaaatcagccttactgtgaagcctccaaggctgctcgcaggcagctgtggctctcgggaagggaggctgctttgcccagcagggaacatttggggcagggggtaaattttgccagtttgagcatcatgaggtgtaacaagaaatgggttgaatgggccaaatgcaaggagtgcatctctgggctgcaaactgacttgagtgctgcactattgctattccgtgcaaacaaaactcagcttttcctgactcagttccttgacttagtggcctttacaaaaaaagttgagtagtgtgtggcctgctgtcgcacagcccctagttagcttcatggtttctcagcttcagacccctccagcccacagaggagcccatggagggacccacttcccttggtccagacagctgggagtgggttaggcccactgctgttttgagcagggccacttgctccatttcactgaaggctttgctgggtgaaaacacttcagcatctcctcctcaggtcaacccataaagaccaggtccagcaccgtggtcttggcacatccctggcctcaggccctcacctaacagtgaggcagcagctgcccagccccgcaatgtgcctgctgtcaggcagctcttgcctgaaacttacttccacattctttcctgatgggcaggtggctgaaggcccagccatcagtgtcgcttgttgccaccccgtgcctcccttggcctctctgagctttgcccagaagaccaacaatcatacataccctaactgggacaccactctgcagaatgcagatgatccattctggaggaagctgtcccttgagctcagtgagctcccaggcaagcagggcatctggccgacttccctcacaacagctgctcccacatcccctcggactggagcttcagccctgactgaggtgggcagacctaagacctgagaccacaagattagctcagtgtctaccaagcatctagccactgtccagggccagagcataccacgtctgcagtgcctgtgagcagagccagcagttgccctgtgactgtaaccaccaaattgtccaaacacccgctgcagttagcaagaagggtaggcttcaccctcctttactgaggagaatgatgcggaggagtttcctctccagggctaggcaaggcaggcgagcagccagaagccgggtgcccacagggcagggacaggaaggctgtgctgctactggctgctcacttctccatcaacctcaccctctgcaccactaaccaagaccttgtcctcttgcctgtctcgctgctttcacagctgcaacgattgtgtctgcctcatggggttttcctccagagcctttattctgtagccagacgacacgaggagtctgtgtcactgagccagtgcttctagatgctaccctgtgtgggcggcacctcagggacagtaaatcagaaatgctggtcttgaaaccttgaaaagatcaagctgaatgttccttttcatctgtcgctgttgatcttcatctatttaaataggtattctaacgtttcctctctgtatttcatgaagctgatttcctctctctttccttttcagcaatactggagtaaccgcttcctaaaccattttgcagaaatgtaagggtgttcggttgcgtgcatgtgcgtttttagcaacacatctaccaaccctgtgcatgactgatgttggggaaaaagaaaagtaaaaaacttcccaactcactttgtgttatgtggaggaaatgtgtattaccaatggggttgttagcttttaaatcaaaatactgattacagatgtacaatttagcttaatcagaaagcctctccagagaagtttggtttctttgctgcaagaggaatgaggctctgtaaccttatctaagaacttggaagccgtcagccaagtcgccacatttctctgcaaaatgtcatagcttatataaatgtacagtattcaattgtaatgcatgccttcggttgtaagtagccagatccctctccagtgacattggaacatgctactttttaattggccctgtacagtttgcttatttataaattcattaaaaacactacaggtgttgaatggttaaaatgtaggcctccagttcattttcagttattttctgagtgtgcagacagctatttcgcactgtattaaatgtaacttatttaatgaaatcagaagcagtagacagatgttggtgcaatacaaatattgtgatgcatttatcttaataaaatgctaaatgtcaatttatcactgcgcatgtttgactttagactgtaaatagagatcagtttgtttctttctgtgctggtaacaatgagcgtcgcacagacatggtttcaggtaaataaatctattctatgataaa

SEQ ID NO: 315959 - DNA, 7265 bp, Homo sapiens
cgaagagaagaaatgcaccttgaggactctgccaactttattaaatatgagaccaatctgaccttcgttggctgcgtgggcatgctggatcctccgagaatcgaggtgtcaaccaagataaaaagaacatgctgttttctggtacaaacattgctgctgggaaagctatgggagtggtggtagcaactggagttaacaccgaaattggcaagatccgggatgaaatggtggcaacagaacaggagagaacaccccttcagcaaaaactagatgaatttggggaacagctttccaaagtcatctcccttatttgcattgcagtctggatcataaatattgggcacttcaatgacccggttcatggagggtcctggatcagaggtgctatttactactttaaaattgcagtggccctggctgtagcagccattcctgaaggtctgcctgcagtcatcaccacctgcctggctcttggaactcgcagaatggcaaagaaaaatgccattgttcgaagcctcccgtctgtggaaacccttggttgtacttctgttatctgctcagacaagactggtacacttacaacaaaccagatgtcagtctgcaggatgttcattctggacagagtggaaggtgatacttgttcccttaatgagtttaccataactggatcaacttatgcacctattggagaagtgcataaagatgataaaccagtgaattgtcaccagtatgatggtctggtagaattagcaacaatttgtgctctttgtaatgactctgctttggattacaatgaggcaaagggtgtgtatgaaaaagttggagaagctacagagactgctctcacttgcctagtagagaagatgaatgtatttgataccgaattgaagggtctttctaaaatagaacgtgcaaatgcctgcaactcagtcattaaacagctgatgaaaaaggaattcactctagagttttcacgtgacagaaagtcaatgtcggtttactgtacaccaaataaaccaagcaggacatcaatgagcaagatgtttgtgaagggtgctcctgaaggtgtcattgacaggtgcacccacattcgagttggaagtactaaggttcctatgacctctggagtcaaacagaagatcatgtctgtcattcgagagtggggtagtggcagcgacacactgcgatgcctggccctggccactcatgacaacccactgagaagagaagaaatgcaccttgaggactctgccaactttattaaatatgagaccaatctgaccttcgttggctgcgtgggcatgctggatcctccgagaatcgaggtggcctcctccgtgaagctgtgccggcaagcaggcatccgggtcatcatgatcactggggacaacaagggcactgctgtggccatctgtcgccgcatcggcatcttcgggcaggatgaggacgtgacgtcaaaagctttcacaggccgggagtttgatgaactcaacccctccgcccagcgagacgcctgcctgaacgcccgctgttttgctcgagttgaaccctcccacaagtctaaaatcgtagaatttcttcagtcttttgatgagattacagctatgactggcgatggcgtgaacgatgctcctgctctgaagaaagccgagattggcattgctatgggctctggcactgcggtggctaaaaccgcctctgagatggtcctggcggatgacaacttctccaccattgtggctgccgttgaggaggggcgggcaatctacaacaacatgaaacagttcatccgctacctcatctcgtccaacgtcggggaagttgtctgtattttcctgacagcagcccttggatttcccgaggctttgattcctgttcagctgctctgggtcaatctggtgacagatggcctgcctgccactgcactggggttcaaccctcctgatctggacatcatgaataaacctccccggaacccaaaggaaccattgatcagcgggtggctctttttccgttacttggctattggctgttacgtcggcgctgctaccgtgggtgctgctgcatggtggttcattgctgctgacggtggtccaagagtgtccttctaccagctgagtcatttcctacagtgtaaagaggacaacccggactttgaaggcgtggattgtgcaatctttgaatccccatacccgatgacaatggcgctctctgttctagtaactatagaaatgtgtaacgccctcaacagcttgtccgaaaaccagtccttgctgaggatgcccccctgggagaacatctggctcgtgggctccatctgcctgtccatgtcactccacttcctgatcctctatgtcgaacccttgccactcatcttccagatcacaccgctgaacgtgacccagtggctgatggtgctgaaaatctccttgcccgtgattctcatggatgagacgctcaagtttgtggcccgcaactacctggaacctgctggtaaagagtgtgtgcagcctgccaccaaatcctgctcgttctcggcatgcaccgatgggatttcctggccgtttgtgctgctcataatgcccctggtgatctgggtctatagcacagacactaactttagcgatatgttctggtcttgactgacagttttccataaagaagatgtttaacttaatcaattaatttttttattgtttaaagcaactgtctatttctgctgaattttcacatgaacatactggctggtgatggaggtttcatactctagattttgttttgctttttctgactccagtggggcaagattttccttttttatacacataattaaagtgtccattgacatgtacagagaactaacactattttatgcaaatatttttttgtagatgaaaaagcatgtacagtgttctgtttaatactcatccttgtataaaaaaaatagttgagccagcagacattgtcagcaaattaattggcagcagattttaggaaatgaatgtgtgtggttttttttctaaaactaaatagcatgtattgtgtcttttgcatgatgatccggatttaatttgatatcacagtctaatttttattcataagccaatttttctgcactgagcagagtcttgctacctcagtcagtattgttttggtttgctacttccctcacccactttggcctccgttcaccccaccccaccccacctctccccaccttacccccgccccgcttggcttcttctttaggattgtgatggttcgttctgtttacatcagttttaacgagaggtatgcctgtactcgcttgtgcagaaaacattgttccagattcaatcgactgggtttatgtcccttcacatagtttttaaggttatttatttaaatgtctaatgtattttattgtaacagacattgttttgccaacattgcctatttcagtggcacgtcatctagttttaaaaaaataaaacattttaaatggacagagaaaaataactgtcttgtctttaactcgtaagtggcttacctgggactaacagacatgtccaactttctctccagttcttagctcagaactttagttgtactctgcttgaggggaagaaggctcctgctctgctgtgtaggtagtcataggaattgtattcttaatgtacaggcactaattgtcatctgtgatgtacattttatgcaagtttctgctggcctggtatagagaacataagggcaagtgtgtatgtgtgtgtatgtgtgtgttttgtaaaatctgtaaatagcacatgaccaaatgaacatattgtatagaactatttttatttgaatgtggcactaaccaccaccaccgttactacgatcaatgtttgcgcatgttcgagatgagtctcaccaacagtgtgtaagtcattaacagtcctaactgtggtgttttcctccaatgccttccaacatccatcaactaacgtgagtattttcttcctgggatttggatgctttagcctaaaggtgactgccaccaagtgagataactgtatgtcactaacttataagccgcctccatggcagatgctgctgtgctccctgatgccctgtgagcaccggggttgcctgtggcgcctgccatgtgactcgggcgcagcatcagctggctggaggtgtggctttcatagacctccacaggctgcctaggacaagatgaccaggagggcccaagccagacaaaagccggagtggggagagaggcatttcagccagaccaacaggctgaaggagctgtgcagactattgctaaaatgagggttcgcagctgccaggagtcatcccagaacattgctacttatttattaaaaagctaaaaactagtgaaagcaagtaactgaaccagtgaactctgggtatcgataggttcgtcttaaataggccacttccccactcccccacccccccttgcttggtcttgtccttggtggctaagacttagctctgcaggggatgttaaagcacagttagtaggacgtggctctgcacagcccaaaaaccagcttactccttagccagggtgtgaggcctcgactatattcttcaaaatgtacttaggctctggttactgggatggccagtagatgtaatgcagatggttggagtttggggagggttaggaggcatcaagcaggacaaggtgctgctgagttcagagggcccacgttcaagggatggaggtggaacctggagaccgactcttaaaagcacagtccgtggttgggtgtggtggctcatgcctgtaagtaagtctcagccctttggaggccacagcagaaggattgcttgagcccaggtactcaaaccagcctgggcaacagagtgaggccctgtcaaaaaaaaatcagccttactgtgaagcctccaaggctgctcgcaggcagctgtggctctcgggaagggaggctgctttgcccagcagggaacatttggggcagggggtaaattttgccagtttgagcatcatgaggtgtaacaagaaatgggttgaatgggccaaatgcaaggagtgcatctctgggctgcaaactgacttgagtgctgcactattgctattccgtgcaaacaaaactcagcttttcctgactcagttccttgacttagtggcctttacaaaaaaagttgagtagtgtgtggcctgctgtcgcacagcccctagttagcttcatggtttctcagcttcagacccctccagcccacagaggagcccatggagggacccacttcccttggtccagacagctgggagtgggttaggcccactgctgttttgagcagggccacttgctccatttcactgaaggctttgctgggtgaaaacacttcagcatctcctcctcaggtcaacccataaagaccaggtccagcaccgtggtcttggcacatccctggcctcaggccctcacctaacagtgaggcagcagctgcccagccccgcaatgtgcctgctgtcaggcagctcttgcctgaaacttacttccacattctttcctgatgggcaggtggctgaaggcccagccatcagtgtcgcttgttgccaccccgtgcctcccttggcctctctgagctttgcccagaagaccaacaatcatacataccctaactgggacaccactctgcagaatgcagatgatccattctggaggaagctgtcccttgagctcagtgagctcccaggcaagcagggcatctggccgacttccctcacaacagctgctcccacatcccctcggactggagcttcagccctgactgaggtgggcagacctaagacctgagaccacaagattagctcagtgtctaccaagcatctagccactgtccagggccagagcataccacgtctgcagtgcctgtgagcagagccagcagttgccctgtgactgtaaccaccaaattgtccaaacacccgctgcagttagcaagaagggtaggcttcaccctcctttactgaggagaatgatgcggaggagtttcctctccagggctaggcaaggcaggcgagcagccagaagccgggtgcccacagggcagggacaggaaggctgtgctgctactggctgctcacttctccatcaacctcaccctctgcaccactaaccaagaccttgtcctcttgcctgtctcgctgctttcacagctgcaacgattgtgtctgcctcatggggttttcctccagagcctttattctgtagccagacgacacgaggagtctgtgtcactgagccagtgcttctagatgctaccctgtgtgggcggcacctcagggacagtaaatcagaaatgctggtcttgaaaccttgaaaagatcaagctgaatgttccttttcatctgtcgctgttgatcttcatctatttaaataggtattctaacgtttcctctctgtatttcatgaagctgatttcctctctctttccttttcagcaatactggagtaaccgcttcctaaaccattttgcagaaatgtaagggtgttcggttgcgtgcatgtgcgtttttagcaacacatctaccaaccctgtgcatgactgatgttggggaaaaagaaaagtaaaaaacttcccaactcactttgtgttatgtggaggaaatgtgtattaccaatggggttgttagcttttaaatcaaaatactgattacagatgtacaatttagcttaatcagaaagcctctccagagaagtttggtttctttgctgcaagaggaatgaggctctgtaaccttatctaagaacttggaagccgtcagccaagtcgccacatttctctgcaaaatgtcatagcttatataaatgtacagtattcaattgtaatgcatgccttcggttgtaagtagccagatccctctccagtgacattggaacatgctactttttaattggccctgtacagtttgcttatttataaattcattaaaaacactacaggtgttgaatggttaaaatgtaggcctccagttcattttcagttattttctgagtgtgcagacagctatttcgcactgtattaaatgtaacttatttaatgaaatcagaagcagtagacagatgttggtgcaatacaaatattgtgatgcatttatcttaataaaatgctaaatgtcaatttatcactgcgcatgtttgactttagactgtaaatagagatcagtttgtttctttctgtgctggtaacaatgagcgtcgcacagacatggtttcaggtaaataaatctattctatgataaa

SEQ ID NO: 315960 - DNA, 8393 bp, Homo sapiens
  misc_feature (4222)..(4223): n is a, c, g, or t
  misc_feature (4225)..(4226): n is a, c, g, or t
  misc_feature (4229)..(4232): n is a, c, g, or t
  misc_feature (4244)..(4245): n is a, c, g, or t
  misc_feature (4248)..(4248): n is a, c, g, or t
  misc_feature (4252)..(4252): n is a, c, g, or t
  misc_feature (4255)..(4255): n is a, c, g, or t
  misc_feature (4265)..(4265): n is a, c, g, or t
  misc_feature (4268)..(4269): n is a, c, g, or t
  misc_feature (4272)..(4272): n is a, c, g, or t
  misc_feature (4286)..(4286): n is a, c, g, or t
  misc_feature (4293)..(4293): n is a, c, g, or t
  misc_feature (4304)..(4304): n is a, c, g, or t
  misc_feature (4307)..(4307): n is a, c, g, or t
gcgcgcgggaggagggagccgggaggagggggcggggccgcgccgcccgcgccgcgctgggcgctctcggccaatgagcggcgtccacatgccgcggcggcggcgaaaggggaggcagcggccgataaatgctattagagcagccgccgcggagccgtccccgacgccacctccttttccttcgccgcagtttcctccgccgctgtcgggcgtgcggcgctgagggacccgggcgagcgcgccgcgcaccgccccgccggctcgcctccctcgccgcgttccgccctcagtggtctgccgggcgccccctcctccggcccgggcggggcctctgatcgcctcaagagagcggggagggggctcgggggccgcggcctgccctcccggcgggcggctgagggcgagggaggccctcccttctggcgaggggagggagggtgggtcaggagcccccaacccgccctgcggagctcggggccgcgcgaggggcggttgtctgggggagggggcgcggggtgattcagcgcccggcgaggcggaagcggccgcaagaggaggaggggagagcccgtccgcgcctgggctcccggggtggcacgagcccgcggccggagtgcgaggcggaggcgaggaggccgcggggacgggaggcgaggccggccgggcccccgaagccatggagaacgcgcacaccaagacggtggaggaggtgctgggccacttcggcgtcaacgagagtacggggctgagcctggaacaggtcaagaagcttaaggagagatggggctccaacgagttaccggctgaagaaggaaaaaccttgctggaacttgtgattgagcagtttgaagacttgctagttaggattttattactggcagcatgtatatcttttgttttggcttggtttgaagaaggtgaagaaacaattacagcctttgtagaaccttttgtaattttactcatattagtagccaatgcaattgtgggtgtatggcaggaaagaaatgctgaaaatgccatcgaagcccttaaggaatatgagcctgaaatgggcaaagtgtatcgacaggacagaaagagtgtgcagcggattaaagctaaagacatagttcctggtgatattgtagaaattgctgttggtgacaaagttcctgctgatataaggttaacttccatcaaatctaccacactaagagttgaccagtcaattctcacaggtgaatctgtctctgtcatcaagcacactgatcccgtccctgacccacgagctgtcaaccaagataaaaagaacatgctgttttctggtacaaacattgctgctgggaaagctatgggagtggtggtagcaactggagttaacaccgaaattggcaagatccgggatgaaatggtggcaacagaacaggagagaacaccccttcagcaaaaactagatgaatttggggaacagctttccaaagtcatctcccttatttgcattgcagtctggatcataaatattgggcacttcaatgacccggttcatggagggtcctggatcagaggtgctatttactactttaaaattgcagtggccctggctgtagcagccattcctgaaggtctgcctgcagtcatcaccacctgcctggctcttggaactcgcagaatggcaaagaaaaatgccattgttcgaagcctcccgtctgtggaaacccttggttgtacttctgttatctgctcagacaagactggtacacttacaacaaaccagatgtcagtctgcaggatgttcattctggacagagtggaaggtgatacttgttcccttaatgagtttaccataactggatcaacttatgcacctattggagaagtgcataaagatgataaaccagtgaattgtcaccagtatgatggtctggtagaattagcaacaatttgtgctctttgtaatgactctgctttggattacaatgaggcaaagggtgtgtatgaaaaagttggagaagctacagagactgctctcacttgcctagtagagaagatgaatgtatttgataccgaattgaagggtctttctaaaatagaacgtgcaaatgcctgcaactcagtcattaaacagctgatgaaaaaggaattcactctagagttttcacgtgacagaaagtcaatgtcggtttactgtacaccaaataaaccaagcaggacatcaatgagcaagatgtttgtgaagggtgctcctgaaggtgtcattgacaggtgcacccacattcgagttggaagtactaaggttcctatgacctctggagtcaaacagaagatcatgtctgtcattcgagagtggggtagtggcagcgacacactgcgatgcctggccctggccactcatgacaacccactgagaagagaagaaatgcaccttgaggactctgccaactttattaaatatgagaccaatctgaccttcgttggctgcgtgggcatgctggatcctccgagaatcgaggtggcctcctccgtgaagctgtgccggcaagcaggcatccgggtcatcatgatcactggggacaacaagggcactgctgtggccatctgtcgccgcatcggcatcttcgggcaggatgaggacgtgacgtcaaaagctttcacaggccgggagtttgatgaactcaacccctccgcccagcgagacgcctgcctgaacgcccgctgttttgctcgagttgaaccctcccacaagtctaaaatcgtagaatttcttcagtcttttgatgagattacagctatgactggcgatggcgtgaacgatgctcctgctctgaagaaagccgagattggcattgctatgggctctggcactgcggtggctaaaaccgcctctgagatggtcctggcggatgacaacttctccaccattgtggctgccgttgaggaggggcgggcaatctacaacaacatgaaacagttcatccgctacctcatctcgtccaacgtcggggaagttgtctgtattttcctgacagcagcccttggatttcccgaggctttgattcctgttcagctgctctgggtcaatctggtgacagatggcctgcctgccactgcactggggttcaaccctcctgatctggacatcatgaataaacctccccggaacccaaaggaaccattgatcagcgggtggctctttttccgttacttggctattggctgttacgtcggcgctgctaccgtgggtgctgctgcatggtggttcattgctgctgacggtggtccaagagtgtccttctaccagctgagtcatttcctacagtgtaaagaggacaacccggactttgaaggcgtggattgtgcaatctttgaatccccatacccgatgacaatggcgctctctgttctagtaactatagaaatgtgtaacgccctcaacagcttgtccgaaaaccagtccttgctgaggatgcccccctgggagaacatctggctcgtgggctccatctgcctgtccatgtcactccacttcctgatcctctatgtcgaacccttgccactcatcttccagatcacaccgctgaacgtgacccagtggctgatggtgctgaaaatctccttgcccgtgattctcatggatgagacgctcaagtttgtggcccgcaactacctggaacctgctggtaaagagtgtgtgcagcctgccaccaaatcctgctcgttctcggcatgcaccgatgggatttcctggccgtttgtgctgctcataatgcccctggtgatctgggtctatagcacagacactaactttagcgatatgttctggtcttgactgacagttttccataaagaagatgtttaacttaatcaattaatttttttattgtttaaagcaactgtctatttctgctgaattttcacatgaacatactggctggtgatggaggtttcatactctagattttgttttgctttttctgactccagtggggcaagattttccttttttatacacataattaaagtgtccattgacatgtacagagaactaacactattttatgcaaatatttttttgtagatgaaaaagcatgtacagtgttctgtttaatactcatccttgtataaaaaaaatagttgagccagcagacattgtcagcaaattaattggcagcagattttaggaaatgaatgtgtgtggttttttttctaaaactaaatagcatgtattgtgtcttttgcatgnnannagnnnnaaaaaaaaaaannaanaaanaanaaaaaaaaanaannaanaaaaaaaaaaaaanaaaaaanaaaaaaaaaanaanaaaaaaaaaaaaaaaaacagaaccccacctctccccaccttacccccgccccgcttggcttcttctttaggattgtgatggttcgttctgtttacatcagttttaacgagaggtatgcctgtactcgcttgtgcagaaaacattgttccagattcaatcgactgggtttatgtcccttcacatagtttttaaggttatttatttaaatgtctaatgtattttattgtaacagacattgttttgccaacattgcctatttcagtggcacgtcatctagttttaaaaaaataaaacattttaaatggacagagaaaaataactgtcttgtctttaactcgtaagtggcttacctgggactaacagacatgtccaactttctctccagttcttagctcagaactttagttgtactctgcttgaggggaagaaggctcctgctctgctgtgtaggtagtcataggaattgtattcttaatgtacaggcactaattgtcatctgtgatgtacattttatgcaagtttctgctggcctggtatagagaacataagggcaagtgtgtatgtgtgtgtatgtgtgtgttttgtaaaatctgtaaatagcacatgaccaaatgaacatattgtatagaactatttttatttgaatgtggcactaaccaccaccaccgttactacgatcaatgtttgcgcatgttcgagatgagtctcaccaacagtgtgtaagtcattaacagtcctaactgtggtgttttcctccaatgccttccaacatccatcaactaacgtgagtattttcttcctgggatttggatgctttagcctaaaggtgactgccaccaagtgagataactgtatgtcactaacttataagccgcctccatggcagatgctgctgtgctccctgatgccctgtgagcaccggggttgcctgtggcgcctgccatgtgactcgggcgcagcatcagctggctggaggtgtggctttcatagacctccacaggctgcctaggacaagatgaccaggagggcccaagccagacaaaagccggagtggggagagaggcatttcagccagaccaacaggctgaaggagctgtgcagactattgctaaaatgagggttcgcagctgccaggagtcatcccagaacattgctacttatttattaaaaagctaaaaactagtgaaagcaagtaactgaaccagtgaactctgggtatcgataggttcgtcttaaataggccacttccccactcccccacccccccttgcttggtcttgtccttggtggctaagacttagctctgcaggggatgttaaagcacagttagtaggacgtggctctgcacagcccaaaaaccagcttactccttagccagggtgtgaggcctcgactatattcttcaaaatgtacttaggctctggttactgggatggccagtagatgtaatgcagatggttggagtttggggagggttaggaggcatcaagcaggacaaggtgctgctgagttcagagggcccacgttcaagggatggaggtggaacctggagaccgactcttaaaagcacagtccgtggttgggtgtggtggctcatgcctgtaagtaagtctcagccctttggaggccacagcagaaggattgcttgagcccaggtactcaaaccagcctgggcaacagagtgaggccctgtcaaaaaaaaatcagccttactgtgaagcctccaaggctgctcgcaggcagctgtggctctcgggaagggaggctgctttgcccagcagggaacatttggggcagggggtaaattttgccagtttgagcatcatgaggtgtaacaagaaatgggttgaatgggccaaatgcaaggagtgcatctctgggctgcaaactgacttgagtgctgcactattgctattccgtgcaaacaaaactcagcttttcctgactcagttccttgacttagtggcctttacaaaaaaagttgagtagtgtgtggcctgctgtcgcacagcccctagttagcttcatggtttctcagcttcagacccctccagcccacagaggagcccatggagggacccacttcccttggtccagacagctgggagtgggttaggcccactgctgttttgagcagggccacttgctccatttcactgaaggctttgctgggtgaaaacacttcagcatctcctcctcaggtcaacccataaagaccaggtccagcaccgtggtcttggcacatccctggcctcaggccctcacctaacagtgaggcagcagctgcccagccccgcaatgtgcctgctgtcaggcagctcttgcctgaaacttacttccacattctttcctgatgggcaggtggctgaaggcccagccatcagtgtcgcttgttgccaccccgtgcctcccttggcctctctgagctttgcccagaagaccaacaatcatacataccctaactgggacaccactctgcagaatgcagatgatccattctggaggaagctgtcccttgagctcagtgagctcccaggcaagcagggcatctggccgacttccctcacaacagctgctcccacatcccctcggactggagcttcagccctgactgaggtgggcagacctaagacctgagaccacaagattagctcagtgtctaccaagcatctagccactgtccagggccagagcataccacgtctgcagtgcctgtgagcagagccagcagttgccctgtgactgtaaccaccaaattgtccaaacacccgctgcagttagcaagaagggtaggcttcaccctcctttactgaggagaatgatgcggaggagtttcctctccagggctaggcaaggcaggcgagcagccagaagccgggtgcccacagggcagggacaggaaggctgtgctgctactggctgctcacttctccatcaacctcaccctctgcaccactaaccaagaccttgtcctcttgcctgtctcgctgctttcacagctgcaacgattgtgtctgcctcatggggttttcctccagagcctttattctgtagccagacgacacgaggagtctgtgtcactgagccagtgcttctagatgctaccctgtgtgggcggcacctcagggacagtaaatcagaaatgctggtcttgaaaccttgaaaagatcaagctgaatgttccttttcatctgtcgctgttgatcttcatctatttaaataggtattctaacgtttcctctctgtatttcatgaagctgatttcctctctctttccttttcagcaatactggagtaaccgcttcctaaaccattttgcagaaatgtaagggtgttcggttgcgtgcatgtgcgtttttagcaacacatctaccaaccctgtgcatgactgatgttggggaaaaagaaaagtaaaaaacttcccaactcactttgtgttatgtggaggaaatgtgtattaccaatggggttgttagcttttaaatcaaaatactgattacagatgtacaatttagcttaatcagaaagcctctccagagaagtttggtttctttgctgcaagaggaatgaggctctgtaaccttatctaagaacttggaagccgtcagccaagtcgccacatttctctgcaaaatgtcatagcttatataaatgtacagtattcaattgtaatgcatgccttcggttgtaagtagccagatccctctccagtgacattggaacatgctactttttaattggccctgtacagtttgcttatttataaattcattaaaaacactacaggtgttgaatggttaaaatgtaggcctccagttcattttcagttattttctgagtgtgcagacagctatttcgcactgtattaaatgtaacttatttaatgaaatcagaagcagtagacagatgttggtgcaatacaaatattgtgatgcatttatcttaataaaatgctaaatgtcaatttatcactgcgcatgtttgactttagactgtaaatagagatcagtttgtttctttctgtgctggtaacaatgagcgtcgcacagacatggtttcaggtaaataaatctattctatgataaa

SEQ ID NO: 315961 - DNA, 6060 bp, Homo sapiens
tgatgctgcggtgatctagaggatcccgaaatggtcttgaggacttctgcatttattaaatatgagaccaatctgaccttcgttggctgcgtgggcatgctggatcctccgagaatcgaggtggcctcctccgtgaagctgtgccggcaagcaggcatccgggtcatcatgatcactggggacaacaagggcactgctgtggccatctgtcgccgcatcggcatcttcgggcaggatgaggacgtgacgtcaaaagctttcacaggccgggagtttgatgaactcaacccctccgcccagcgagacgcctgcctgaacgcccgctgttttgctcgagttgaaccctcccacaagtctaaaatcgtagaatttcttcagtcttttgatgagattacagctatgactggcgatggcgtgaacgatgctcctgctctgaagaaagccgagattggcattgctatgggctctggcactgcggtggctaaaaccgcctctgagatggtcctggcggatgacaacttctccaccattgtggctgccgttgaggaggggcgggcaatctacaacaacatgaaacagttcatccgctacctcatctcgtccaacgtcggggaagttgtctgtattttcctgacagcagcccttggatttcccgaggctttgattcctgttcagctgctctgggtcaatctggtgacagatggcctgcctgccactgcactggggttcaaccctcctgatctggacatcatgaataaacctccccggaacccaaaggaaccattgatcagcgggtggctctttttccgttacttggctattggctgttacgtcggcgctgctaccgtgggtgctgctgcatggtggttcattgctgctgacggtggtccaagagtgtccttctaccagctgagtcatttcctacagtgtaaagaggacaacccggactttgaaggcgtggattgtgcaatctttgaatccccatacccgatgacaatggcgctctctgttctagtaactatagaaatgtgtaacgccctcaacagcttgtccgaaaaccagtccttgctgaggatgcccccctgggagaacatctggctcgtgggctccatctgcctgtccatgtcactccacttcctgatcctctatgtcgaacccttgccactcatcttccagatcacaccgctgaacgtgacccagtggctgatggtgctgaaaatctccttgcccgtgattctcatggatgagacgctcaagtttgtggcccgcaactacctggaacctgctggtaaagagtgtgtgcagcctgccaccaaatcctgctcgttctcggcatgcaccgatgggatttcctggccgtttgtgctgctcataatgcccctggtgatctgggtctatagcacagacactaactttagcgatatgttctggtcttgactgacagttttccataaagaagatgtttaacttaatcaattaatttttttattgtttaaagcaactgtctatttctgctgaattttcacatgaacatactggctggtgatggaggtttcatactctagattttgttttgctttttctgactccagtggggcaagattttccttttttatacacataattaaagtgtccattgacatgtacagagaactaacactattttatgcaaatatttttttgtagatgaaaaagcatgtacagtgttctgtttaatactcatccttgtataaaaaaaatagttgagccagcagacattgtcagcaaattaattggcagcagattttaggaaatgaatgtgtgtggttttttttctaaaactaaatagcatgtattgtgtcttttgcatgatgatccggatttaatttgatatcacagtctaatttttattcataagccaatttttctgcactgagcagagtcttgctacctcagtcagtattgttttggtttgctacttccctcacccactttggcctccgttcaccccaccccaccccacctctccccaccttacccccgccccgcttggcttcttctttaggattgtgatggttcgttctgtttacatcagttttaacgagaggtatgcctgtactcgcttgtgcagaaaacattgttccagattcaatcgactgggtttatgtcccttcacatagtttttaaggttatttatttaaatgtctaatgtattttattgtaacagacattgttttgccaacattgcctatttcagtggcacgtcatctagttttaaaaaaataaaacattttaaatggacagagaaaaataactgtcttgtctttaactcgtaagtggcttacctgggactaacagacatgtccaactttctctccagttcttagctcagaactttagttgtactctgcttgaggggaagaaggctcctgctctgctgtgtaggtagtcataggaattgtattcttaatgtacaggcactaattgtcatctgtgatgtacattttatgcaagtttctgctggcctggtatagagaacataagggcaagtgtgtatgtgtgtgtatgtgtgtgttttgtaaaatctgtaaatagcacatgaccaaatgaacatattgtatagaactatttttatttgaatgtggcactaaccaccaccaccgttactacgatcaatgtttgcgcatgttcgagatgagtctcaccaacagtgtgtaagtcattaacagtcctaactgtggtgttttcctccaatgccttccaacatccatcaactaacgtgagtattttcttcctgggatttggatgctttagcctaaaggtgactgccaccaagtgagataactgtatgtcactaacttataagccgcctccatggcagatgctgctgtgctccctgatgccctgtgagcaccggggttgcctgtggcgcctgccatgtgactcgggcgcagcatcagctggctggaggtgtggctttcatagacctccacaggctgcctaggacaagatgaccaggagggcccaagccagacaaaagccggagtggggagagaggcatttcagccagaccaacaggctgaaggagctgtgcagactattgctaaaatgagggttcgcagctgccaggagtcatcccagaacattgctacttatttattaaaaagctaaaaactagtgaaagcaagtaactgaaccagtgaactctgggtatcgataggttcgtcttaaataggccacttccccactcccccacccccccttgcttggtcttgtccttggtggctaagacttagctctgcaggggatgttaaagcacagttagtaggacgtggctctgcacagcccaaaaaccagcttactccttagccagggtgtgaggcctcgactatattcttcaaaatgtacttaggctctggttactgggatggccagtagatgtaatgcagatggttggagtttggggagggttaggaggcatcaagcaggacaaggtgctgctgagttcagagggcccacgttcaagggatggaggtggaacctggagaccgactcttaaaagcacagtccgtggttgggtgtggtggctcatgcctgtaagtaagtctcagccctttggaggccacagcagaaggattgcttgagcccaggtactcaaaccagcctgggcaacagagtgaggccctgtcaaaaaaaaatcagccttactgtgaagcctccaaggctgctcgcaggcagctgtggctctcgggaagggaggctgctttgcccagcagggaacatttggggcagggggtaaattttgccagtttgagcatcatgaggtgtaacaagaaatgggttgaatgggccaaatgcaaggagtgcatctctgggctgcaaactgacttgagtgctgcactattgctattccgtgcaaacaaaactcagcttttcctgactcagttccttgacttagtggcctttacaaaaaaagttgagtagtgtgtggcctgctgtcgcacagcccctagttagcttcatggtttctcagcttcagacccctccagcccacagaggagcccatggagggacccacttcccttggtccagacagctgggagtgggttaggcccactgctgttttgagcagggccacttgctccatttcactgaaggctttgctgggtgaaaacacttcagcatctcctcctcaggtcaacccataaagaccaggtccagcaccgtggtcttggcacatccctggcctcaggccctcacctaacagtgaggcagcagctgcccagccccgcaatgtgcctgctgtcaggcagctcttgcctgaaacttacttccacattctttcctgatgggcaggtggctgaaggcccagccatcagtgtcgcttgttgccaccccgtgcctcccttggcctctctgagctttgcccagaagaccaacaatcatacataccctaactgggacaccactctgcagaatgcagatgatccattctggaggaagctgtcccttgagctcagtgagctcccaggcaagcagggcatctggccgacttccctcacaacagctgctcccacatcccctcggactggagcttcagccctgactgaggtgggcagacctaagacctgagaccacaagattagctcagtgtctaccaagcatctagccactgtccagggccagagcataccacgtctgcagtgcctgtgagcagagccagcagttgccctgtgactgtaaccaccaaattgtccaaacacccgctgcagttagcaagaagggtaggcttcaccctcctttactgaggagaatgatgcggaggagtttcctctccagggctaggcaaggcaggcgagcagccagaagccgggtgcccacagggcagggacaggaaggctgtgctgctactggctgctcacttctccatcaacctcaccctctgcaccactaaccaagaccttgtcctcttgcctgtctcgctgctttcacagctgcaacgattgtgtctgcctcatggggttttcctccagagcctttattctgtagccagacgacacgaggagtctgtgtcactgagccagtgcttctagatgctaccctgtgtgggcggcacctcagggacagtaaatcagaaatgctggtcttgaaaccttgaaaagatcaagctgaatgttccttttcatctgtcgctgttgatcttcatctatttaaataggtattctaacgtttcctctctgtatttcatgaagctgatttcctctctctttccttttcagcaatactggagtaaccgcttcctaaaccattttgcagaaatgtaagggtgttcggttgcgtgcatgtgcgtttttagcaacacatctaccaaccctgtgcatgactgatgttggggaaaaagaaaagtaaaaaacttcccaactcactttgtgttatgtggaggaaatgtgtattaccaatggggttgttagcttttaaatcaaaatactgattacagatgtacaatttagcttaatcagaaagcctctccagagaagtttggtttctttgctgcaagaggaatgaggctctgtaaccttatctaagaacttggaagccgtcagccaagtcgccacatttctctgcaaaatgtcatagcttatataaatgtacagtattcaattgtaatgcatgccttcggttgtaagtagccagatccctctccagtgacattggaacatgctactttttaattggccctgtacagtttgcttatttataaattcattaaaaacactacaggtgttgaatggttaaaatgtaggcctccagttcattttcagttattttctgagtgtgcagacagctatttcgcactgtattaaatgtaacttatttaatgaaatcagaagcagtagacagatgttggtgcaatacaaatattgtgatgcatttatcttaataaaatgctaaatgtcaatttatcactgcgcatgtttgactttagactgtaaatagagatcagtttgtttctttctgtgctggtaacaatgagcgtcgcacagacatggtttcaggtaaataaatctattctatgataaa

SEQ ID NO: 315962 - DNA, 7660 bp, Homo sapiens
gcgcgcgggaggagggagccgggaggagggggcggggccgcgccgcccgcgccgcgctgggcgctctcggccaatgagcggcgtccacatgccgcggcggcggcgaaaggggaggcagcggccgataaatgctattagagcagccgccgcggagccgtccccgacgccacctccttttccttcgccgcagtttcctccgccgctgtcgggcgtgcggcgctgagggacccgggcgagcgcgccgcgcaccgccccgccggctcgcctccctcgccgcgttccgccctcagtggtctgccgggcgccccctcctccggcccgggcggggcctctgatcgcctcaagagagcggggagggggctcgggggccgcggcctgccctcccggcgggcggctgagggcgagggaggccctcccttctggcgaggggagggagggtgggtcaggagcccccaacccgccctgcggagctcggggccgcgcgaggggcggttgtctgggggagggggcgcggggtgattcagcgcccggcgaggcggaagcggccgcaagaggaggaggggagagcccgtccgcgcctgggctcccggggtggcacgagcccgcggccggagtgcgaggcggaggcgaggaggccgcggggacgggaggcgaggccggccgggcccccgaagccatggagaacgcgcacaccaagacggtggaggaggtgctgggccacttcggcgtcaacgagagtacggggctgagcctggaacaggtcaagaagcttaaggagagatggggctccaacgagttaccggctgaagaaggaaaaaccttgctggaacttgtgattgagcagtttgaagacttgctagttaggattttattactggcagcatgtatatcttttgttttggcttggtttgaagaaggtgaagaaacaattacagcctttgtagaaccttttgtaattttactcatattagtagccaatgcaattgtgggtgtatggcaggaaagaaatgctgaaaatgccatcgaagcccttaaggaatatgagcctgaaatgggcaaagtgtatcgacaggacagaaagagtgtgcagcggattaaagctaaagacatagttcctggtgatattgtagaaattgctgttggtgacaaagttcctgctgatataaggttaacttccatcaaatctaccacactaagagttgaccagtcaattctcacaggtgaatctgtctctgtcatcaagcacactgatcccgtccctgacccacgagctgtcaaccaagataaaaagaacatgctgttttctggtacaaacattgctgctgggaaagctatgggagtggtggtagcaactggagttaacaccgaaattggcaagatccgggatgaaatggtggcaacagaacaggagagaacaccccttcagcaaaaactagatgaatttggggaacagctttccaaagtcatctcccttatttgcattgcagtctggatcataaatattgggcacttcaatgacccggttcatggagggtcctggatcagaggtgctatttactactttaaaattgcagtggccctggctgtagcagccattcctgaaggtctgcctgcagtcatcaccacctgcctggctcttggaactcgcagaatggcaaagaaaaatgccattgttcgaagcctcccgtctgtggaaacccttggttgtacttctgttatctgctcagacaagactggtacacttacaacaaaccagatgtcagtctgcaggatgttcattctggacagagtggaaggtgatacttgttcccttaatgagtttaccataactggatcaacttatgcacctattggagaagtgcataaagatgataaaccagtgaattgtcaccagtatgatggtctggtagaattagcaacaatttgtgctctttgtaatgactctgctttggattacaatgaggcaaagggtgtgtatgaaaaagttggagaagctacagagactgctctcacttgcctagtagagaagatgaatgtatttgataccgaattgaagggtctttctaaaatagaacgtgcaaatgcctgcaactcagtcattaaacagctgatgaaaaaggaattcactctagagttttcacgtgacagaaagtcaatgtcggtttactgtacaccaaataaaccaagcaggacatcaatgagcaagatgtttgtgaagggtgctcctgaaggtgtcattgacaggtgcacccacattcgagttggaagtactaaggttcctatgacctctggagtcaaacagaagatcatgtctgtcattcgagagtggggtagtggcagcgacacactgcgatgcctggccctggccactcatgacaacccactgagaagagaagaaatgcaccttgaggactctgccaactttattaaatatgagaccaatctgaccttcgttggctgcgtgggcatgctggatcctccgagaatcgaggtggcctcctccgtgaagctgtgccggcaagcaggcatccgggtcatcatgatcactggggacaacaagggcactgctgtggccatctgtcgccgcatcggcatcttcgggcaggatgaggacgtgacgtcaaaagctttcacaggccgggagtttgatgaactcaacccctccgcccagcgagacgcctgcctgaacgcccgctgttttgctcgagttgaaccctcccacaagtctaaaatcgtagaatttcttcagtcttttgatgagattacagctatgactggcgatggcgtgaacgatgctcctgctctgaagaaagccgagattggcattgctatgggctctggcactgcggtggctaaaaccgcctctgagatggtcctggcggatgacaacttctccaccattgtggctgccgttgaggaggggcgggcaatctacaacaacatgaaacagttcatccgctacctcatctcgtccaacgtcggggaagttgtctgtattttcctgacagcagcccttggatttcccgaggctttgattcctgttcagctgctctgggtcaatctggtgacagatggcctgcctgccactgcactggggttcaaccctcctgatctggacatcatgaataaacctccccggaacccaaaggaaccattgatcagcgggtggctctttttccgttacttggctattggctgttacgtcggcgctgctaccgtgggtgctgctgcatggtggttcattgctgctgacggtggtccaagagtgtccttctaccagctgagtcatttcctacagtgtaaagaggacaacccggactttgaaggcgtggattgtgcaatctttgaatccccatacccgatgacaatggcgctctctgttctagtaactatagaaatgtgtaacgccctcaacagcttgtccgaaaaccagtccttgctgaggatgcccccctgggagaacatctggctcgtgggctccatctgcctgtccatgtcactccacttcctgatcctctatgtcgaacccttgccactcatcttccagatcacaccgctgaacgtgacccagtggctgatggtgctgaaaatctccttgcccgtgattctcatggatgagacgctcaagtttgtggcccgcaactacctggaacctgctggtaaagagtgtgtgcagcctgccaccaaatcctgctcgttctcggcatgcaccgatgggatttcctggccgtttgtgctgctcataatgcccctggtgatctgggtctatagcacagacactaactttagcgatatgttctggtcttgactgacagttttccataaagaagatgtttaacttaatcaattaatttttttattgtttaaagcaactgtctatttctgctgaattttcacatgaacatactggctggtgatggaggtttcatactctagattttgttttgctttttctgactccagtggggcaagattttccttttttatacacataattaaagtgtccattgacatgtacagagaactaacactattttatgcaaatatttttttgtagatgaaaaagcatgtacagtgttctgtttaatactcatccttgtataaaaaaaatagttgagccagcagacattgtcagcaaattaattggcagcagattttaggaaatgaatgtgtgtggttttttttctaaaactaaatagcatgtattgtgtcttttgcatgatgatccggatttaatttgatatcacagtctaatttttattcataagccaatttttctgcactgagcagagtcttgctacctcagtcagtattgttttggtttgctacttccctcacccactttggcctccgttcaccccaccccaccccacctctccccaccttacccccgccccgcttggcttcttctttaggattgtgatggttcgttctgtttacatcagttttaacgagaggtatgcctgtactcgcttgtgcagaaaacattgttccagattcaatcgactgggtttatgtcccttcacatagtttttaaggttatttatttaaatgtctaatgtattttattgtaacagacattgttttgccaacattgcctatttcagtggcacgtcatctagttttaaaaaaataaaacattttaaatggacagagaaaaataactgtcttgtctttaactcgtaagtggcttacctgggactaacagacatgtccaactttctctccagttcttagctcagaactttagttgtactctgcttgaggggaagaaggctcctgctctgctgtgtaggtagtcataggaattgtattcttaatgtacaggcactaattgtcatctgtgatgtacattttatgcaagtttctgctggcctggtatagagaacataagggcaagtgtgtatgtgtgtgtatgtgtgtgttttgtaaaatctgtaaatagcacatgaccaaatgaacatattgtatagaactatttttatttgaatgtggcactaaccaccaccaccgttactacgatcaatgtttgcgcatgttcgagatgagtctcaccaacagtgtgtaagtcattaacagtcctaactgtggtgttttcctccaatgccttccaacatccatcaactaacgtgagtattttcttcctgggatttggatgctttagcctaaaggtgactgccaccaagtgagataactgtatgtcactaacttataagccgcctccatggcagatgctgctgtgctccctgatgccctgtgagcaccggggttgcctgtggcgcctgccatgtgactcgggcgcagcatcagctggctggaggtgtggctttcatagacctccacaggctgcctaggacaagatgaccaggagggcccaagccagacaaaagccggagtggggagagaggcatttcagccagaccaacaggctgaaggagctgtgcagactattgctaaaatgagggttcgcagctgccaggagtcatcccagaacattgctacttatttattaaaaagctaaaaactagtgaaagcaagtaactgaaccagtgaactctgggtatcgataggttcgtcttaaataggccacttccccactcccccacccccccttgcttggtcttgtccttggtggctaagacttagctctgcaggggatgttaaagcacagttagtaggacgtggctctgcacagcccaaaaaccagcttactccttagccagggtgtgaggcctcgactatattcttcaaaatgtacttaggctctggttactgggatggccagtagatgtaatgcagatggttggagtttggggagggttaggaggcatcaagcaggacaaggtgctgctgagttcagagggcccacgttcaagggatggaggtggaacctggagaccgactcttaaaagcacagtccgtggttgggtgtggtggctcatgcctgtaagtaagtctcagccctttggaggccacagcagaaggattgcttgagcccaggtactcaaaccagcctgggcaacagagtgaggccctgtcaaaaaaaaatcagccttactgtgaagcctccaaggctgctcgcaggcagctgtggctctcgggaagggaggctgctttgcccagcagggaacatttggggcagggggtaaattttgccagtttgagcatcatgaggtgtaacaagaaatgggttgaatgggccaaatgcaaggagtgcatctctgggctgcaaactgacttgagtgctgcactattgctattccgtgcaaacaaaactcagcttttcctgactcagttccttgacttagtggcctttacaaaaaaagttgagtagtgtgtggcctgctgtcgcacagcccctagttagcttcatggtttctcagcttcagacccctccagcccacagaggagcccatggagggacccacttcccttggtccagacagctgggagtgggttaggcccactgctgttttgagcagggccacttgctccatttcattctccatcaacctcaccctctgcaccactaaccaagaccttgtcctcttgcctgtctcgctgctttcacagctgcaacgattgtgtctgcctcatggggttttcctccagagcctttattctgtagccagacgacacgaggagtctgtgtcactgagccagtgcttctagatgctaccctgtgtgggcggcacctcagggacagtaaatcagaaatgctggtcttgaaaccttgaaaagatcaagctgaatgttccttttcatctgtcgctgttgatcttcatctatttaaataggtattctaacgtttcctctctgtatttcatgaagctgatttcctctctctttccttttcagcaatactggagtaaccgcttcctaaaccattttgcagaaatgtaagggtgttcggttgcgtgcatgtgcgtttttagcaacacatctaccaaccctgtgcatgactgatgttggggaaaaagaaaagtaaaaaacttcccaactcactttgtgttatgtggaggaaatgtgtattaccaatggggttgttagcttttaaatcaaaatactgattacagatgtacaatttagcttaatcagaaagcctctccagagaagtttggtttctttgctgcaagaggaatgaggctctgtaaccttatctaagaacttggaagccgtcagccaagtcgccacatttctctgcaaaatgtcatagcttatataaatgtacagtattcaattgtaatgcatgccttcggttgtaagtagccagatccctctccagtgacattggaacatgctactttttaattggccctgtacagtttgcttatttataaattcattaaaaacactacaggtgttgaatggttaaaatgtaggcctccagttcattttcagttattttctgagtgtgcagacagctatttcgcactgtattaaatgtaacttatttaatgaaatcagaagcagtagacagatgttggtgcaatacaaatattgtgatgcatttatcttaataaaatgctaaatgtcaatttatcactgcgcatgtttgactttagactgtaaatagagatcagtttgtttctttctgtgctggtaacaatgagcgtcgcacagacatggtttcaggtaaataaatctattctatgataaa

SEQ ID NO: 315963 - DNA, 5710 bp, Homo sapiens
ctggaaactggagataaaataaactttgtcttttgatgagattacagctatgactggcgatggcgtgaacgatgctcctgctctgaagaaagccgagattggcattgctatgggctctggcactgcggtggctaaaaccgcctctgagatggtcctggcggatgacaacttctccaccattgtggctgccgttgaggaggggcgggcaatctacaacaacatgaaacagttcatccgctacctcatctcgtccaacgtcggggaagttgtctgtattttcctgacagcagcccttggatttcccgaggctttgattcctgttcagctgctctgggtcaatctggtgacagatggcctgcctgccactgcactggggttcaaccctcctgatctggacatcatgaataaacctccccggaacccaaaggaaccattgatcagcgggtggctctttttccgttacttggctattggctgttacgtcggcgctgctaccgtgggtgctgctgcatggtggttcattgctgctgacggtggtccaagagtgtccttctaccagctgagtcatttcctacagtgtaaagaggacaacccggactttgaaggcgtggattgtgcaatctttgaatccccatacccgatgacaatggcgctctctgttctagtaactatagaaatgtgtaacgccctcaacagcttgtccgaaaaccagtccttgctgaggatgcccccctgggagaacatctggctcgtgggctccatctgcctgtccatgtcactccacttcctgatcctctatgtcgaacccttgccactcatcttccagatcacaccgctgaacgtgacccagtggctgatggtgctgaaaatctccttgcccgtgattctcatggatgagacgctcaagtttgtggcccgcaactacctggaacctgctggtaaagagtgtgtgcagcctgccaccaaatcctgctcgttctcggcatgcaccgatgggatttcctggccgtttgtgctgctcataatgcccctggtgatctgggtctatagcacagacactaactttagcgatatgttctggtcttgactgacagttttccataaagaagatgtttaacttaatcaattaatttttttattgtttaaagcaactgtctatttctgctgaattttcacatgaacatactggctggtgatggaggtttcatactctagattttgttttgctttttctgactccagtggggcaagattttccttttttatacacataattaaagtgtccattgacatgtacagagaactaacactattttatgcaaatatttttttgtagatgaaaaagcatgtacagtgttctgtttaatactcatccttgtataaaaaaaatagttgagccagcagacattgtcagcaaattaattggcagcagattttaggaaatgaatgtgtgtggttttttttctaaaactaaatagcatgtattgtgtcttttgcatgatgatccggatttaatttgatatcacagtctaatttttattcataagccaatttttctgcactgagcagagtcttgctacctcagtcagtattgttttggtttgctacttccctcacccactttggcctccgttcaccccaccccaccccacctctccccaccttacccccgccccgcttggcttcttctttaggattgtgatggttcgttctgtttacatcagttttaacgagaggtatgcctgtactcgcttgtgcagaaaacattgttccagattcaatcgactgggtttatgtcccttcacatagtttttaaggttatttatttaaatgtctaatgtattttattgtaacagacattgttttgccaacattgcctatttcagtggcacgtcatctagttttaaaaaaataaaacattttaaatggacagagaaaaataactgtcttgtctttaactcgtaagtggcttacctgggactaacagacatgtccaactttctctccagttcttagctcagaactttagttgtactctgcttgaggggaagaaggctcctgctctgctgtgtaggtagtcataggaattgtattcttaatgtacaggcactaattgtcatctgtgatgtacattttatgcaagtttctgctggcctggtatagagaacataagggcaagtgtgtatgtgtgtgtatgtgtgtgttttgtaaaatctgtaaatagcacatgaccaaatgaacatattgtatagaactatttttatttgaatgtggcactaaccaccaccaccgttactacgatcaatgtttgcgcatgttcgagatgagtctcaccaacagtgtgtaagtcattaacagtcctaactgtggtgttttcctccaatgccttccaacatccatcaactaacgtgagtattttcttcctgggatttggatgctttagcctaaaggtgactgccaccaagtgagataactgtatgtcactaacttataagccgcctccatggcagatgctgctgtgctccctgatgccctgtgagcaccggggttgcctgtggcgcctgccatgtgactcgggcgcagcatcagctggctggaggtgtggctttcatagacctccacaggctgcctaggacaagatgaccaggagggcccaagccagacaaaagccggagtggggagagaggcatttcagccagaccaacaggctgaaggagctgtgcagactattgctaaaatgagggttcgcagctgccaggagtcatcccagaacattgctacttatttattaaaaagctaaaaactagtgaaagcaagtaactgaaccagtgaactctgggtatcgataggttcgtcttaaataggccacttccccactcccccacccccccttgcttggtcttgtccttggtggctaagacttagctctgcaggggatgttaaagcacagttagtaggacgtggctctgcacagcccaaaaaccagcttactccttagccagggtgtgaggcctcgactatattcttcaaaatgtacttaggctctggttactgggatggccagtagatgtaatgcagatggttggagtttggggagggttaggaggcatcaagcaggacaaggtgctgctgagttcagagggcccacgttcaagggatggaggtggaacctggagaccgactcttaaaagcacagtccgtggttgggtgtggtggctcatgcctgtaagtaagtctcagccctttggaggccacagcagaaggattgcttgagcccaggtactcaaaccagcctgggcaacagagtgaggccctgtcaaaaaaaaatcagccttactgtgaagcctccaaggctgctcgcaggcagctgtggctctcgggaagggaggctgctttgcccagcagggaacatttggggcagggggtaaattttgccagtttgagcatcatgaggtgtaacaagaaatgggttgaatgggccaaatgcaaggagtgcatctctgggctgcaaactgacttgagtgctgcactattgctattccgtgcaaacaaaactcagcttttcctgactcagttccttgacttagtggcctttacaaaaaaagttgagtagtgtgtggcctgctgtcgcacagcccctagttagcttcatggtttctcagcttcagacccctccagcccacagaggagcccatggagggacccacttcccttggtccagacagctgggagtgggttaggcccactgctgttttgagcagggccacttgctccatttcactgaaggctttgctgggtgaaaacacttcagcatctcctcctcaggtcaacccataaagaccaggtccagcaccgtggtcttggcacatccctggcctcaggccctcacctaacagtgaggcagcagctgcccagccccgcaatgtgcctgctgtcaggcagctcttgcctgaaacttacttccacattctttcctgatgggcaggtggctgaaggcccagccatcagtgtcgcttgttgccaccccgtgcctcccttggcctctctgagctttgcccagaagaccaacaatcatacataccctaactgggacaccactctgcagaatgcagatgatccattctggaggaagctgtcccttgagctcagtgagctcccaggcaagcagggcatctggccgacttccctcacaacagctgctcccacatcccctcggactggagcttcagccctgactgaggtgggcagacctaagacctgagaccacaagattagctcagtgtctaccaagcatctagccactgtccagggccagagcataccacgtctgcagtgcctgtgagcagagccagcagttgccctgtgactgtaaccaccaaattgtccaaacacccgctgcagttagcaagaagggtaggcttcaccctcctttactgaggagaatgatgcggaggagtttcctctccagggctaggcaaggcaggcgagcagccagaagccgggtgcccacagggcagggacaggaaggctgtgctgctactggctgctcacttctccatcaacctcaccctctgcaccactaaccaagaccttgtcctcttgcctgtctcgctgctttcacagctgcaacgattgtgtctgcctcatggggttttcctccagagcctttattctgtagccagacgacacgaggagtctgtgtcactgagccagtgcttctagatgctaccctgtgtgggcggcacctcagggacagtaaatcagaaatgctggtcttgaaaccttgaaaagatcaagctgaatgttccttttcatctgtcgctgttgatcttcatctatttaaataggtattctaacgtttcctctctgtatttcatgaagctgatttcctctctctttccttttcagcaatactggagtaaccgcttcctaaaccattttgcagaaatgtaagggtgttcggttgcgtgcatgtgcgtttttagcaacacatctaccaaccctgtgcatgactgatgttggggaaaaagaaaagtaaaaaacttcccaactcactttgtgttatgtggaggaaatgtgtattaccaatggggttgttagcttttaaatcaaaatactgattacagatgtacaatttagcttaatcagaaagcctctccagagaagtttggtttctttgctgcaagaggaatgaggctctgtaaccttatctaagaacttggaagccgtcagccaagtcgccacatttctctgcaaaatgtcatagcttatataaatgtacagtattcaattgtaatgcatgccttcggttgtaagtagccagatccctctccagtgacattggaacatgctactttttaattggccctgtacagtttgcttatttataaattcattaaaaacactacaggtgttgaatggttaaaatgtaggcctccagttcattttcagttattttctgagtgtgcagacagctatttcgcactgtattaaatgtaacttatttaatgaaatcagaagcagtagacagatgttggtgcaatacaaatattgtgatgcatttatcttaataaaatgctaaatgtcaatttatcactgcgcatgtttgactttagactgtaaatagagatcagtttgtttctttctgtgctggtaacaatgagcgtcgcacagacatggtttcaggtaaataaatctattctatgataaa

SEQ ID NO: 315964 - DNA, 5931 bp, Homo sapiens
gcgcgcgggaggagggagccgggaggagggggcggggccgcgccgcccgcgccgcgctgggcgctctcggccaatgagcggcgtccacatgccgcggcggcggcgaaaggggaggcagcggccgataaatgctattagagcagccgccgcggagccgtccccgacgccacctccttttccttcgccgcagtttcctccgccgctgtcgggcgtgcggcgctgagggacccgggcgagcgcgccgcgcaccgccccgccggctcgcctccctcgccgcgttccgccctcagtggtctgccgggcgccccctcctccggcccgggcggggcctctgatcgcctcaagagagcggggagggggctcgggggccgcggcctgccctcccggcgggcggctgagggcgagggaggccctcccttctggcgaggggagggagggtgggtcaggagcccccaacccgccctgcggagctcggggccgcgcgaggggcggttgtctgggggagggggcgcggggtgattcagcgcccggcgaggcggaagcggccgcaagaggaggaggggagagcccgtccgcgcctgggctcccggggtggcacgagcccgcggccggagtgcgaggcggaggcgaggaggccgcggggacgggaggcgaggccggccgggcccccgaagccatggagaacgcgcacaccaagacggtggaggaggtgctgggccacttcggcgtcaacgagagtacggggctgagcctggaacaggtcaagaagcttaaggagagatggggctccaacgagttaccggctgaagaaggaaaaaccttgctggaacttgtgattgagcagtttgaagacttgctagttaggattttattactggcagcatgtatatcttttgttttggcttggtttgaagaaggtgaagaaacaattacagcctttgtagaaccttttgtaattttactcatattagtagccaatgcaattgtgggtgtatggcaggaaagaaatgctgaaaatgccatcgaagcccttaaggaatatgagcctgaaatgggcaaagtgtatcgacaggacagaaagagtgtgcagcggattaaagctaaagacatagttcctggtgatattgtagaaattgctgttggtgacaaagttcctgctgatataaggttaacttccatcaaatctaccacactaagagttgaccagtcaattctcacaggtgaatctgtctctgtcatcaagcacactgatcccgtccctgacccacgagctgtcaaccaagataaaaagaacatgctgttttctggtacaaacattgctgctgggaaagctatgggagtggtggtagcaactggagttaacaccgaaattggcaagatccgggatgaaatggtggcaacagaacaggagagaacaccccttcagcaaaaactagatgaatttggggaacagctttccaaagtcatctcccttatttgcattgcagtctggatcataaatattgggcacttcaatgacccggttcatggagggtcctggatcagaggtgctatttactactttaaaattgcagtggccctggctgtagcagccattcctgaaggtctgcctgcagtcatcaccacctgcctggctcttggaactcgcagaatggcaaagaaaaatgccattgttcgaagcctcccgtctgtggaaacccttggttgtacttctgttatctgctcagacaagactggtacacttacaacaaaccagatgtcagtctgcaggatgttcattctggacagagtggaaggtgatacttgttcccttaatgagtttaccataactggatcaacttatgcacctattggagaagtgcataaagatgataaaccagtgaattgtcaccagtatgatggtctggtagaattagcaacaatttgtgctctttgtaatgactctgctttggattacaatgaggcaaagggtgtgtatgaaaaagttggagaagctacagagactgctctcacttgcctagtagagaagatgaatgtatttgataccgaattgaagggtctttctaaaatagaacgtgcaaatgcctgcaactcagtcattaaacagctgatgaaaaaggaattcactctagagttttcacgtgacagaaagtcaatgtcggtttactgtacaccaaataaaccaagcaggacatcaatgagcaagatgtttgtgaagggtgctcctgaaggtgtcattgacaggtgcacccacattcgagttggaagtactaaggttcctatgacctctggagtcaaacagaagatcatgtctgtcattcgagagtggggtagtggcagcgacacactgcgatgcctggccctggccactcatgacaacccactgagaagagaagaaatgcaccttgaggactctgccaactttattaaatatgagaccaatctgaccttcgttggctgcgtgggcatgctggatcctccgagaatcgaggtggcctcctccgtgaagctgtgccggcaagcaggcatccgggtcatcatgatcactggggacaacaagggcactgctgtggccatctgtcgccgcatcggcatcttcgggcaggatgaggacgtgacgtcaaaagctttcacaggccgggagtttgatgaactcaacccctccgcccagcgagacgcctgcctgaacgcccgctgttttgctcgagttgaaccctcccacaagtctaaaatcgtagaatttcttcagtcttttgatgagattacagctatgactggcgatggcgtgaacgatgctcctgctctgaagaaagccgagattggcattgctatgggctctggcactgcggtggctaaaaccgcctctgagatggtcctggcggatgacaacttctccaccattgtggctgccgttgaggaggggcgggcaatctacaacaacatgaaacagttcatccgctacctcatctcgtccaacgtcggggaagttgtctgtattttcctgacagcagcccttggatttcccgaggctttgattcctgttcagctgctctgggtcaatctggtgacagatggcctgcctgccactgcactggggttcaaccctcctgatctggacatcatgaataaacctccccggaacccaaaggaaccattgatcagcgggtggctctttttccgttacttggctattggctgttacgtcggcgctgctaccgtgggtgctgctgcatggtggttcattgctgctgacggtggtccaagagtgtccttctaccagctgagtcatttcctacagtgtaaagaggacaacccggactttgaaggcgtggattgtgcaatctttgaatccccatacccgatgacaatggcgctctctgttctagtaactatagaaatgtgtaacgccctcaacagcttgtccgaaaaccagtccttgctgaggatgcccccctgggagaacatctggctcgtgggctccatctgcctgtccatgtcactccacttcctgatcctctatgtcgaacccttgccactcatcttccagatcacaccgctgaacgtgacccagtggctgatggtgctgaaaatctccttgcccgtgattctcatggatgagacgctcaagtttgtggcccgcaactacctggaacctgctggtaaagagtgtgtgcagcctgccaccaaatcctgctcgttctcggcatgcaccgatgggatttcctggccgtttgtgctgctcataatgcccctggtgatctgggtctatagcacagacactaactttagcgatatgttctggtcttgactgacagttttccataaagaagatgtttaacttaatcaattaatttttttattgtttaaagcaactgtctatttctgctgaattttcacatgaacatactggctggtgatggaggtttcatactctagattttgttttgctttttctgactccagtggggcaagattttccttttttatacacataattaaagtgtccattgacatgtacagagaactaacactattttatgcaaatatttttttgtagatgaaaaagcatgtacagtgttctgtttaatactcatccttgtataaaaaaaatagttgagccagcagacattgtcagcaaattaattggcagcagattttaggaaatgaatgtgtgtggttttttttctaaaactaaatagcatgtattgtgtcttttgcatgatgatccggatttaatttgatatcacagtctaatttttattcataagccaatttttctgcactgagcagagtcttgctacctcagtcagtattgttttggtttgctacttccctcacccactttggcctccgttcaccccaccccaccccacctctccccaccttacccccgccccgcttggcttcttctttaggattgtgatggttcgttctgtttacatcagttttaacgagaggtatgcctgtactcgcttgtgcagaaaacattgttccagattcaatcgactgggtttatgtcccttcacatagtttttaaggttatttatttaaatgtctaatgtattttattgtaacagacattgttttgccaacattgcctatttcagtggcacgtcatctagttttaaaaaaataaaacattttaaatggacagagaaaaataactgtcttgtctttaactcgtaagtggcttacctgggactaacagacatgtccaactttctctccagttcttagctcagaactttagttgtactctgcttgaggggaagaaggctcctgctctgctgtgtaggtagtcataggaattgtattcttaatgtacaggcactaattgtcatctgtgatgtacattttatgcaagtttctgctggcctggtatagagaacataagggcaagtgtgtatgtgtgtgtatgtgtgtgttttgtaaaatctgtaaatagcacatgaccaaatgaacatattgtatagaactatttttatttgaatgtggcactaaccaccaccaccgttactacgatcaatgtttgcgcatgttcgagatgagtctcaccaacagtgtgtaagtcattaacagtcctaactgtggtgttttcctccaatgccttccaacatccatcaactaaccaatactggagtaaccgcttcctaaaccattttgcagaaatgtaagggtgttcggttgcgtgcatgtgcgtttttagcaacacatctaccaaccctgtgcatgactgatgttggggaaaaagaaaagtaaaaaacttcccaactcactttgtgttatgtggaggaaatgtgtattaccaatggggttgttagcttttaaatcaaaatactgattacagatgtacaatttagcttaatcagaaagcctctccagagaagtttggtttctttgctgcaagaggaatgaggctctgtaaccttatctaagaacttggaagccgtcagccaagtcgccacatttctctgcaaaatgtcatagcttatataaatgtacagtattcaattgtaatgcatgccttcggttgtaagtagccagatccctctccagtgacattggaacatgctactttttaattggccctgtacagtttgcttatttataaattcattaaaaacactacaggtgttgaatggttaaaatgtaggcctccagttcattttcagttattttctgagtgtgcagacagctatttcgcactgtattaaatgtaacttatttaatgaaatcagaagcagtagacagatgttggtgcaatacaaatattgtgatgcatttatcttaataaaatgctaaatgtcaatttatcactgcgcatgtttgactttagactgtaaatagagatcagtttgtttctttctgtgctggtaacaatgagcgtcgcacagacatggtttcaggtaaataaatctattctatgataaa

SEQ ID NO: 315965 - DNA, 5496 bp, Homo sapiens
acgagatgaggtagcggatgaactgtttcatgttagtccaacgtcggggaagttgtctgtattttcctgacagcagcccttggatttcccgaggctttgattcctgttcagctgctctgggtcaatctggtgacagatggcctgcctgccactgcactggggttcaaccctcctgatctggacatcatgaataaacctccccggaacccaaaggaaccattgatcagcgggtggctctttttccgttacttggctattggctgttacgtcggcgctgctaccgtgggtgctgctgcatggtggttcattgctgctgacggtggtccaagagtgtccttctaccagctgagtcatttcctacagtgtaaagaggacaacccggactttgaaggcgtggattgtgcaatctttgaatccccatacccgatgacaatggcgctctctgttctagtaactatagaaatgtgtaacgccctcaacagcttgtccgaaaaccagtccttgctgaggatgcccccctgggagaacatctggctcgtgggctccatctgcctgtccatgtcactccacttcctgatcctctatgtcgaacccttgccactcatcttccagatcacaccgctgaacgtgacccagtggctgatggtgctgaaaatctccttgcccgtgattctcatggatgagacgctcaagtttgtggcccgcaactacctggaacctgctggtaaagagtgtgtgcagcctgccaccaaatcctgctcgttctcggcatgcaccgatgggatttcctggccgtttgtgctgctcataatgcccctggtgatctgggtctatagcacagacactaactttagcgatatgttctggtcttgactgacagttttccataaagaagatgtttaacttaatcaattaatttttttattgtttaaagcaactgtctatttctgctgaattttcacatgaacatactggctggtgatggaggtttcatactctagattttgttttgctttttctgactccagtggggcaagattttccttttttatacacataattaaagtgtccattgacatgtacagagaactaacactattttatgcaaatatttttttgtagatgaaaaagcatgtacagtgttctgtttaatactcatccttgtataaaaaaaatagttgagccagcagacattgtcagcaaattaattggcagcagattttaggaaatgaatgtgtgtggttttttttctaaaactaaatagcatgtattgtgtcttttgcatgatgatccggatttaatttgatatcacagtctaatttttattcataagccaatttttctgcactgagcagagtcttgctacctcagtcagtattgttttggtttgctacttccctcacccactttggcctccgttcaccccaccccaccccacctctccccaccttacccccgccccgcttggcttcttctttaggattgtgatggttcgttctgtttacatcagttttaacgagaggtatgcctgtactcgcttgtgcagaaaacattgttccagattcaatcgactgggtttatgtcccttcacatagtttttaaggttatttatttaaatgtctaatgtattttattgtaacagacattgttttgccaacattgcctatttcagtggcacgtcatctagttttaaaaaaataaaacattttaaatggacagagaaaaataactgtcttgtctttaactcgtaagtggcttacctgggactaacagacatgtccaactttctctccagttcttagctcagaactttagttgtactctgcttgaggggaagaaggctcctgctctgctgtgtaggtagtcataggaattgtattcttaatgtacaggcactaattgtcatctgtgatgtacattttatgcaagtttctgctggcctggtatagagaacataagggcaagtgtgtatgtgtgtgtatgtgtgtgttttgtaaaatctgtaaatagcacatgaccaaatgaacatattgtatagaactatttttatttgaatgtggcactaaccaccaccaccgttactacgatcaatgtttgcgcatgttcgagatgagtctcaccaacagtgtgtaagtcattaacagtcctaactgtggtgttttcctccaatgccttccaacatccatcaactaacgtgagtattttcttcctgggatttggatgctttagcctaaaggtgactgccaccaagtgagataactgtatgtcactaacttataagccgcctccatggcagatgctgctgtgctccctgatgccctgtgagcaccggggttgcctgtggcgcctgccatgtgactcgggcgcagcatcagctggctggaggtgtggctttcatagacctccacaggctgcctaggacaagatgaccaggagggcccaagccagacaaaagccggagtggggagagaggcatttcagccagaccaacaggctgaaggagctgtgcagactattgctaaaatgagggttcgcagctgccaggagtcatcccagaacattgctacttatttattaaaaagctaaaaactagtgaaagcaagtaactgaaccagtgaactctgggtatcgataggttcgtcttaaataggccacttccccactcccccacccccccttgcttggtcttgtccttggtggctaagacttagctctgcaggggatgttaaagcacagttagtaggacgtggctctgcacagcccaaaaaccagcttactccttagccagggtgtgaggcctcgactatattcttcaaaatgtacttaggctctggttactgggatggccagtagatgtaatgcagatggttggagtttggggagggttaggaggcatcaagcaggacaaggtgctgctgagttcagagggcccacgttcaagggatggaggtggaacctggagaccgactcttaaaagcacagtccgtggttgggtgtggtggctcatgcctgtaagtaagtctcagccctttggaggccacagcagaaggattgcttgagcccaggtactcaaaccagcctgggcaacagagtgaggccctgtcaaaaaaaaatcagccttactgtgaagcctccaaggctgctcgcaggcagctgtggctctcgggaagggaggctgctttgcccagcagggaacatttggggcagggggtaaattttgccagtttgagcatcatgaggtgtaacaagaaatgggttgaatgggccaaatgcaaggagtgcatctctgggctgcaaactgacttgagtgctgcactattgctattccgtgcaaacaaaactcagcttttcctgactcagttccttgacttagtggcctttacaaaaaaagttgagtagtgtgtggcctgctgtcgcacagcccctagttagcttcatggtttctcagcttcagacccctccagcccacagaggagcccatggagggacccacttcccttggtccagacagctgggagtgggttaggcccactgctgttttgagcagggccacttgctccatttcactgaaggctttgctgggtgaaaacacttcagcatctcctcctcaggtcaacccataaagaccaggtccagcaccgtggtcttggcacatccctggcctcaggccctcacctaacagtgaggcagcagctgcccagccccgcaatgtgcctgctgtcaggcagctcttgcctgaaacttacttccacattctttcctgatgggcaggtggctgaaggcccagccatcagtgtcgcttgttgccaccccgtgcctcccttggcctctctgagctttgcccagaagaccaacaatcatacataccctaactgggacaccactctgcagaatgcagatgatccattctggaggaagctgtcccttgagctcagtgagctcccaggcaagcagggcatctggccgacttccctcacaacagctgctcccacatcccctcggactggagcttcagccctgactgaggtgggcagacctaagacctgagaccacaagattagctcagtgtctaccaagcatctagccactgtccagggccagagcataccacgtctgcagtgcctgtgagcagagccagcagttgccctgtgactgtaaccaccaaattgtccaaacacccgctgcagttagcaagaagggtaggcttcaccctcctttactgaggagaatgatgcggaggagtttcctctccagggctaggcaaggcaggcgagcagccagaagccgggtgcccacagggcagggacaggaaggctgtgctgctactggctgctcacttctccatcaacctcaccctctgcaccactaaccaagaccttgtcctcttgcctgtctcgctgctttcacagctgcaacgattgtgtctgcctcatggggttttcctccagagcctttattctgtagccagacgacacgaggagtctgtgtcactgagccagtgcttctagatgctaccctgtgtgggcggcacctcagggacagtaaatcagaaatgctggtcttgaaaccttgaaaagatcaagctgaatgttccttttcatctgtcgctgttgatcttcatctatttaaataggtattctaacgtttcctctctgtatttcatgaagctgatttcctctctctttccttttcagcaatactggagtaaccgcttcctaaaccattttgcagaaatgtaagggtgttcggttgcgtgcatgtgcgtttttagcaacacatctaccaaccctgtgcatgactgatgttggggaaaaagaaaagtaaaaaacttcccaactcactttgtgttatgtggaggaaatgtgtattaccaatggggttgttagcttttaaatcaaaatactgattacagatgtacaatttagcttaatcagaaagcctctccagagaagtttggtttctttgctgcaagaggaatgaggctctgtaaccttatctaagaacttggaagccgtcagccaagtcgccacatttctctgcaaaatgtcatagcttatataaatgtacagtattcaattgtaatgcatgccttcggttgtaagtagccagatccctctccagtgacattggaacatgctactttttaattggccctgtacagtttgcttatttataaattcattaaaaacactacaggtgttgaatggttaaaatgtaggcctccagttcattttcagttattttctgagtgtgcagacagctatttcgcactgtattaaatgtaacttatttaatgaaatcagaagcagtagacagatgttggtgcaatacaaatattgtgatgcatttatcttaataaaatgctaaatgtcaatttatcactgcgcatgtttgactttagactgtaaatagagatcagtttgtttctttctgtgctggtaacaatgagcgtcgcacagacatggtttcaggtaaataaatctattctatgataaa

SEQ ID NO: 315966 - DNA, 8313 bp, Homo sapiens
gcgcgcgggaggagggagccgggaggagggggcggggccgcgccgcccgcgccgcgctgggcgctctcggccaatgagcggcgtccacatgccgcggcggcggcgaaaggggaggcagcggccgataaatgctattagagcagccgccgcggagccgtccccgacgccacctccttttccttcgccgcagtttcctccgccgctgtcgggcgtgcggcgctgagggacccgggcgagcgcgccgcgcaccgccccgccggctcgcctccctcgccgcgttccgccctcagtggtctgccgggcgccccctcctccggcccgggcggggcctctgatcgcctcaagagagcggggagggggctcgggggccgcggcctgccctcccggcgggcggctgagggcgagggaggccctcccttctggcgaggggagggagggtgggtcaggagcccccaacccgccctgcggagctcggggccgcgcgaggggcggttgtctgggggagggggcgcggggtgattcagcgcccggcgaggcggaagcggccgcaagaggaggaggggagagcccgtccgcgcctgggctcccggggtggcacgagcccgcggccggagtgcgaggcggaggcgaggaggccgcggggacgggaggcgaggccggccgggcccccgaagccatggagaacgcgcacaccaagacggtggaggaggtgctgggccacttcggcgtcaacgagagtacggggctgagcctggaacaggtcaagaagcttaaggagagatggggctccaacgagttaccggctgaagaaggaaaaaccttgctggaacttgtgattgagcagtttgaagacttgctagttaggattttattactggcagcatgtatatcttttgttttggcttggtttgaagaaggtgaagaaacaattacagcctttgtagaaccttttgtaattttactcatattagtagccaatgcaattgtgggtgtatggcaggaaagaaatgctgaaaatgccatcgaagcccttaaggaatatgagcctgaaatgggcaaagtgtatcgacaggacagaaagagtgtgcagcggattaaagctaaagacatagttcctggtgatattgtagaaattgctgttggtgacaaagttcctgctgatataaggttaacttccatcaaatctaccacactaagagttgaccagtcaattctcacaggtgaatctgtctctgtcatcaagcacactgatcccgtccctgacccacgagctgtcaaccaagataaaaagaacatgctgttttctggtacaaacattgctgctgggaaagctatgggagtggtggtagcaactggagttaacaccgaaattggcaagatccgggatgaaatggtggcaacagaacaggagagaacaccccttcagcaaaaactagatgaatttggggaacagctttccaaagtcatctcccttatttgcattgcagtctggatcataaatattgggcacttcaatgacccggttcatggagggtcctggatcagaggtgctatttactactttaaaattgcagtggccctggctgtagcagccattcctgaaggtctgcctgcagtcatcaccacctgcctggctcttggaactcgcagaatggcaaagaaaaatgccattgttcgaagcctcccgtctgtggaaacccttggttgtacttctgttatctgctcagacaagactggtacacttacaacaaaccagatgtcagtctgcaggatgttcattctggacagagtggaaggtgatacttgttcccttaatgagtttaccataactggatcaacttatgcacctattggagaagtgcataaagatgataaaccagtgaattgtcaccagtatgatggtctggtagaattagcaacaatttgtgctctttgtaatgactctgctttggattacaatgaggcaaagggtgtgtatgaaaaagttggagaagctacagagactgctctcacttgcctagtagagaagatgaatgtatttgataccgaattgaagggtctttctaaaatagaacgtgcaaatgcctgcaactcagtcattaaacagctgatgaaaaaggaattcactctagagttttcacgtgacagaaagtcaatgtcggtttactgtacaccaaataaaccaagcaggacatcaatgagcaagatgtttgtgaagggtgctcctgaaggtgtcattgacaggtgcacccacattcgagttggaagtactaaggttcctatgacctctggagtcaaacagaagatcatgtctgtcattcgagagtggggtagtggcagcgacacactgcgatgcctggccctggccactcatgacaacccactgagaagagaagaaatgcaccttgaggactctgccaactttattaaatatgagaccaatctgaccttcgttggctgcgtgggcatgctggatcctccgagaatcgaggtggcctcctccgtgaagctgtgccggcaagcaggcatccgggtcatcatgatcactggggacaacaagggcactgctgtggccatctgtcgccgcatcggcatcttcgggcaggatgaggacgtgacgtcaaaagctttcacaggccgggagtttgatgaactcaacccctccgcccagcgagacgcctgcctgaacgcccgctgttttgctcgagttgaaccctcccacaagtctaaaatcgtagaatttcttcagtcttttgatgagattacagctatgactggcgatggcgtgaacgatgctcctgctctgaagaaagccgagattggcattgctatgggctctggcactgcggtggctaaaaccgcctctgagatggtcctggcggatgacaacttctccaccattgtggctgccgttgaggaggggcgggcaatctacaacaacatgaaacagttcatccgctacctcatctcgtccaacgtcggggaagttgtctgtattttcctgacagcagcccttggatttcccgaggctttgattcctgttcagctgctctgggtcaatctggtgacagatggcctgcctgccactgcactggggttcaaccctcctgatctggacatcatgaataaacctccccggaacccaaaggaaccattgatcagcgggtggctctttttccgttacttggctattggctgttacgtcggcgctgctaccgtgggtgctgctgcatggtggttcattgctgctgacggtggtccaagagtgtccttctaccagctgagtcatttcctacagtgtaaagaggacaacccggactttgaaggcgtggattgtgcaatctttgaatccccatacccgatgacaatggcgctctctgttctagtaactatagaaatgtgtaacgccctcaacagcttgtccgaaaaccagtccttgctgaggatgcccccctgggagaacatctggctcgtgggctccatctgcctgtccatgtcactccacttcctgatcctctatgtcgaacccttgccactcatcttccagatcacaccgctgaacgtgacccagtggctgatggtgctgaaaatctccttgcccgtgattctcatggatgagacgctcaagtttgtggcccgcaactacctggaacctgctggtaaagagtgtgtgcagcctgccaccaaatcctgctcgttctcggcatgcaccgatgggatttcctggccgtttgtgctgctcataatgcccctggtgatctgggtctatagcacagacactaactttagcgatatgttctggtcttgactgacagttttccataaagaagatgtttaacttaatcaattaatttttttattgtttaaagcaactgtctatttctgctgaattttcacatgaacatactggctggtgatggaggtttcatactctagattttgttttgctttttctgactccagtggggcaagattttccttttttatacacataattaaagtgtccattgacatgtacagagaactaacactattttatgcaaatatttttttgtagatgaaaaagcatgtacagtgttctgtttaatactcatccttgtataaaaaaaatagttgagccagcagacattgtcagcaaattaattggcagcagattttaggaaatgaatgtgtgtggttttttttctaaaactaaatagcatgtattgtgtcttttgcatgatgatccggatttaatttgatatcacagtctaatttttattcataagccaatttttctgcactgagcagagtcttgctacctcagtcagtattgttttggtttgctacttccctcacccactttggcctccgttcaccccaccccaccccacctctccccaccttacccccgccccgcttggcttcttctttaggattgtgatggttcgttctgtttacatcagttttaacgagaggtatgcctgtactcgcttgtgcagaaaacattgttccagattcaatcgactgggtttatgtcccttcacatagtttttaaggttatttatttaaatgtctaatgtattttattgtaacagacattgttttgccaacattgcctatttcagtggcacgtcatctagttttaaaaaaataaaacattttaaatggacagagaaaaataactgtcttgtctttaactcgtaagtggcttacctgggactaacagacatgtccaactttctctccagttcttagctcagaactttagttgtactctgcttgaggggaagaaggctcctgctctgctgtgtaggtagtcataggaattgtattcttaatgtacaggcactaattgtcatctgtgatgtacattttatgcaagtttctgctggcctggtatagagaacataagggcaagtgtgtatgtgtgtgtatgtgtgtgttttgtaaaatctgtaaatagcacatgaccaaatgaacatattgtatagaactatttttatttgaatgtggcactaaccaccaccaccgttactacgatcaatgtttgcgcatgttcgagatgagtctcaccaacagtgtgtaagtcattaacagtcctaactgtggtgttttcctccaatgccttccaacatccatcaactaacgtgagtattttcttcctgggatttggatgctttagcctaaaggtgactgccaccaagtgagataactgtatgtcactaacttataagccgcctccatggcagatgctgctgtgctccctgatgccctgtgagcaccggggttgcctgtggcgcctgccatgtgactcgggcgcagcatcagctggctggaggtgtggctttcatagacctccacaggctgcctaggacaagatgaccaggagggcccaagccagacaaaagccggagtggggagagaggcatttcagccagaccaacaggctgaaggagctgtgcagactattgctaaaatgagggttcgcagctgccaggagtcatcccagaacattgctacttatttattaaaaagctaaaaactagtgaaagcaagtaactgaaccagtgaactctgggtatcgataggttcgtcttaaataggccacttccccactcccccacccccccttgcttggtcttgtccttggtggctaagacttagctctgcaggggatgttaaagcacagttagtaggacgtggctctgcacagcccaaaaaccagcttactccttagccagggtgtgaggcctcgactatattcttcaaaatgtacttaggctctggttactgggatggccagtagatgtaatgcagatggttggagtttggggagggttaggaggcatcaagcaggacaaggtgctgctgagttcagagggcccacgttcaagggatggaggtggaacctggagaccgactcttaaaagcacagtccgtggttgggtgtggtggctcatgcctgtaagtaagtctcagccctttggaggccacagcagaaggattgcttgagcccaggtactcaaaccagcctgggcaacagagtgaggccctgtcaaaaaaaaatcagccttactgtgaagcctccaaggctgctcgcaggcagctgtggctctcgggaagggaggctgctttgcccagcagggaacatttggggcagggggtaaattttgccagtttgagcatcatgaggtgtaacaagaaatgggttgaatgggccaaatgcaaggagtgcatctctgggctgcaaactgacttgagtgctgcactattgctattccgtgcaaacaaaactcagcttttcctgactcagttccttgacttagtggcctttacaaaaaaagttgagtagtgtgtggcctgctgtcgcacagcccctagttagcttcatggtttctcagcttcagacccctccagcccacagaggagcccatggagggacccacttcccttggtccagacagctgggagtgggttaggcccactgctgttttgagcagggccacttgctccatttcactgaaggctttgctgggtgaaaacacttcagcatctcctcctcaggtcaacccataaagaccaggtccagcaccgtggtcttggcacatccctggcctcaggccctcacctaacagtgaggcagcagctgcccagccccgcaatgtgcctgctgtcaggcagctcttgcctgaaacttacttccacattctttcctgatgggcaggtggctgaaggcccagccatcagtgtcgcttgttgccaccccgtgcctcccttggcctctctgagctttgcccagaagaccaacaatcatacataccctaactgggacaccactctgcagaatgcagatgatccattctggaggaagctgtcccttgagctcagtgagctcccaggcaagcagggcatctggccgacttccctcacaacagctgctcccacatcccctcggactggagcttcagccctgactgaggtgggcagacctaagacctgagaccacaagattagctcagtgtctaccaagcatctagccactgtccagggccagagcataccacgtctgcagtgcctgtgagcagagccagcagttgccctgtgactgtaaccaccaaattgtccaaacacccgctgcagttagcaagaagggtaggcttcaccctcctttactgaggagaatgatgcggaggagtttcctctccagggctaggcaaggcaggcgagcagccagaagccgggtgcccacagggcagggacaggaaggctgtgctgctactggctgctcacttctccatcaacctcaccctctgcaccactaaccaagaccttgtcctcttgcctgtctcgctgctttcacagctgcaacgattgtgtctgcctcatggggttttcctccagagcctttattctgtagccagacgacacgaggagtctgtgtcactgagccagtgcttctagatgctaccctgtgtgggcggcacctcagggacagtaaatcagaaatgctggtcttgaaaccttgaaaagatcaagctgaatgttccttttcatctgtcgctgttgatcttcatctatttaaataggtattctaacgtttcctctctgtatttcatgaagctgatttcctctctctttccttttcagcaatactggagtaaccgcttcctaaaccattttgcagaaatgtaagggtgttcggttgcgtgcatgtgcgtttttagcaacacatctaccaaccctgtgcatgactgatgttggggaaaaagaaaagtaaaaaacttcccaactcactttgtgttatgtggaggaaatgtgtattaccaatggggttgttagcttttaaatcaaaatactgattacagatgtacaatttagcttaatcagaaagcctctccagagaagtttggtttctttgctgcaagaggaatgaggctctgtaaccttatctaagaacttggaagccgtcagccaagtcgccacatttctctgcaaaatgtcatagcttatataaatgtacagtattcaattgtaatgcatgccttcggttgtaagtagccagatccctctccagtgacattggaacatgctactttttaattggccctgtacagtttgcttatttataaattcattaaaaacactacaggtgttgaatggttaaaatgtaggcctccagttcattttcagttattttctgagtgtgcagacagctatttcgcactgtattaaatgtaacttatttaatgaaatcagaagcagtagacagatgttggtgcaatacaaatattgtgatgcatttatcttaataaaatgctaaatgtcaattta

SEQ ID NO: 315967 - DNA, 5593 bp, Homo sapiens
gcgcgcgggaggagggagccgggaggagggggcggggccgcgccgcccgcgccgcgctgggcgctctcggccaatgagcggcgtccacatgccgcggcggcggcgaaaggggaggcagcggccgataaatgctattagagcagccgccgcggagccgtccccgacgccacctccttttccttcgccgcagtttcctccgccgctgtcgggcgtgcggcgctgagggacccgggcgagcgcgccgcgcaccgccccgccggctcgcctccctcgccgcgttccgccctcagtggtctgccgggcgccccctcctccggcccgggcggggcctctgatcgcctcaagagagcggggagggggctcgggggccgcggcctgccctcccggcgggcggctgagggcgagggaggccctcccttctggcgaggggagggagggtgggtcaggagcccccaacccgccctgcggagctcggggccgcgcgaggggcggttgtctgggggagggggcgcggggtgattcagcgcccggcgaggcggaagcggccgcaagaggaggaggggagagcccgtccgcgcctgggctcccggggtggcacgagcccgcggccggagtgcgaggcggaggcgaggaggccgcggggacgggaggcgaggccggccgggcccccgaagccatggagaacgcgcacaccaagacggtggaggaggtgctgggccacttcggcgtcaacgagagtacggggctgagcctggaacaggtcaagaagcttaaggagagatggggctccaacgagttaccggctgaagaaggaaaaaccttgctggaacttgtgattgagcagtttgaagacttgctagttaggattttattactggcagcatgtatatcttttgttttggcttggtttgaagaaggtgaagaaacaattacagcctttgtagaaccttttgtaattttactcatattagtagccaatgcaattgtgggtgtatggcaggaaagaaatgctgaaaatgccatcgaagcccttaaggaatatgagcctgaaatgggcaaagtgtatcgacaggacagaaagagtgtgcagcggattaaagctaaagacatagttcctggtgatattgtagaaattgctgttggtgacaaagttcctgctgatataaggttaacttccatcaaatctaccacactaagagttgaccagtcaattctcacaggtgaatctgtctctgtcatcaagcacactgatcccgtccctgacccacgagctgtcaaccaagataaaaagaacatgctgttttctggtacaaacattgctgctgggaaagctatgggagtggtggtagcaactggagttaacaccgaaattggcaagatccgggatgaaatggtggcaacagaacaggagagaacaccccttcagcaaaaactagatgaatttggggaacagctttccaaagtcatctcccttatttgcattgcagtctggatcataaatattgggcacttcaatgacccggttcatggagggtcctggatcagaggtgctatttactactttaaaattgcagtggccctggctgtagcagccattcctgaaggtctgcctgcagtcatcaccacctgcctggctcttggaactcgcagaatggcaaagaaaaatgccattgttcgaagcctcccgtctgtggaaacccttggttgtacttctgttatctgctcagacaagactggtacacttacaacaaaccagatgtcagtctgcaggatgttcattctggacagagtggaaggtgatacttgttcccttaatgagtttaccataactggatcaacttatgcacctattggagaagtgcataaagatgataaaccagtgaattgtcaccagtatgatggtctggtagaattagcaacaatttgtgctctttgtaatgactctgctttggattacaatgaggcaaagggtgtgtatgaaaaagttggagaagctacagagactgctctcacttgcctagtagagaagatgaatgtatttgataccgaattgaagggtctttctaaaatagaacgtgcaaatgcctgcaactcagtcattaaacagctgatgaaaaaggaattcactctagagttttcacgtgacagaaagtcaatgtcggtttactgtacaccaaataaaccaagcaggacatcaatgagcaagatgtttgtgaagggtgctcctgaaggtgtcattgacaggtgcacccacattcgagttggaagtactaaggttcctatgacctctggagtcaaacagaagatcatgtctgtcattcgagagtggggtagtggcagcgacacactgcgatgcctggccctggccactcatgacaacccactgagaagagaagaaatgcaccttgaggactctgccaactttattaaatatgagaccaatctgaccttcgttggctgcgtgggcatgctggatcctccgagaatcgaggtggcctcctccgtgaagctgtgccggcaagcaggcatccgggtcatcatgatcactggggacaacaagggcactgctgtggccatctgtcgccgcatcggcatcttcgggcaggatgaggacgtgacgtcaaaagctttcacaggccgggagtttgatgaactcaacccctccgcccagcgagacgcctgcctgaacgcccgctgttttgctcgagttgaaccctcccacaagtctaaaatcgtagaatttcttcagtcttttgatgagattacagctatgactggcgatggcgtgaacgatgctcctgctctgaagaaagccgagattggcattgctatgggctctggcactgcggtggctaaaaccgcctctgagatggtcctggcggatgacaacttctccaccattgtggctgccgttgaggaggggcgggcaatctacaacaacatgaaacagttcatccgctacctcatctcgtccaacgtcggggaagttgtctgtattttcctgacagcagcccttggatttcccgaggctttgattcctgttcagctgctctgggtcaatctggtgacagatggcctgcctgccactgcactggggttcaaccctcctgatctggacatcatgaataaacctccccggaacccaaaggaaccattgatcagcgggtggctctttttccgttacttggctattggctgttacgtcggcgctgctaccgtgggtgctgctgcatggtggttcattgctgctgacggtggtccaagagtgtccttctaccagctgagtcatttcctacagtgtaaagaggacaacccggactttgaaggcgtggattgtgcaatctttgaatccccatacccgatgacaatggcgctctctgttctagtaactatagaaatgtgtaacgccctcaacagcttgtccgaaaaccagtccttgctgaggatgcccccctgggagaacatctggctcgtgggctccatctgcctgtccatgtcactccacttcctgatcctctatgtcgaacccttgccactcatcttccagatcacaccgctgaacgtgacccagtggctgatggtgctgaaaatctccttgcccgtgattctcatggatgagacgctcaagtttgtggcccgcaactacctggaacctgctggtaaagagtgtgtgcagcctgccaccaaatcctgctcgttctcggcatgcaccgatgggatttcctggccgtttgtgctgctcataatgcccctggtgatctgggtctatagcacagacactaactttagcgatatgttctggtcttgactgacagttttccataaagaagatgtttaacttaatcaattaatttttttattgtttaaagcaactgtctatttctgctgaattttcacatgaacatactggctggtgatggaggtttcatactctagattttgttttgctttttctgactccagtggggcaagattttccttttttatacacataattaaagtgtccattgacatgtacagagaactaacactattttatgcaaatatttttttgtagatgaaaaagcatgtacagtgttctgtttaatactcatccttgtataaaaaaaatagttgagccagcagacattgtcagcaaattaattggcagcagattttaggaaatgaatgtgtgtggttttttttctaaaactaaatagcatgtattgtgtcttttgcatgatgatccggatttaatttgatatcacagtctaatttttattcataagccaatttttctgcactgagcagagtcttgctacctcagtcagtattgttttggtttgctacttccctcacccactttggcctccgttcaccccaccccaccccacctctccccaccttacccccgccccgcttggcttcttctttaggattgtgatggttcgttctgtttacatcagttttaacgagaggtatgcctgtactcgcttgtgcagaaaacattgttccagattcaatcgactgggtttatgtcccttcacatagtttttaaggttatttatttaaatgtctaatgtattttattgtaacagacattgttttgccaacattgcctatttcagtggcacgtcatctagttttaaaaaaataaaacattttaaatggacagagaaaaataactgtcttgtctttaactcgtaagtggcttacctgggactaacagacatgtccaactttctctccagttcttagctcagaactttagttgtactctgcttgaggggaagaaggctcctgctctgctgtcaatactggagtaaccgcttcctaaaccattttgcagaaatgtaagggtgttcggttgcgtgcatgtgcgtttttagcaacacatctaccaaccctgtgcatgactgatgttggggaaaaagaaaagtaaaaaacttcccaactcactttgtgttatgtggaggaaatgtgtattaccaatggggttgttagcttttaaatcaaaatactgattacagatgtacaatttagcttaatcagaaagcctctccagagaagtttggtttctttgctgcaagaggaatgaggctctgtaaccttatctaagaacttggaagccgtcagccaagtcgccacatttctctgcaaaatgtcatagcttatataaatgtacagtattcaattgtaatgcatgccttcggttgtaagtagccagatccctctccagtgacattggaacatgctactttttaattggccctgtacagtttgcttatttataaattcattaaaaacactacaggtgttgaatggttaaaatgtaggcctccagttcattttcagttattttctgagtgtgcagacagctatttcgcactgtattaaatgtaacttatttaatgaaatcagaagcagtagacagatgttggtgcaatacaaatattgtgatgcatttatcttaataaaatgctaaatgtcaatttatcactgcgcatgtttgactttagactgtaaatagagatcagtttgtttctttctgtgctggtaacaatgagcgtcgcacagacatggtttcaggtaaataaatctattctatgataaa

SEQ ID NO: 315968 - DNA, 8554 bp, Homo sapiens
gcgcgcgggaggagggagccgggaggagggggcggggccgcgccgcccgcgccgcgctgggcgctctcggccaatgagcggcgtccacatgccgcggcggcggcgaaaggggaggcagcggccgataaatgctattagagcagccgccgcggagccgtccccgacgccacctccttttccttcgccgcagtttcctccgccgctgtcgggcgtgcggcgctgagggacccgggcgagcgcgccgcgcaccgccccgccggctcgcctccctcgccgcgttccgccctcagtggtctgccgggcgccccctcctccggcccgggcggggcctctgatcgcctcaagagagcggggagggggctcgggggccgcggcctgccctcccggcgggcggctgagggcgagggaggccctcccttctggcgaggggagggagggtgggtcaggagcccccaacccgccctgcggagctcggggccgcgcgaggggcggttgtctgggggagggggcgcggggtgattcagcgcccggcgaggcggaagcggccgcaagaggaggaggggagagcccgtccgcgcctgggctcccggggtggcacgagcccgcggccggagtgcgaggcggaggcgaggaggccgcggggacgggaggcgaggccggccgggcccccgaagccatggagaacgcgcacaccaagacggtggaggaggtgctgggccacttcggcgtcaacgagagtacggggctgagcctggaacaggtcaagaagcttaaggagagatggggctccaacgagttaccggctgaagaaggaaaaaccttgctggaacttgtgattgagcagtttgaagacttgctagttaggattttattactggcagcatgtatatcttttgttttggcttggtttgaagaaggtgaagaaacaattacagcctttgtagaaccttttgtaattttactcatattagtagccaatgcaattgtgggtgtatggcaggaaagaaatgctgaaaatgccatcgaagcccttaaggaatatgagcctgaaatgggcaaagtgtatcgacaggacagaaagagtgtgcagcggattaaagctaaagacatagttcctggtgatattgtagaaattgctgttggtgacaaagttcctgctgatataaggttaacttccatcaaatctaccacactaagagttgaccagtcaattctcacaggtgaatctgtctctgtcatcaagcacactgatcccgtccctgacccacgagctgtcaaccaagataaaaagaacatgctgttttctggtacaaacattgctgctgggaaagctatgggagtggtggtagcaactggagttaacaccgaaattggcaagatccgggatgaaatggtggcaacagaacaggagagaacaccccttcagcaaaaactagatgaatttggggaacagctttccaaagtcatctcccttatttgcattgcagtctggatcataaatattgggcacttcaatgacccggttcatggagggtcctggatcagaggtgctatttactactttaaaattgcagtggccctggctgtagcagccattcctgaaggtctgcctgcagtcatcaccacctgcctggctcttggaactcgcagaatggcaaagaaaaatgccattgttcgaagcctcccgtctgtggaaacccttggttgtacttctgttatctgctcagacaagactggtacacttacaacaaaccagatgtcagtctgcaggatgttcattctggacagagtggaaggtgatacttgttcccttaatgagtttaccataactggatcaacttatgcacctattggagaagtgcataaagatgataaaccagtgaattgtcaccagtatgatggtctggtagaattagcaacaatttgtgctctttgtaatgactctgctttggattacaatgaggcaaagggtgtgtatgaaaaagttggagaagctacagagactgctctcacttgcctagtagagaagatgaatgtatttgataccgaattgaagggtctttctaaaatagaacgtgcaaatgcctgcaactcagtcattaaacagctgatgaaaaaggaattcactctagagttttcacgtgacagaaagtcaatgtcggtttactgtacaccaaataaaccaagcaggacatcaatgagcaagatgtttgtgaagggtgctcctgaaggtgtcattgacaggtgcacccacattcgagttggaagtactaaggttcctatgacctctggagtcaaacagaagatcatgtctgtcattcgagagtggggtagtggcagcgacacactgcgatgcctggccctggccactcatgacaacccactgagaagagaagaaatgcaccttgaggactctgccaactttattaaatatgagaccaatctgaccttcgttggctgcgtgggcatgctggatcctccgagaatcgaggtggcctcctccgtgaagctgtgccggcaagcaggcatccgggtcatcatgatcactggggacaacaagggcactgctgtggccatctgtcgccgcatcggcatcttcgggcaggatgaggacgtgacgtcaaaagctttcacaggccgggagtttgatgaactcaacccctccgcccagcgagacgcctgcctgaacgcccgctgttttgctcgagttgaaccctcccacaagtctaaaatcgtagaatttcttcagtcttttgatgagattacagctatgactggcgatggcgtgaacgatgctcctgctctgaagaaagccgagattggcattgctatgggctctggcactgcggtggctaaaaccgcctctgagatggtcctggcggatgacaacttctccaccattgtggctgccgttgaggaggggcgggcaatctacaacaacatgaaacagttcatccgctacctcatctcgtccaacgtcggggaagttgtctgtattttcctgacagcagcccttggatttcccgaggctttgattcctgttcagctgctctgggtcaatctggtgacagatggcctgcctgccactgcactggggttcaaccctcctgatctggacatcatgaataaacctccccggaacccaaaggaaccattgatcagcgggtggctctttttccgttacttggctattggctgttacgtcggcgctgctaccgtgggtgctgctgcatggtggttcattgctgctgacggtggtccaagagtgtccttctaccagctgagtcatttcctacagtgtaaagaggacaacccggactttgaaggcgtggattgtgcaatctttgaatccccatacccgatgacaatggcgctctctgttctagtaactatagaaatgtgtaacgccctcaacagcttgtccgaaaaccagtccttgctgaggatgcccccctgggagaacatctggctcgtgggctccatctgcctgtccatgtcactccacttcctgatcctctatgtcgaacccttgccactcatcttccagatcacaccgctgaacgtgacccagtggctgatggtgctgaaaatctccttgcccgtgattctcatggatgagacgctcaagtttgtggcccgcaactacctggaacctgctggtaaagagtgtgtgcagcctgccaccaaatcctgctcgttctcggcatgcaccgatgggatttcctggccgtttgtgctgctcataatgcccctggtgatctgggtctatagcacagacactaactttagcgatatgttctggtcttgactgacagttttccataaagaagatgtttaacttaatcaattaatttttttattgtttaaagcaactgtctatttctgctgaattttcacatgaacatactggctggtgatggaggtttcatactctagattttgttttgctttttctgactccagtggggcaagattttccttttttatacacataattaaagtgtccattgacatgtacagagaactaacactattttatgcaaatatttttttgtagatgaaaaagcatgtacagtgttctgtttaatactcatccttgtataaaaaaaatagttgagccagcagacattgtcagcaaattaattggcagcagattttaggaaatgaatgtgtgtggttttttttctaaaactaaatagcatgtattgtgtcttttgcatgatgatccggatttaatttgatatcacagtctaatttttattcataagccaatttttctgcactgagcagagtcttgctacctcagtcagtattgttttggtttgctacttccctcacccactttggcctccgttcaccccaccccaccccacctctccccaccttacccccgccccgcttggcttcttctttaggattgtgatggttcgttctgtttacatcagttttaacgagaggtatgcctgtactcgcttgtgcagaaaacattgttccagattcaatcgactgggtttatgtcccttcacatagtttttaaggttatttatttaaatgtctaatgtattttattgtaacagacattgttttgccaacattgcctatttcagtggcacgtcatctagttttaaaaaaataaaacattttaaatggacagagaaaaataactgtcttgtctttaactcgtaagtggcttacctgggactaacagacatgtccaactttctctccagttcttagctcagaactttagttgtactctgcttgaggggaagaaggctcctgctctgctgtgtaggtagtcataggaattgtattcttaatgtacaggcactaattgtcatctgtgatgtacattttatgcaagtttctgctggcctggtatagagaacataagggcaagtgtgtatgtgtgtgtatgtgtgtgttttgtaaaatctgtaaatagcacatgaccaaatgaacatattgtatagaactatttttatttgaatgtggcactaaccaccaccaccgttactacgatcaatgtttgcgcatgttcgagatgagtctcaccaacagtgtgtaagtcattaacagtcctaactgtggtgttttcctccaatgccttccaacatccatcaactaacgtgagtattttcttcctgggatttggatgctttagcctaaaggtgactgccaccaagtgagataactgtatgtcactaacttataagccgcctccatggcagatgctgctgtgctccctgatgccctgtgagcaccggggttgcctgtggcgcctgccatgtgactcgggcgcagcatcagctggctggaggtgtggctttcatagacctccacaggctgcctaggacaagatgaccaggagggcccaagccagacaaaagccggagtggggagagaggcatttcagccagaccaacaggctgaaggagctgtgcagactattgctaaaatgagggttcgcagctgccaggagtcatcccagaacattgctacttatttattaaaaagctaaaaactagtgaaagcaagtaactgaaccagtgaactctgggtatcgataggttcgtcttaaataggccacttccccactcccccacccccccttgcttggtcttgtccttggtggctaagacttagctctgcaggggatgttaaagcacagttagtaggacgtggctctgcacagcccaaaaaccagcttactccttagccagggtgtgaggcctcgactatattcttcaaaatgtacttaggctctggttactgggatggccagtagatgtaatgcagatggttggagtttggggagggttaggaggcatcaagcaggacaaggtgctgctgagttcagagggcccacgttcaagggatggaggtggaacctggagaccgactcttaaaagcacagtccgtggttgggtgtggtggctcatgcctgtaagtaagtctcagccctttggaggccacagcagaaggattgcttgagcccaggtactcaaaccagcctgggcaacagagtgaggccctgtcaaaaaaaaatcagccttactgtgaagcctccaaggctgctcgcaggcagctgtggctctcgggaagggaggctgctttgcccagcagggaacatttggggcagggggtaaattttgccagtttgagcatcatgaggtgtaacaagaaatgggttgaatgggccaaatgcaaggagtgcatctctgggctgcaaactgacttgagtgctgcactattgctattccgtgcaaacaaaactcagcttttcctgactcagttccttgacttagtggcctttacaaaaaaagttgagtagtgtgtggcctgctgtcgcacagcccctagttagcttcatggtttctcagcttcagacccctccagcccacagaggagcccatggagggacccacttcccttggtccagacagctgggagtgggttaggcccactgctgttttgagcagggccacttgctccatttcactgaaggctttgctgggtgaaaacacttcagcatctcctcctcaggtcaacccataaagaccaggtccagcaccgtggtcttggcacatccctggcctcaggccctcacctaacagtgaggcagcagctgcccagccccgcaatgtgcctgctgtcaggcagctcttgcctgaaacttacttccacattctttcctgatgggcaggtggctgaaggcccagccatcagtgtcgcttgttgccaccccgtgcctcccttggcctctctgagctttgcccagaagaccaacaatcatacataccctaactgggacaccactctgcagaatgcagatgatccattctggaggaagctgtcccttgagctcagtgagctcccaggcaagcagggcatctggccgacttccctcacaacagctgctcccacatcccctcggactggagcttcagccctgactgaggtgggcagacctaagacctgagaccacaagattagctcagtgtctaccaagcatctagccactgtccagggccagagcataccacgtctgcagtgcctgtgagcagagccagcagttgccctgtgactgtaaccaccaaattgtccaaacacccgctgcagttagcaagaagggtaggcttcaccctcctttactgaggagaatgatgcggaggagtttcctctccagggctaggcaaggcaggcgagcagccagaagccgggtgcccacagggcagggacaggaaggctgtgctgctactggctgctcacttctccatcaacctcaccctctgcaccactaaccaagaccttgtcctcttgcctgtctcgctgctttcacagctgcaacgattgtgtctgcctcatggggttttcctccagagcctttattctgtagccagacgacacgaggagtctgtgtcactgagccagtgcttctagatgctaccctgtgtgggcggcacctcagggacagtaaatcagaaatgctggtcttgaaaccttgaaaagatcaagctgaatgttccttttcatctgtcgctgttgatcttcatctatttaaataggtattctaacgtttcctctctgtatttcatgaagctgatttcctctctctttccttttcagcaatactggagtaaccgcttcctaaaccattttgcagaaatgtaagggtgttcggttgcgtgcatgtgcgtttttagcaacacatctaccaaccctgtgcatgactgatgttggggaaaaagaaaagtaaaaaacttcccaactcactttgtgttatgtggaggaaatgtgtattaccaatggggttgttagcttttaaatcaaaatactgattacagatgtacaatttagcttaatcagaaagcctctccagagaagtttggtttctttgctgcaagaggaatgaggctctgtaaccttatctaagaacttggaagccgtcagccaagtcgccacatttctctgcaaaatgtcatagcttatataaatgtacagtattcaattgtaatgcatgccttcggttgtaagtagccagatccctctccagtgacattggaacatgctactttttaattggccctgtacagtttgcttatttataaattcattaaaaacactacaggtgttgaatggttaaaatgtaggcctccagttcattttcagttattttctgagtgtgcagacagctatttcgcactgtattaaatgtaacttatttaatgaaatcagaagcagtagacagatgttggtgcaatacaaatattgtgatgcatttatcttaataaaatgctaaatgtcaatttatcactgcgcatgtttgactttagactgtaaatagagatcagtttgtttctttctgtgctggtaacaatgagcgtcgcacagacatggtttcaggtaaataaatctattctatgataaaaaaaaacgacaacaaaaatctcacaaaaaaaaacaaaccacaaaagatgccagaccaaaaataaacccccaagaaaaaaaaagggcacccaaaacccagcacccaaaagcgggcccaaaccaa

SEQ ID NO: 315969 - DNA, 6616 bp, Homo sapiens
gcgcgcgggaggagggagccgggaggagggggcggggccgcgccgcccgcgccgcgctgggcgctctcggccaatgagcggcgtccacatgccgcggcggcggcgaaaggggaggcagcggccgataaatgctattagagcagccgccgcggagccgtccccgacgccacctccttttccttcgccgcagtttcctccgccgctgtcgggcgtgcggcgctgagggacccgggcgagcgcgccgcgcaccgccccgccggctcgcctccctcgccgcgttccgccctcagtggtctgccgggcgccccctcctccggcccgggcggggcctctgatcgcctcaagagagcggggagggggctcgggggccgcggcctgccctcccggcgggcggctgagggcgagggaggccctcccttctggcgaggggagggagggtgggtcaggagcccccaacccgccctgcggagctcggggccgcgcgaggggcggttgtctgggggagggggcgcggggtgattcagcgcccggcgaggcggaagcggccgcaagaggaggaggggagagcccgtccgcgcctgggctcccggggtggcacgagcccgcggccggagtgcgaggcggaggcgaggaggccgcggggacgggaggcgaggccggccgggcccccgaagccatggagaacgcgcacaccaagacggtggaggaggtgctgggccacttcggcgtcaacgagagtacggggctgagcctggaacaggtcaagaagcttaaggagagatggggctccaacgagttaccggctgaagaaggaaaaaccttgctggaacttgtgattgagcagtttgaagacttgctagttaggattttattactggcagcatgtatatcttttgttttggcttggtttgaagaaggtgaagaaacaattacagcctttgtagaaccttttgtaattttactcatattagtagccaatgcaattgtgggtgtatggcaggaaagaaatgctgaaaatgccatcgaagcccttaaggaatatgagcctgaaatgggcaaagtgtatcgacaggacagaaagagtgtgcagcggattaaagctaaagacatagttcctggtgatattgtagaaattgctgttggtgacaaagttcctgctgatataaggttaacttccatcaaatctaccacactaagagttgaccagtcaattctcacaggtgaatctgtctctgtcatcaagcacactgatcccgtccctgacccacgagctgtcaaccaagataaaaagaacatgctgttttctggtacaaacattgctgctgggaaagctatgggagtggtggtagcaactggagttaacaccgaaattggcaagatccgggatgaaatggtggctctttttccgttacttggctattggctgttacgtcggcgctgctaccgtgggtgctgctgcatggtggttcattgctgctgacggtggtccaagagtgtccttctaccagctgagtcatttcctacagtgtaaagaggacaacccggactttgaaggcgtggattgtgcaatctttgaatccccatacccgatgacaatggcgctctctgttctagtaactatagaaatgtgtaacgccctcaacagaacatctggctcgtgggctccatctgcctgtccatgtcactccacttcctgatcctctatgtcgaacccttgccactcatcttccagatcacaccgctgaacgtgacccagtggctgatggtgctgaaaatctccttgcccgtgattctcatggatgagacgctcaagtttgtggcccgcaactacctggaacctgctggtaaagagtgtgtgcagcctgccaccaaatcctgctcgttctcggcatgcaccgatgggatttcctggccgtttgtgctgctcataatgcccctggtgatctgggtctatagcacagacactaactttagcgatatgttctggtcttgactgacagttttccataaagaagatgtttaacttaatcaattaatttttttattgtttaaagcaactgtctatttctgctgaattttcacatgaacatactggctggtgatggaggtttcatactctagattttgttttgctttttctgactccagtggggcaagattttccttttttatacacataattaaagtgtccattgacatgtacagagaactaacactattttatgcaaatatttttttgtagatgaaaaagcatgtacagtgttctgtttaatactcatccttgtataaaaaaaatagttgagccagcagacattgtcagcaaattaattggcagcagattttaggaaatgaatgtgtgtggttttttttctaaaactaaatagcatgtattgtgtcttttgcatgatgatccggatttaatttgatatcacagtctaatttttattcataagccaatttttctgcactgagcagagtcttgctacctcagtcagtattgttttggtttgctacttccctcacccactttggcctccgttcaccccaccccaccccacctctccccaccttacccccgccccgcttggcttcttctttaggattgtgatggttcgttctgtttacatcagttttaacgagaggtatgcctgtactcgcttgtgcagaaaacattgttccagattcaatcgactgggtttatgtcccttcacatagtttttaaggttatttatttaaatgtctaatgtattttattgtaacagacattgttttgccaacattgcctatttcagtggcacgtcatctagttttaaaaaaataaaacattttaaatggacagagaaaaataactgtcttgtctttaactcgtaagtggcttacctgggactaacagacatgtccaactttctctccagttcttagctcagaactttagttgtactctgcttgaggggaagaaggctcctgctctgctgtgtaggtagtcataggaattgtattcttaatgtacaggcactaattgtcatctgtgatgtacattttatgcaagtttctgctggcctggtatagagaacataagggcaagtgtgtatgtgtgtgtatgtgtgtgttttgtaaaatctgtaaatagcacatgaccaaatgaacatattgtatagaactatttttatttgaatgtggcactaaccaccaccaccgttactacgatcaatgtttgcgcatgttcgagatgagtctcaccaacagtgtgtaagtcattaacagtcctaactgtggtgttttcctccaatgccttccaacatccatcaactaacgtgagtattttcttcctgggatttggatgctttagcctaaaggtgactgccaccaagtgagataactgtatgtcactaacttataagccgcctccatggcagatgctgctgtgctccctgatgccctgtgagcaccggggttgcctgtggcgcctgccatgtgactcgggcgcagcatcagctggctggaggtgtggctttcatagacctccacaggctgcctaggacaagatgaccaggagggcccaagccagacaaaagccggagtggggagagaggcatttcagccagaccaacaggctgaaggagctgtgcagactattgctaaaatgagggttcgcagctgccaggagtcatcccagaacattgctacttatttattaaaaagctaaaaactagtgaaagcaagtaactgaaccagtgaactctgggtatcgataggttcgtcttaaataggccacttccccactcccccacccccccttgcttggtcttgtccttggtggctaagacttagctctgcaggggatgttaaagcacagttagtaggacgtggctctgcacagcccaaaaaccagcttactccttagccagggtgtgaggcctcgactatattcttcaaaatgtacttaggctctggttactgggatggccagtagatgtaatgcagatggttggagtttggggagggttaggaggcatcaagcaggacaaggtgctgctgagttcagagggcccacgttcaagggatggaggtggaacctggagaccgactcttaaaagcacagtccgtggttgggtgtggtggctcatgcctgtaagtaagtctcagccctttggaggccacagcagaaggattgcttgagcccaggtactcaaaccagcctgggcaacagagtgaggccctgtcaaaaaaaaatcagccttactgtgaagcctccaaggctgctcgcaggcagctgtggctctcgggaagggaggctgctttgcccagcagggaacatttggggcagggggtaaattttgccagtttgagcatcatgaggtgtaacaagaaatgggttgaatgggccaaatgcaaggagtgcatctctgggctgcaaactgacttgagtgctgcactattgctattccgtgcaaacaaaactcagcttttcctgactcagttccttgacttagtggcctttacaaaaaaagttgagtagtgtgtggcctgctgtcgcacagcccctagttagcttcatggtttctcagcttcagacccctccagcccacagaggagcccatggagggacccacttcccttggtccagacagctgggagtgggttaggcccactgctgttttgagcagggccacttgctccatttcactgaaggctttgctgggtgaaaacacttcagcatctcctcctcaggtcaacccataaagaccaggtccagcaccgtggtcttggcacatccctggcctcaggccctcacctaacagtgaggcagcagctgcccagccccgcaatgtgcctgctgtcaggcagctcttgcctgaaacttacttccacattctttcctgatgggcaggtggctgaaggcccagccatcagtgtcgcttgttgccaccccgtgcctcccttggcctctctgagctttgcccagaagaccaacaatcatacataccctaactgggacaccactctgcagaatgcagatgatccattctggaggaagctgtcccttgagctcagtgagctcccaggcaagcagggcatctggccgacttccctcacaacagctgctcccacatcccctcggactggagcttcagccctgactgaggtgggcagacctaagacctgagaccacaagattagctcagtgtctaccaagcatctagccactgtccagggccagagcataccacgtctgcagtgcctgtgagcagagccagcagttgccctgtgactgtaaccaccaaattgtccaaacacccgctgcagttagcaagaagggtaggcttcaccctcctttactgaggagaatgatgcggaggagtttcctctccagggctaggcaaggcaggcgagcagccagaagccgggtgcccacagggcagggacaggaaggctgtgctgctactggctgctcacttctccatcaacctcaccctctgcaccactaaccaagaccttgtcctcttgcctgtctcgctgctttcacagctgcaacgattgtgtctgcctcatggggttttcctccagagcctttattctgtagccagacgacacgaggagtctgtgtcactgagccagtgcttctagatgctaccctgtgtgggcggcacctcagggacagtaaatcagaaatgctggtcttgaaaccttgaaaagatcaagctgaatgttccttttcatctgtcgctgttgatcttcatctatttaaataggtattctaacgtttcctctctgtatttcatgaagctgatttcctctctctttccttttcagcaatactggagtaaccgcttcctaaaccattttgcagaaatgtaagggtgttcggttgcgtgcatgtgcgtttttagcaacacatctaccaaccctgtgcatgactgatgttggggaaaaagaaaagtaaaaaacttcccaactcactttgtgttatgtggaggaaatgtgtattaccaatggggttgttagcttttaaatcaaaatactgattacagatgtacaatttagcttaatcagaaagcctctccagagaagtttggtttctttgctgcaagaggaatgaggctctgtaaccttatctaagaacttggaagccgtcagccaagtcgccacatttctctgcaaaatgtcatagcttatataaatgtacagtattcaattgtaatgcatgccttcggttgtaagtagccagatccctctccagtgacattggaacatgctactttttaattggccctgtacagtttgcttatttataaattcattaaaaacactacaggtgttgaatggttaaaatgtaggcctccagttcattttcagttattttctgagtgtgcagacagctatttcgcactgtattaaatgtaacttatttaatgaaatcagaagcagtagacagatgttggtgcaatacaaatattgtgatgcatttatcttaataaaatgctaaatgtcaatttatcactgcgcatgtttgactttagactgtaaatagagatcagtttgtttctttctgtgctggtaacaatgagcgtcgcacagacatggtttcaggtaaataaatctattctatgataaa

SEQ ID NO: 315970 - DNA, 4955 bp, Homo sapiens
acgacccgtttatgagtggcagtgactccacttcctgatctctatgtcggaccctgccactcatcttccagatcacaccgctgaacgtgacccagtggctgatggtgctgaaaatctccttgcccgtgattctcatggatgagacgctcaagtttgtggcccgcaactacctggaacctgctggtaaagagtgtgtgcagcctgccaccaaatcctgctcgttctcggcatgcaccgatgggatttcctggccgtttgtgctgctcataatgcccctggtgatctgggtctatagcacagacactaactttagcgatatgttctggtcttgactgacagttttccataaagaagatgtttaacttaatcaattaatttttttattgtttaaagcaactgtctatttctgctgaattttcacatgaacatactggctggtgatggaggtttcatactctagattttgttttgctttttctgactccagtggggcaagattttccttttttatacacataattaaagtgtccattgacatgtacagagaactaacactattttatgcaaatatttttttgtagatgaaaaagcatgtacagtgttctgtttaatactcatccttgtataaaaaaaatagttgagccagcagacattgtcagcaaattaattggcagcagattttaggaaatgaatgtgtgtggttttttttctaaaactaaatagcatgtattgtgtcttttgcatgatgatccggatttaatttgatatcacagtctaatttttattcataagccaatttttctgcactgagcagagtcttgctacctcagtcagtattgttttggtttgctacttccctcacccactttggcctccgttcaccccaccccaccccacctctccccaccttacccccgccccgcttggcttcttctttaggattgtgatggttcgttctgtttacatcagttttaacgagaggtatgcctgtactcgcttgtgcagaaaacattgttccagattcaatcgactgggtttatgtcccttcacatagtttttaaggttatttatttaaatgtctaatgtattttattgtaacagacattgttttgccaacattgcctatttcagtggcacgtcatctagttttaaaaaaataaaacattttaaatggacagagaaaaataactgtcttgtctttaactcgtaagtggcttacctgggactaacagacatgtccaactttctctccagttcttagctcagaactttagttgtactctgcttgaggggaagaaggctcctgctctgctgtgtaggtagtcataggaattgtattcttaatgtacaggcactaattgtcatctgtgatgtacattttatgcaagtttctgctggcctggtatagagaacataagggcaagtgtgtatgtgtgtgtatgtgtgtgttttgtaaaatctgtaaatagcacatgaccaaatgaacatattgtatagaactatttttatttgaatgtggcactaaccaccaccaccgttactacgatcaatgtttgcgcatgttcgagatgagtctcaccaacagtgtgtaagtcattaacagtcctaactgtggtgttttcctccaatgccttccaacatccatcaactaacgtgagtattttcttcctgggatttggatgctttagcctaaaggtgactgccaccaagtgagataactgtatgtcactaacttataagccgcctccatggcagatgctgctgtgctccctgatgccctgtgagcaccggggttgcctgtggcgcctgccatgtgactcgggcgcagcatcagctggctggaggtgtggctttcatagacctccacaggctgcctaggacaagatgaccaggagggcccaagccagacaaaagccggagtggggagagaggcatttcagccagaccaacaggctgaaggagctgtgcagactattgctaaaatgagggttcgcagctgccaggagtcatcccagaacattgctacttatttattaaaaagctaaaaactagtgaaagcaagtaactgaaccagtgaactctgggtatcgataggttcgtcttaaataggccacttccccactcccccacccccccttgcttggtcttgtccttggtggctaagacttagctctgcaggggatgttaaagcacagttagtaggacgtggctctgcacagcccaaaaaccagcttactccttagccagggtgtgaggcctcgactatattcttcaaaatgtacttaggctctggttactgggatggccagtagatgtaatgcagatggttggagtttggggagggttaggaggcatcaagcaggacaaggtgctgctgagttcagagggcccacgttcaagggatggaggtggaacctggagaccgactcttaaaagcacagtccgtggttgggtgtggtggctcatgcctgtaagtaagtctcagccctttggaggccacagcagaaggattgcttgagcccaggtactcaaaccagcctgggcaacagagtgaggccctgtcaaaaaaaaatcagccttactgtgaagcctccaaggctgctcgcaggcagctgtggctctcgggaagggaggctgctttgcccagcagggaacatttggggcagggggtaaattttgccagtttgagcatcatgaggtgtaacaagaaatgggttgaatgggccaaatgcaaggagtgcatctctgggctgcaaactgacttgagtgctgcactattgctattccgtgcaaacaaaactcagcttttcctgactcagttccttgacttagtggcctttacaaaaaaagttgagtagtgtgtggcctgctgtcgcacagcccctagttagcttcatggtttctcagcttcagacccctccagcccacagaggagcccatggagggacccacttcccttggtccagacagctgggagtgggttaggcccactgctgttttgagcagggccacttgctccatttcactgaaggctttgctgggtgaaaacacttcagcatctcctcctcaggtcaacccataaagaccaggtccagcaccgtggtcttggcacatccctggcctcaggccctcacctaacagtgaggcagcagctgcccagccccgcaatgtgcctgctgtcaggcagctcttgcctgaaacttacttccacattctttcctgatgggcaggtggctgaaggcccagccatcagtgtcgcttgttgccaccccgtgcctcccttggcctctctgagctttgcccagaagaccaacaatcatacataccctaactgggacaccactctgcagaatgcagatgatccattctggaggaagctgtcccttgagctcagtgagctcccaggcaagcagggcatctggccgacttccctcacaacagctgctcccacatcccctcggactggagcttcagccctgactgaggtgggcagacctaagacctgagaccacaagattagctcagtgtctaccaagcatctagccactgtccagggccagagcataccacgtctgcagtgcctgtgagcagagccagcagttgccctgtgactgtaaccaccaaattgtccaaacacccgctgcagttagcaagaagggtaggcttcaccctcctttactgaggagaatgatgcggaggagtttcctctccagggctaggcaaggcaggcgagcagccagaagccgggtgcccacagggcagggacaggaaggctgtgctgctactggctgctcacttctccatcaacctcaccctctgcaccactaaccaagaccttgtcctcttgcctgtctcgctgctttcacagctgcaacgattgtgtctgcctcatggggttttcctccagagcctttattctgtagccagacgacacgaggagtctgtgtcactgagccagtgcttctagatgctaccctgtgtgggcggcacctcagggacagtaaatcagaaatgctggtcttgaaaccttgaaaagatcaagctgaatgttccttttcatctgtcgctgttgatcttcatctatttaaataggtattctaacgtttcctctctgtatttcatgaagctgatttcctctctctttccttttcagcaatactggagtaaccgcttcctaaaccattttgcagaaatgtaagggtgttcggttgcgtgcatgtgcgtttttagcaacacatctaccaaccctgtgcatgactgatgttggggaaaaagaaaagtaaaaaacttcccaactcactttgtgttatgtggaggaaatgtgtattaccaatggggttgttagcttttaaatcaaaatactgattacagatgtacaatttagcttaatcagaaagcctctccagagaagtttggtttctttgctgcaagaggaatgaggctctgtaaccttatctaagaacttggaagccgtcagccaagtcgccacatttctctgcaaaatgtcatagcttatataaatgtacagtattcaattgtaatgcatgccttcggttgtaagtagccagatccctctccagtgacattggaacatgctactttttaattggccctgtacagtttgcttatttataaattcattaaaaacactacaggtgttgaatggttaaaatgtaggcctccagttcattttcagttattttctgagtgtgcagacagctatttcgcactgtattaaatgtaacttatttaatgaaatcagaagcagtagacagatgttggtgcaatacaaatattgtgatgcatttatcttaataaaatgctaaatgtcaatttatcactgcgcatgtttgactttagactgtaaatagagatcagtttgtttctttctgtgctggtaacaatgagcgtcgcacagacatggtttcaggtaaataaatctattctatgataaa

SEQ ID NO: 315971 - DNA, 8375 bp, Homo sapiens
gcgcgcgggaggagggagccgggaggagggggcggggccgcgccgcccgcgccgcgctgggcgctctcggccaatgagcggcgtccacatgccgcggcggcggcgaaaggggaggcagcggccgataaatgctattagagcagccgccgcggagccgtccccgacgccacctccttttccttcgccgcagtttcctccgccgctgtcgggcgtgcggcgctgagggacccgggcgagcgcgccgcgcaccgccccgccggctcgcctccctcgccgcgttccgccctcagtggtctgccgggcgccccctcctccggcccgggcggggcctctgatcgcctcaagagagcggggagggggctcgggggccgcggcctgccctcccggcgggcggctgagggcgagggaggccctcccttctggcgaggggagggagggtgggtcaggagcccccaacccgccctgcggagctcggggccgcgcgaggggcggttgtctgggggagggggcgcggggtgattcagcgcccggcgaggcggaagcggccgcaagaggaggaggggagagcccgtccgcgcctgggctcccggggtggcacgagcccgcggccggagtgcgaggcggaggcgaggaggccgcggggacgggaggcgaggccggccgggcccccgaagccatggagaacgcgcacaccaagacggtggaggaggtgctgggccacttcggcgtcaacgagagtacggggctgagcctggaacaggtcaagaagcttaaggagagatggggctccaacgagttaccggctgaagaaggaaaaaccttgctggaacttgtgattgagcagtttgaagacttgctagttaggattttattactggcagcatgtatatcttttgttttggcttggtttgaagaaggtgaagaaacaattacagcctttgtagaaccttttgtaattttactcatattagtagccaatgcaattgtgggtgtatggcaggaaagaaatgctgaaaatgccatcgaagcccttaaggaatatgagcctgaaatgggcaaagtgtatcgacaggacagaaagagtgtgcagcggattaaagctaaagacatagttcctggtgatattgtagaaattgctgttggtgacaaagttcctgctgatataaggttaacttccatcaaatctaccacactaagagttgaccagtcaattctcacaggtgaatctgtctctgtcatcaagcacactgatcccgtccctgacccacgagctgtcaaccaagataaaaagaacatgctgttttctggtacaaacattgctgctgggaaagctatgggagtggtggtagcaactggagttaacaccgaaattggcaagatccgggatgaaatggtggcaacagaacaggagagaacaccccttcagcaaaaactagatgaatttggggaacagctttccaaagtcatctcccttatttgcattgcagtctggatcataaatattgggcacttcaatgacccggttcatggagggtcctggatcagaggtgctatttactactttaaaattgcagtggccctggctgtagcagccattcctgaaggtctgcctgcagtcatcaccacctgcctggctcttggaactcgcagaatggcaaagaaaaatgccattgttcgaagcctcccgtctgtggaaacccttggttgtacttctgttatctgctcagacaagactggtacacttacaacaaaccagatgtcagtctgcaggatgttcattctggacagagtggaaggtgatacttgttcccttaatgagtttaccataactggatcaacttatgcacctattggagaagtgcataaagatgataaaccagtgaattgtcaccagtatgatggtctggtagaattagcaacaatttgtgctctttgtaatgactctgctttggattacaatgaggcaaagggtgtgtatgaaaaagttggagaagctacagagactgctctcacttgcctagtagagaagatgaatgtatttgataccgaattgaagggtctttctaaaatagaacgtgcaaatgcctgcaactcagtcattaaacagctgatgaaaaaggaattcactctagagttttcacgtgacagaaagtcaatgtcggtttactgtacaccaaataaaccaagcaggacatcaatgagcaagatgtttgtgaagggtgctcctgaaggtgtcattgacaggtgcacccacattcgagttggaagtactaaggttcctatgacctctggagtcaaacagaagatcatgtctgtcattcgagagtggggtagtggcagcgacacactgcgatgcctggccctggccactcatgacaacccactgagaagagaagaaatgcaccttgaggactctgccaactttattaaatatgagaccaatctgaccttcgttggctgcgtgggcatgctggatcctccgagaatcgaggtggcctcctccgtgaagctgtgccggcaagcaggcatccgggtcatcatgatcactggggacaacaagggcactgctgtggccatctgtcgccgcatcggcatcttcgggcaggatgaggacgtgacgtcaaaagctttcacaggccgggagtttgatgaactcaacccctccgcccagcgagacgcctgcctgaacgcccgctgttttgctcgagttgaaccctcccacaagtctaaaatcgtagaatttcttcagtcttttgatgagattacagctatgactggcgatggcgtgaacgatgctcctgctctgaagaaagccgagattggcattgctatgggctctggcactgcggtggctaaaaccgcctctgagatggtcctggcggatgacaacttctccaccattgtggctgccgttgaggaggggcgggcaatctacaacaacatgaaacagttcatccgctacctcatctcgtccaacgtcggggaagttgtctgtattttcctgacagcagcccttggatttcccgaggctttgattcctgttcagctgctctgggtcaatctggtgacagatggcctgcctgccactgcactggggttcaaccctcctgatctggacatcatgaataaacctccccggaacccaaaggaaccattgatcagcgggtggctctttttccgttacttggctattggctgttacgtcggcgctgctaccgtgggtgctgctgcatggtggttcattgctgctgacggtggtccaagagtgtccttctaccagctgagtcatttcctacagtgtaaagaggacaacccggactttgaaggcgtggattgtgcaatctttgaatccccatacccgatgacaatggcgctctctgttctagtaactatagaaatgtgtaacgccctcaacagcttgtccgaaaaccagtccttgctgaggatgcccccctgggagaacatctggctcgtgggctccatctgcctgtccatgtcactccacttcctgatcctctatgtcgaacccttgccactcatcttccagatcacaccgctgaacgtgacccagtggctgatggtgctgaaaatctccttgcccgtgattctcatggatgagacgctcaagtttgtggcccgcaactacctggaacctgctggtaaagagtgtgtgcagcctgccaccaaatcctgctcgttctcggcatgcaccgatgggatttcctggccgtttgtgctgctcataatgcccctggtgatctgggtctatagcacagacactaactttagcgatatgttctggtcttgactgacagttttccataaagaagatgtttaacttaatcaattaatttttttattgtttaaagcaactgtctatttctgctgaattttcacatgaacatactggctggtgatggaggtttcatactctagattttgttttgctttttctgactccagtggggcaagattttccttttttatacacataattaaagtgtccattgacatgtacagagaactaacactattttatgcaaatatttttttgtagatgaaaaagcatgtacagtgttctgtttaatactcatccttgtataaaaaaaatagttgagccagcagacattgtcagcaaattaattggcagcagattttaggaaatgaatgtgtgtggttttttttctaaaactaaatagcatgtattgtgtcttttgcatgatgatccggatttaatttgatatcacagtctaatttttattcataagccaatttttctgcactgagcagagtcttgctacctcagtcagtattgttttggtttgctacttccctcacccactttggcctccgttcaccccaccccaccccacctctccccaccttacccccgccccgcttggcttcttctttaggattgtgatggttcgttctgtttacatcagttttaacgagaggtatgcctgtactcgcttgtgcagaaaacattgttccagattcaatcgactgggtttatgtcccttcacatagtttttaaggttatttatttaaatgtctaatgtattttattgtaacagacattgttttgccaacattgcctatttcagtggcacgtcatctagttttaaaaaaataaaacattttaaatggacagagaaaaataactgtcttgtctttaactcgtaagtggcttacctgggactaacagacatgtccaactttctctccagttcttagctcagaactttagttgtactctgcttgaggggaagaaggctcctgctctgctgtgtaggtagtcataggaattgtattcttaatgtacaggcactaattgtcatctgtgatgtacattttatgcaagtttctgctggcctggtatagagaacataagggcaagtgtgtatgtgtgtgtatgtgtgtgttttgtaaaatctgtaaatagcacatgaccaaatgaacatattgtatagaactatttttatttgaatgtggcactaaccaccaccaccgttactacgatcaatgtttgcgcatgttcgagatgagtctcaccaacagtgtgtaagtcattaacagtcctaactgtggtgttttcctccaatgccttccaacatccatcaactaacgtgagtattttcttcctgggatttggatgctttagcctaaaggtgactgccaccaagtgagataactgtatgtcactaacttataagccgcctccatggcagatgctgctgtgctccctgatgccctgtgagcaccggggttgcctgtggcgcctgccatgtgactcgggcgcagcatcagctggctggaggtgtggctttcatagacctccacaggctgcctaggacaagatgaccaggagggcccaagccagacaaaagccggagtggggagagaggcatttcagccagaccaacaggctgaaggagctgtgcagactattgctaaaatgagggttcgcagctgccaggagtcatcccagaacattgctacttatttattaaaaagctaaaaactagtgaaagcaagtaactgaaccagtgaactctgggtatcgataggttcgtcttaaataggccacttccccactcccccacccccccttgcttggtcttgtccttggtggctaagacttagctctgcaggggatgttaaagcacagttagtaggacgtggctctgcacagcccaaaaaccagcttactccttagccagggtgtgaggcctcgactatattcttcaaaatgtacttaggctctggttactgggatggccagtagatgtaatgcagatggttggagtttggggagggttaggaggcatcaagcaggacaaggtgctgctgagttcagagggcccacgttcaagggatggaggtggaacctggagaccgactcttaaaagcacagtccgtggttgggtgtggtggctcatgcctgtaagtaagtctcagccctttggaggccacagcagaaggattgcttgagcccaggtactcaaaccagcctgggcaacagagtgaggccctgtcaaaaaaaaatcagccttactgtgaagcctccaaggctgctcgcaggcagctgtggctctcgggaagggaggctgctttgcccagcagggaacatttggggcagggggtaaattttgccagtttgagcatcatgaggtgtaacaagaaatgggttgaatgggccaaatgcaaggagtgcatctctgggctgcaaactgacttgagtgctgcactattgctattccgtgcaaacaaaactcagcttttcctgactcagttccttgacttagtggcctttacaaaaaaagttgagtagtgtgtggcctgctgtcgcacagcccctagttagcttcatggtttctcagcttcagacccctccagcccacagaggagcccatggagggacccacttcccttggtccagacagctgggagtgggttaggcccactgctgttttgagcagggccacttgctccatttcactgaaggctttgctgggtgaaaacacttcagcatctcctcctcaggtcaacccataaagaccaggtccagcaccgtggtcttggcacatccctggcctcaggccctcacctaacagtgaggcagcagctgcccagccccgcaatgtgcctgctgtcaggcagctcttgcctgaaacttacttccacattctttcctgatgggcaggtggctgaaggcccagccatcagtgtcgcttgttgccaccccgtgcctcccttggcctctctgagctttgcccagaagaccaacaatcatacataccctaactgggacaccactctgcagaatgcagatgatccattctggaggaagctgtcccttgagctcagtgagctcccaggcaagcagggcatctggccgacttccctcacaacagctgctcccacatcccctcggactggagcttcagccctgactgaggtgggcagacctaagacctgagaccacaagattagctcagtgtctaccaagcatctagccactgtccagggccagagcataccacgtctgcagtgcctgtgagcagagccagcagttgccctgtgactgtaaccaccaaattgtccaaacacccgctgcagttagcaagaagggtaggcttcaccctcctttactgaggagaatgatgcggaggagtttcctctccagggctaggcaaggcaggcgagcagccagaagccgggtgcccacagggcagggacaggaaggctgtgctgctactggctgctcacttctccatcaacctcaccctctgcaccactaaccaagaccttgtcctcttgcctgtctcgctgctttcacagctgcaacgattgtgtctgcctcatggggttttcctccagagcctttattctgtagccagacgacacgaggagtctgtgtcactgagccagtgcttctagatgctaccctgtgtgggcggcacctcagggacagtaaatcagaaatgctggtcttgaaaccttgaaaagatcaagctgaatgttccttttcatctgtcgctgttgatcttcatctatttaaataggtattctaacgtttcctctctgtatttcatgaagctgatttcctctctctttccttttcagcaatactggagtaaccgcttcctaaaccattttgcagaaatgtaagggtgttcggttgcgtgcatgtgcgtttttagcaacacatctaccaaccctgtgcatgactgatgttggggaaaaagaaaagtaaaaaacttcccaactcactttgtgttatgtggaggaaatgtgtattaccaatggggttgttagcttttaaatcaaaatactgattacagatgtacaatttagcttaatcagaaagcctctccagagaagtttggtttctttgctgcaagaggaatgaggctctgtaaccttatctaagaacttggaagccgtcagccaagtcgccacatttctctgcaaaatgtcatagcttatataaatgtacagtattcaattgtaatgcatgccttcggttgtaagtagccagatccctctccagtgacattggaacatgctactttttaattggccctgtacagtttgcttatttataaattcattattttctgagtgtgcagacagctatttcgcactgtattaaatgtaacttatttaatgaaatcagaagcagtagacagatgttggtgcaatacaaatattgtgatgcatttatcttaataaaatgctaaatgtcaatttatcactgcgcatgtttgactttagactgtaaatagagatcagtttgtttctttctgtgctggtaacaatgagcgtcgcacagacatggtttcaggtaaataaatctattctatgataaa

SEQ ID NO: 315972 - DNA, 7949 bp, Homo sapiens
gcgcgcgggaggagggagccgggaggagggggcggggccgcgccgcccgcgccgcgctgggcgctctcggccaatgagcggcgtccacatgccgcggcggcggcgaaaggggaggcagcggccgataaatgctattagagcagccgccgcggagccgtccccgacgccacctccttttccttcgccgcagtttcctccgccgctgtcgggcgtgcggcgctgagggacccgggcgagcgcgccgcgcaccgccccgccggctcgcctccctcgccgcgttccgccctcagtggtctgccgggcgccccctcctccggcccgggcggggcctctgatcgcctcaagagagcggggagggggctcgggggccgcggcctgccctcccggcgggcggctgagggcgagggaggccctcccttctggcgaggggagggagggtgggtcaggagcccccaacccgccctgcggagctcggggccgcgcgaggggcggttgtctgggggagggggcgcggggtgattcagcgcccggcgaggcggaagcggccgcaagaggaggaggggagagcccgtccgcgcctgggctcccggggtggcacgagcccgcggccggagtgcgaggcggaggcgaggaggccgcggggacgggaggcgaggccggccgggcccccgaagccatggagaacgcgcacaccaagacggtggaggaggtgctgggccacttcggcgtcaacgagagtacggggctgagcctggaacaggtcaagaagcttaaggagagatggggctccaacgagttaccggctgaagaaggaaaaaccttgctggaacttgtgattgagcagtttgaagacttgctagttaggattttattactggcagcatgtatatcttttgttttggcttggtttgaagaaggtgaagaaacaattacagcctttgtagaaccttttgtaattttactcatattagtagccaatgcaattgtgggtgtatggcaggaaagaaatgctgaaaatgccatcgaagcccttaaggaatatgagcctgaaatgggcaaagtgtatcgacaggacagaaagagtgtgcagcggattaaagctaaagacatagttcctggtgatattgtagaaattgctgttggtgacaaagttcctgctgatataaggttaacttccatcaaatctaccacactaagagttgaccagtcaattctcacaggtgaatctgtctctgtcatcaagcacactgatcccgtccctgacccacgagctgtcaaccaagataaaaagaacatgctgttttctggtacaaacattgctgctgggaaagctatgggagtggtggtagcaactggagttaacaccgaaattggcaagatccgggatgaaatggtggcaacagaacaggagagaacaccccttcagcaaaaactagatgaatttggggaacagctttccaaagtcatctcccttatttgcattgcagtctggatcataaatattgggcacttcaatgacccggttcatggagggtcctggatcagaggtgctatttactactttaaaattgcagtggccctggctgtagcagccattcctgaaggtctgcctgcagtcatcaccacctgcctggctcttggaactcgcagaatggcaaagaaaaatgccattgttcgaagcctcccgtctgtggaaacccttggttgtacttctgttatctgctcagacaagactggtacacttacaacaaaccagatgtcagtctgcaggatgttcattctggacagagtggaaggtgatacttgttcccttaatgagtttaccataactggatcaacttatgcacctattggagaagtgcataaagatgataaaccagtgaattgtcaccagtatgatggtctggtagaattagcaacaatttgtgctctttgtaatgactctgctttggattacaatgaggcaaagggtgtgtatgaaaaagttggagaagctacagagactgctctcacttgcctagtagagaagatgaatgtatttgataccgaattgaagggtctttctaaaatagaacgtgcaaatgcctgcaactcagtcattaaacagctgatgaaaaaggaattcactctagagttttcacgtgacagaaagtcaatgtcggtttactgtacaccaaataaaccaagcaggacatcaatgagcaagatgtttgtgaagggtgctcctgaaggtgtcattgacaggtgcacccacattcgagttggaagtactaaggttcctatgacctctggagtcaaacagaagatcatgtctgtcattcgagagtggggtagtggcagcgacacactgcgatgcctggccctggccactcatgacaacccactgagaagagaagaaatgcaccttgaggactctgccaactttattaaatatgagaccaatctgaccttcgttggctgcgtgggcatgctggatcctccgagaatcgaggtggcctcctccgtgaagctgtgccggcaagcaggcatccgggtcatcatgatcactggggacaacaagggcactgctgtggccatctgtcgccgcatcggcatcttcgggcaggatgaggacgtgacgtcaaaagctttcacaggccgggagtttgatgaactcaacccctccgcccagcgagacgcctgcctgaacgcccgctgttttgctcgagttgaaccctcccacaagtctaaaatcgtagaatttcttcagtcttttgatgagattacagctatgactggcgatggcgtgaacgatgctcctgctctgaagaaagccgagattggcattgctatgggctctggcactgcggtggctaaaaccgcctctgagatggtcctggcggatgacaacttctccaccattgtggctgccgttgaggaggggcgggcaatctacaacaacatgaaacagttcatccgctacctcatctcgtccaacgtcggggaagttgtctgtattttcctgacagcagcccttggatttcccgaggctttgattcctgttcagctgctctgggtcaatctggtgacagatggcctgcctgccactgcactggggttcaaccctcctgatctggacatcatgaataaacctccccggaacccaaaggaaccattgatcagcgggtggctctttttccgttacttggctattggctgttacgtcggcgctgctaccgtgggtgctgctgcatggtggttcattgctgctgacggtggtccaagagtgtccttctaccagctgagtcatttcctacagtgtaaagaggacaacccggactttgaaggcgtggattgtgcaatctttgaatccccatacccgatgacaatggcgctctctgttctagtaactatagaaatgtgtaacgccctcaacagcttgtccgaaaaccagtccttgctgaggatgcccccctgggagaacatctggctcgtgggctccatctgcctgtccatgtcactccacttcctgatcctctatgtcgaacccttgccactcatcttccagatcacaccgctgaacgtgacccagtggctgatggtgctgaaaatctccttgcccgtgattctcatggatgagacgctcaagtttgtggcccgcaactacctggaacctgctggtaaagagtgtgtgcagcctgccaccaaatcctgctcgttctcggcatgcaccgatgggatttcctggccgtttgtgctgctcataatgcccctggtgatctgggtctatagcacagacactaactttagcgatatgttctggtcttgactgacagttttccataaagaagatgtttaacttaatcaattaatttttttattgtttaaagcaactgtctatttctgctgaattttcacatgaacatactggctggtgatggaggtttcatactctagattttgttttgctttttctgactccagtggggcaagattttccttttttatacacataattaaagtgtccattgacatgtacagagaactaacactattttatgcaaatatttttttgtagatgaaaaagcatgtacagtgttctgtttaatactcatccttgtataaaaaaaatagttgagccagcagacattgtcagcaaattaattggcagcagattttaggaaatgaatgtgtgtggttttttttctaaaactaaatagcatgtattgtgtcttttgcatgatgatccggatttaatttgatatcacagtctaatttttattcataagccaatttttctgcactgagcagagtcttgctacctcagtcagtattgttttggtttgctacttccctcacccactttggcctccgttcaccccaccccaccccacctctccccaccttacccccgccccgcttggcttcttctttaggattgtgatggttcgttctgtttacatcagttttaacgagaggtatgcctgtactcgcttgtgcagaaaacattgttccagattcaatcgactgggtttatgtcccttcacatagtttttaaggttatttatttaaatgtctaatgtattttattgtaacagacattgttttgccaacattgcctatttcagtggcacgtcatctagttttaaaaaaataaaacattttaaatggacagagaaaaataactgtcttgtctttaactcgtaagtggcttacctgggactaacagacatgtccaactttctctccagttcttagctcagaactttagttgtactctgcttgaggggaagaaggctcctgctctgctgtgtaggtagtcataggaattgtattcttaatgtacaggcactaattgtcatctgtgatgtacattttatgcaagtttctgctggcctggtatagagaacataagggcaagtgtgtatgtgtgtgtatgtgtgtgttttgtaaaatctgtaaatagcacatgaccaaatgaacatattgtatagaactatttttatttgaatgtggcactaaccaccaccaccgttactacgatcaatgtttgcgcatgttcgagatgagtctcaccaacagtgtgtaagtcattaacagtcctaactgtggtgttttcctccaatgccttccaacatccatcaactaacgtgagtattttcttcctgggatttggatgctttagcctaaaggtgactgccaccaagtgagataactgtatgtcactaacttataagccgcctccatggcagatgctgctgtgctccctgatgccctgtgagcaccggggttgcctgtggcgcctgccatgtgactcgggcgcagcatcagctggctggaggtgtggctttcatagacctccacaggctgcctaggacaagatgaccaggagggcccaagccagacaaaagccggagtggggagagaggcatttcagccagaccaacaggctgaaggagctgtgcagactattgctaaaatgagggttcgcagctgccaggagtcatcccagaacattgctacttatttattaaaaagctaaaaactagtgaaagcaagtaactgaaccagtgaactctgggtatcgataggttcgtcttaaataggccacttccccactcccccacccccccttgcttggtcttgtccttggtggctaagacttagctctgcaggggatgttaaagcacagttagtaggacgtggctctgcacagcccaaaaaccagcttactccttagccagggtgtgaggcctcgactatattcttcaaaatgtacttaggctctggttactgggatggccagtagatgtaatgcagatggttggagtttggggagggttaggaggcatcaagcaggacaaggtgctgctgagttcagagggcccacgttcaagggatggaggtggaacctggagaccgactcttaaaagcacagtccgtggttgggtgtggtggctcatgcctgtaagtaagtctcagccctttggaggccacagcagaaggattgcttgagcccaggtactcaaaccagcctgggcaacagagtgaggccctgtcaaaaaaaaatcagccttactgtgaagcctccaaggctgctcgcaggcagctgtggctctcgggaagggaggctgctttgcccagcagggaacatttggggcagggggtaaattttgccagtttgagcatcatgaggtgtaacaagaaatgggttgaatgggccaaatgcaaggagtgcatctctgggctgcaaactgacttgagtgctgcactattgctattccgtgcaaacaaaactcagcttttcctgactcagttccttgacttagtggcctttacaaaaaaagttgagtagtgtgtggcctgctgtcgcacagcccctagttagcttcatggtttctcagcttcagacccctccagcccacagaggagcccatggagggacccacttcccttggtccagacagctgggagtgggttaggcccactgctgttttgagcagggccacttgctccatttcactgaaggctttgctgggtgaaaacacttcagcatctcctcctcaggtcaacccataaagaccaggtccagcaccgtggtcttggcacatccctggcctcaggccctcacctaacagtgaggcagcagctgcccagccccgcaatgtgcctgctgtcaggcagctcttgcctgaaacttacttccacattctttcctgatgggcaggtggctgaaggcccagccatcagtgtcgcttgttgccaccccgtgcctcccttggcctctctgagctttgcccagaagaccaacaatcatacataccctaactgggacaccactctgcagaatgcagatgatccattctggaggaagctgtcccttgagctcagtgagctcccaggcaagcagggcatctggccgacttccctcacaacagctgctcccacatcccctcggactggagcttcagccctgactgaggtgggcagacctaagacctgagaccacaagattagctcagtgtctaccaagcatctagccactgtccagggccagagcataccacgtctgcagtgcctgtgagcagagccagcagttgccctgtgactgtaaccaccaaattgtccaaacacccgctgcagttagcaagaagggtaggcttcaccctcctttactgaggagaatgatgcggaggagtttcctctccagggctaggcaaggcaggcgagcagccagaagccgggtgcccacagggcagggacaggaaggctgtgctgctactggctgctcacttctccatcaacctcaccctctgcaccactaaccaagaccttgtcctcttgcctgtctcgctgctttcacagctgcaacgattgtgtctgcctcatggggttttcctccagagcctttattctgtagccagacgacacgaggagtctgtgtcactgagccagtgcttctagatgctaccctgtgtgggcggcacctcagggacagtaaatcagaaatgctggtcttgaaaccttgaaaagatcaagctgaatgttccttttcatctgtcgctgttgatcttcatctatttaaataggtattctaacgtttcctctctgtatttcatgaagctgatttcctctctctttccttttcagcaatactggagtaaccgcttcctaaaccattttgcagaaatgtaagggtgttcggttgcgtgcatgtgcgtttttagcaacacatctaccaaccctgtgcatgactgatgttggggaaaaagaaaagtaaaaaacttcccaactcactttgtgttatgtggaggaaatgtgtattacccttgtctcctgagatctcaccatactgatttcccttgacctaattagttcaagctcaaggcctatccatagaggattggttctatagctccaataggacagttgctcattaaccgtctttatgaatttttacagcttcgaca

SEQ ID NO: 315973 - DNA, 4415 bp, Homo sapiens
gcgcgcgggaggagggagccgggaggagggggcggggccgcgccgcccgcgccgcgctgggcgctctcggccaatgagcggcgtccacatgccgcggcggcggcgaaaggggaggcagcggccgataaatgctattagagcagccgccgcggagccgtccccgacgccacctccttttccttcgccgcagtttcctccgccgctgtcgggcgtgcggcgctgagggacccgggcgagcgcgccgcgcaccgccccgccggctcgcctccctcgccgcgttccgccctcagtggtctgccgggcgccccctcctccggcccgggcggggcctctgatcgcctcaagagagcggggagggggctcgggggccgcggcctgccctcccggcgggcggctgagggcgagggaggccctcccttctggcgaggggagggagggtgggtcaggagcccccaacccgccctgcggagctcggggccgcgcgaggggcggttgtctgggggagggggcgcggggtgattcagcgcccggcgaggcggaagcggccgcaagaggaggaggggagagcccgtccgcgcctgggctcccggggtggcacgagcccgcggccggagtgcgaggcggaggcgaggaggccgcggggacgggaggcgaggccggccgggcccccgaagccatggagaacgcgcacaccaagacggtggaggaggtgctgggccacttcggcgtcaacgagagtacggggctgagcctggaacaggtcaagaagcttaaggagagatggggctccaacgagttaccggctgaagaaggaaaaaccttgctggaacttgtgattgagcagtttgaagacttgctagttaggattttattactggcagcatgtatatcttttgttttggcttggtttgaagaaggtgaagaaacaattacagcctttgtagaaccttttgtaattttactcatattagtagccaatgcaattgtgggtgtatggcaggaaagaaatgctgaaaatgccatcgaagcccttaaggaatatgagcctgaaatgggcaaagtgtatcgacaggacagaaagagtgtgcagcggattaaagctaaagacatagttcctggtgatattgtagaaattgctgttggtgacaaagttcctgctgatataaggttaacttccatcaaatctaccacactaagagttgaccagtcaattctcacaggtgaatctgtctctgtcatcaagcacactgatcccgtccctgacccacgagctgtcaaccaagataaaaagaacatgctgttttctggtacaaacattgctgctgggaaagctatgggagtggtggtagcaactggagttaacaccgaaattggcaagatccgggatgaaatggtggcaacagaacaggagagaacaccccttcagcaaaaactagatgaatttggggaacagctttccaaagtcatctcccttatttgcattgcagtctggatcataaatattgggcacttcaatgacccggttcatggagggtcctggatcagaggtgctatttactactttaaaattgcagtggccctggctgtagcagccattcctgaaggtctgcctgcagtcatcaccacctgcctggctcttggaactcgcagaatggcaaagaaaaatgccattgttcgaagcctcccgtctgtggaaacccttggttgtacttctgttatctgctcagacaagactggtacacttacaacaaaccagatgtcagtctgcaggatgttcattctggacagagtggaaggtgatacttgttcccttaatgagtttaccataactggatcaacttatgcacctattggagaagtgcataaagatgataaaccagtgaattgtcaccagtatgatggtctggtagaattagcaacaatttgtgctctttgtaatgactctgctttggattacaatgaggcaaagggtgtgtatgaaaaagttggagaagctacagagactgctctcacttgcctagtagagaagatgaatgtatttgataccgaattgaagggtctttctaaaatagaacgtgcaaatgcctgcaactcagtcattaaacagctgatgaaaaaggaattcactctagagttttcacgtgacagaaagtcaatgtcggtttactgtacaccaaataaaccaagcaggacatcaatgagcaagatgtttgtgaagggtgctcctgaaggtgtcattgacaggtgcacccacattcgagttggaagtactaaggttcctatgacctctggagtcaaacagaagatcatgtctgtcattcgagagtggggtagtggcagcgacacactgcgatgcctggccctggccactcatgacaacccactgagaagagaagaaatgcaccttgaggactctgccaactttattaaatatgagaccaatctgaccttcgttggctgcgtgggcatgctggatcctccgagaatcgaggtggcctcctccgtgaagctgtgccggcaagcaggcatccgggtcatcatgatcactggggacaacaagggcactgctgtggccatctgtcgccgcatcggcatcttcgggcaggatgaggacgtgacgtcaaaagctttcacaggccgggagtttgatgaactcaacccctccgcccagcgagacgcctgcctgaacgcccgctgttttgctcgagttgaaccctcccacaagtctaaaatcgtagaatttcttcagtcttttgatgagattacagctatgactggcgatggcgtgaacgatgctcctgctctgaagaaagccgagattggcattgctatgggctctggcactgcggtggctaaaaccgcctctgagatggtcctggcggatgacaacttctccaccattgtggctgccgttgaggaggggcgggcaatctacaacaacatgaaacagttcatccgctacctcatctcgtccaacgtcggggaagttgtctgtattttcctgacagcagcccttggatttcccgaggctttgattcctgttcagctgctctgggtcaatctggtgacagatggcctgcctgccactgcactggggttcaaccctcctgatctggacatcatgaataaacctccccggaacccaaaggaaccattgatcagcgggtggctctttttccgttacttggctattggctgttacgtcggcgctgctaccgtgggtgctgctgcatggtggttcattgctgctgacggtggtccaagagtgtccttctaccagctgagtcatttcctacagtgtaaagaggacaacccggactttgaaggcgtggattgtgcaatctttgaatccccatacccgatgacaatggcgctctctgttctagtaactatagaaatgtgtaacgccctcaacagaacatctggctcgtgggctccatctgcctgtccatgtcactccacttcctgatcctctatgtcgaacccttgccactcatcttccagatcacaccgctgaacgtgacccagtggctgatggtgctgaaaatctccttgcccgtgattctcatggatgagacgctcaagtttgtggcccgcaactacctggaacctgcaatactggagtaaccgcttcctaaaccattttgcagaaatgtaagggtgttcggttgcgtgcatgtgcgtttttagcaacacatctaccaaccctgtgcatgactgatgttggggaaaaagaaaagtaaaaaacttcccaactcactttgtgttatgtggaggaaatgtgtattaccaatggggttgttagcttttaaatcaaaatactgattacagatgtacaatttagcttaatcagaaagcctctccagagaagtttggtttctttgctgcaagaggaatgaggctctgtaaccttatctaagaacttggaagccgtcagccaagtcgccacatttctctgcaaaatgtcatagcttatataaatgtacagtattcaattgtaatgcatgccttcggttgtaagtagccagatccctctccagtgacattggaacatgctactttttaattggccctgtacagtttgcttatttataaattcattaaaaacactacaggtgttgaatggttaaaatgtaggcctccagttcattttcagttattttctgagtgtgcagacagctatttcgcactgtattaaatgtaacttatttaatgaaatcagaagcagtagacagatgttggtgcaatacaaatattgtgatgcatttatcttaataaaatgctaaatgtcaatttatcactgcgcatgtttgactttagactgtaaatagagatcagtttgtttctttctgtgctggtaacaatgagcgtcgcacagacatggtttcaggtaaataaatctattctatgataaa

SEQ ID NO: 315974 - DNA, 3798 bp, Homo sapiens
ctgaggtacggtcgaattccggcgaccagcgtcggatcagtacgatgtccaactttctctccagttcgtgttgaagggtgcctttggccccaaaagggggagtaaaaaaaactttagttgtactctgcttgaggggaagaaggctcctgctctgctgtgtaggtagtcataggaattgtattcttaatgtacaggcactaattgtcatctgtgatgtacattttatgcaagtttctgctggcctggtatagagaacataagggcaagtgtgtatgtgtgtgtatgtgtgtgttttgtaaaatctgtaaatagcacatgaccaaatgaacatattgtatagaactatttttatttgaatgtggcactaaccaccaccaccgttactacgatcaatgtttgcgcatgttcgagatgagtctcaccaacagtgtgtaagtcattaacagtcctaactgtggtgttttcctccaatgccttccaacatccatcaactaacgtgagtattttcttcctgggatttggatgctttagcctaaaggtgactgccaccaagtgagataactgtatgtcactaacttataagccgcctccatggcagatgctgctgtgctccctgatgccctgtgagcaccggggttgcctgtggcgcctgccatgtgactcgggcgcagcatcagctggctggaggtgtggctttcatagacctccacaggctgcctaggacaagatgaccaggagggcccaagccagacaaaagccggagtggggagagaggcatttcagccagaccaacaggctgaaggagctgtgcagactattgctaaaatgagggttcgcagctgccaggagtcatcccagaacattgctacttatttattaaaaagctaaaaactagtgaaagcaagtaactgaaccagtgaactctgggtatcgataggttcgtcttaaataggccacttccccactcccccacccccccttgcttggtcttgtccttggtggctaagacttagctctgcaggggatgttaaagcacagttagtaggacgtggctctgcacagcccaaaaaccagcttactccttagccagggtgtgaggcctcgactatattcttcaaaatgtacttaggctctggttactgggatggccagtagatgtaatgcagatggttggagtttggggagggttaggaggcatcaagcaggacaaggtgctgctgagttcagagggcccacgttcaagggatggaggtggaacctggagaccgactcttaaaagcacagtccgtggttgggtgtggtggctcatgcctgtaagtaagtctcagccctttggaggccacagcagaaggattgcttgagcccaggtactcaaaccagcctgggcaacagagtgaggccctgtcaaaaaaaaatcagccttactgtgaagcctccaaggctgctcgcaggcagctgtggctctcgggaagggaggctgctttgcccagcagggaacatttggggcagggggtaaattttgccagtttgagcatcatgaggtgtaacaagaaatgggttgaatgggccaaatgcaaggagtgcatctctgggctgcaaactgacttgagtgctgcactattgctattccgtgcaaacaaaactcagcttttcctgactcagttccttgacttagtggcctttacaaaaaaagttgagtagtgtgtggcctgctgtcgcacagcccctagttagcttcatggtttctcagcttcagacccctccagcccacagaggagcccatggagggacccacttcccttggtccagacagctgggagtgggttaggcccactgctgttttgagcagggccacttgctccatttcactgaaggctttgctgggtgaaaacacttcagcatctcctcctcaggtcaacccataaagaccaggtccagcaccgtggtcttggcacatccctggcctcaggccctcacctaacagtgaggcagcagctgcccagccccgcaatgtgcctgctgtcaggcagctcttgcctgaaacttacttccacattctttcctgatgggcaggtggctgaaggcccagccatcagtgtcgcttgttgccaccccgtgcctcccttggcctctctgagctttgcccagaagaccaacaatcatacataccctaactgggacaccactctgcagaatgcagatgatccattctggaggaagctgtcccttgagctcagtgagctcccaggcaagcagggcatctggccgacttccctcacaacagctgctcccacatcccctcggactggagcttcagccctgactgaggtgggcagacctaagacctgagaccacaagattagctcagtgtctaccaagcatctagccactgtccagggccagagcataccacgtctgcagtgcctgtgagcagagccagcagttgccctgtgactgtaaccaccaaattgtccaaacacccgctgcagttagcaagaagggtaggcttcaccctcctttactgaggagaatgatgcggaggagtttcctctccagggctaggcaaggcaggcgagcagccagaagccgggtgcccacagggcagggacaggaaggctgtgctgctactggctgctcacttctccatcaacctcaccctctgcaccactaaccaagaccttgtcctcttgcctgtctcgctgctttcacagctgcaacgattgtgtctgcctcatggggttttcctccagagcctttattctgtagccagacgacacgaggagtctgtgtcactgagccagtgcttctagatgctaccctgtgtgggcggcacctcagggacagtaaatcagaaatgctggtcttgaaaccttgaaaagatcaagctgaatgttccttttcatctgtcgctgttgatcttcatctatttaaataggtattctaacgtttcctctctgtatttcatgaagctgatttcctctctctttccttttcagcaatactggagtaaccgcttcctaaaccattttgcagaaatgtaagggtgttcggttgcgtgcatgtgcgtttttagcaacacatctaccaaccctgtgcatgactgatgttggggaaaaagaaaagtaaaaaacttcccaactcactttgtgttatgtggaggaaatgtgtattaccaatggggttgttagcttttaaatcaaaatactgattacagatgtacaatttagcttaatcagaaagcctctccagagaagtttggtttctttgctgcaagaggaatgaggctctgtaaccttatctaagaacttggaagccgtcagccaagtcgccacatttctctgcaaaatgtcatagcttatataaatgtacagtattcaattgtaatgcatgccttcggttgtaagtagccagatccctctccagtgacattggaacatgctactttttaattggccctgtacagtttgcttatttataaattcattaaaaacactacaggtgttgaatggttaaaatgtaggcctccagttcattttcagttattttctgagtgtgcagacagctatttcgcactgtattaaatgtaacttatttaatgaaatcagaagcagtagacagatgttggtgcaatacaaatattgtgatgcatttatcttaataaaatgctaaatgtcaatttatcactgcgcatgtttgactttagactgtaaatagagatcagtttgtttctttctgtgctggtaacaatgagcgtcgcacagacatggtttcaggtaaataaatctattctatgataaa

SEQ ID NO: 315975 - DNA, 4341 bp, Homo sapiens
gcgcgcgggaggagggagccgggaggagggggcggggccgcgccgcccgcgccgcgctgggcgctctcggccaatgagcggcgtccacatgccgcggcggcggcgaaaggggaggcagcggccgataaatgctattagagcagccgccgcggagccgtccccgacgccacctccttttccttcgccgcagtttcctccgccgctgtcgggcgtgcggcgctgagggacccgggcgagcgcgccgcgcaccgccccgccggctcgcctccctcgccgcgttccgccctcagtggtctgccgggcgccccctcctccggcccgggcggggcctctgatcgcctcaagagagcggggagggggctcgggggccgcggcctgccctcccggcgggcggctgagggcgagggaggccctcccttctggcgaggggagggagggtgggtcaggagcccccaacccgccctgcggagctcggggccgcgcgaggggcggttgtctgggggagggggcgcggggtgattcagcgcccggcgaggcggaagcggccgcaagaggaggaggggagagcccgtccgcgcctgggctcccggggtggcacgagcccgcggccggagtgcgaggcggaggcgaggaggccgcggggacgggaggcgaggccggccgggcccccgaagccatggagaacgcgcacaccaagacggtggaggaggtgctgggccacttcggcgtcaacgagagtacggggctgagcctggaacaggtcaagaagcttaaggagagatggggctccaacgagttaccggctgaagaaggaaaaaccttgctggaacttgtgattgagcagtttgaagacttgctagttaggattttattactggcagcatgtatatcttttgttttggcttggtttgaagaaggtgaagaaacaattacagcctttgtagaaccttttgtaattttactcatattagtagccaatgcaattgtgggtgtatggcaggaaagaaatgctgaaaatgccatcgaagcccttaaggaatatgagcctgaaatgggcaaagtgtatcgacaggacagaaagagtgtgcagcggattaaagctaaagacatagttcctggtgatattgtagaaattgctgttggtgacaaagttcctgctgatataaggttaacttccatcaaatctaccacactaagagttgaccagtcaattctcacaggtgaatctgtctctgtcatcaagcacactgatcccgtccctgacccacgagctgtcaaccaagataaaaagaacatgctgttttctggtacaaacattgctgctgggaaagctatgggagtggtggtagcaactggagttaacaccgaaattggcaagatccgggatgaaatggtggcaacagaacaggagagaacaccccttcagcaaaaactagatgaatttggggaacagctttccaaagtcatctcccttatttgcattgcagtctggatcataaatattgggcacttcaatgacccggttcatggagggtcctggatcagaggtgctatttactactttaaaattgcagtggccctggctgtagcagccattcctgaaggtctgcctgcagtcatcaccacctgcctggctcttggaactcgcagaatggcaaagaaaaatgccattgttcgaagcctcccgtctgtggaaacccttggttgtacttctgttatctgctcagacaagactggtacacttacaacaaaccagatgtcagtctgcaggatgttcattctggacagagtggaaggtgatacttgttcccttaatgagtttaccataactggatcaacttatgcacctattggagaagtgcataaagatgataaaccagtgaattgtcaccagtatgatggtctggtagaattagcaacaatttgtgctctttgtaatgactctgctttggattacaatgaggcaaagggtgtgtatgaaaaagttggagaagctacagagactgctctcacttgcctagtagagaagatgaatgtatttgataccgaattgaagggtctttctaaaatagaacgtgcaaatgcctgcaactcagtcattaaacagctgatgaaaaaggaattcactctagagttttcacgtgacagaaagtcaatgtcggtttactgtacaccaaataaaccaagcaggacatcaatgagcaagatgtttgtgaagggtgctcctgaaggtgtcattgacaggtgcacccacattcgagttggaagtactaaggttcctatgacctctggagtcaaacagaagatcatgtctgtcattcgagagtggggtagtggcagcgacacactgcgatgcctggccctggccactcatgacaacccactgagaagagaagaaatgcaccttgaggactctgccaactttattaaatatgagaccaatctgaccttcgttggctgcgtgggcatgctggatcctccgagaatcgaggtggcctcctccgtgaagctgtgccggcaagcaggcatccgggtcatcatgatcactggggacaacaagggcactgctgtggccatctgtcgccgcatcggcatcttcgggcaggatgaggacgtgacgtcaaaagctttcacaggccgggagtttgatgaactcaacccctccgcccagcgagacgcctgcctgaacgcccgctgttttgctcgagttgaaccctcccacaagtctaaaatcgtagaatttcttcagtcttttgatgagattacagctatgactggcgatggcgtgaacgatgctcctgctctgaagaaagccgagattggcattgctatgggctctggcactgcggtggctaaaaccgcctctgagatggtcctggcggatgacaacttctccaccattgtggctgccgttgaggaggggcgggcaatctacaacaacatgaaacagttcatccgctacctcatctcgtccaacgtcggggaagttgtctgtattttcctgacagcagcccttggatttcccgaggctttgattcctgttcagctgctctgggtcaatctggtgacagatggcctgcctgccactgcactggggttcaaccctcctgatctggacatcatgaataaacctccccggaacccaaaggaaccattgatcagcgggtggctctttttccgttacttggctattggctgttacgtcggcgctgctaccgtgggtgctgctgcatggtggttcattgctgctgacggtggtccaagagtgtccttctaccagctgagtcatttcctacagtgtaaagaggacaacccggactttgaaggcgtggattgtgcaatctttgaatccccatacccgatgacaatggcgctctctgttctaagtaaatcagaaatgctggtcttgaaaccttgaaaagatcaagctgaatgttccttttcatctgtcgctgttgatcttcatctatttaaataggtattctaacgtttcctctctgtatttcatgaagctgatttcctctctctttccttttcagcaatactggagtaaccgcttcctaaaccattttgcagaaatgtaagggtgttcggttgcgtgcatgtgcgtttttagcaacacatctaccaaccctgtgcatgactgatgttggggaaaaagaaaagtaaaaaacttcccaactcactttgtgttatgtggaggaaatgtgtattaccaatggggttgttagcttttaaatcaaaatactgattacagatgtacaatttagcttaatcagaaagcctctccagagaagtttggtttctttgctgcaagaggaatgaggctctgtaaccttatctaagaacttggaagccgtcagccaagtcgccacatttctctgcaaaatgtcatagcttatataaatgtacagtattcaattgtaatgcatgccttcggttgtaagtagccagatccctctccagtgacattggaacatgctactttttaattggccctgtacagtttgcttatttataaattcattaaaaacactacaggtgttgaatggttaaaatgtaggcctccagttcattttcagttattttctgagtgtgcagacagctatttcgcactgtattaaatgtaacttatttaatgaaatcagaagcagtagacagatgttggtgcaatacaaatattgtgatgcatttatcttaataaaatgctaaatgtcaatttatcactgcgcatgtttgactttagactgtaaatagagatcagtttgtttctttctgtgctggtaacaatgagcgtcgcacagacatggtttcaggtaaataaatctattctatgataaa

SEQ ID NO: 315976 - DNA, 2801 bp, Homo sapiens
ctgccaggtactccatggctaaggagtaagctggtttttgggctgtgctgctactggctgctcacttctccatcaaccttactccttagccagggtgtgaggcctcgactatattcttcaaaatgtacttaggctctggttactgggatggccagtagatgtaatgcagatggttggagtttggggagggttaggaggcatcaagcaggacaaggtgctgctgagttcagagggcccacgttcaagggatggaggtggaacctggagaccgactcttaaaagcacagtccgtggttgggtgtggtggctcatgcctgtaagtaagtctcagccctttggaggccacagcagaaggattgcttgagcccaggtactcaaaccagcctgggcaacagagtgaggccctgtcaaaaaaaaatcagccttactgtgaagcctccaaggctgctcgcaggcagctgtggctctcgggaagggaggctgctttgcccagcagggaacatttggggcagggggtaaattttgccagtttgagcatcatgaggtgtaacaagaaatgggttgaatgggccaaatgcaaggagtgcatctctgggctgcaaactgacttgagtgctgcactattgctattccgtgcaaacaaaactcagcttttcctgactcagttccttgacttagtggcctttacaaaaaaagttgagtagtgtgtggcctgctgtcgcacagcccctagttagcttcatggtttctcagcttcagacccctccagcccacagaggagcccatggagggacccacttcccttggtccagacagctgggagtgggttaggcccactgctgttttgagcagggccacttgctccatttcactgaaggctttgctgggtgaaaacacttcagcatctcctcctcaggtcaacccataaagaccaggtccagcaccgtggtcttggcacatccctggcctcaggccctcacctaacagtgaggcagcagctgcccagccccgcaatgtgcctgctgtcaggcagctcttgcctgaaacttacttccacattctttcctgatgggcaggtggctgaaggcccagccatcagtgtcgcttgttgccaccccgtgcctcccttggcctctctgagctttgcccagaagaccaacaatcatacataccctaactgggacaccactctgcagaatgcagatgatccattctggaggaagctgtcccttgagctcagtgagctcccaggcaagcagggcatctggccgacttccctcacaacagctgctcccacatcccctcggactggagcttcagccctgactgaggtgggcagacctaagacctgagaccacaagattagctcagtgtctaccaagcatctagccactgtccagggccagagcataccacgtctgcagtgcctgtgagcagagccagcagttgccctgtgactgtaaccaccaaattgtccaaacacccgctgcagttagcaagaagggtaggcttcaccctcctttactgaggagaatgatgcggaggagtttcctctccagggctaggcaaggcaggcgagcagccagaagccgggtgcccacagggcagggacaggaaggctgtgctgctactggctgctcacttctccatcaacctcaccctctgcaccactaaccaagaccttgtcctcttgcctgtctcgctgctttcacagctgcaacgattgtgtctgcctcatggggttttcctccagagcctttattctgtagccagacgacacgaggagtctgtgtcactgagccagtgcttctagatgctaccctgtgtgggcggcacctcagggacagtaaatcagaaatgctggtcttgaaaccttgaaaagatcaagctgaatgttccttttcatctgtcgctgttgatcttcatctatttaaataggtattctaacgtttcctctctgtatttcatgaagctgatttcctctctctttccttttcagcaatactggagtaaccgcttcctaaaccattttgcagaaatgtaagggtgttcggttgcgtgcatgtgcgtttttagcaacacatctaccaaccctgtgcatgactgatgttggggaaaaagaaaagtaaaaaacttcccaactcactttgtgttatgtggaggaaatgtgtattaccaatggggttgttagcttttaaatcaaaatactgattacagatgtacaatttagcttaatcagaaagcctctccagagaagtttggtttctttgctgcaagaggaatgaggctctgtaaccttatctaagaacttggaagccgtcagccaagtcgccacatttctctgcaaaatgtcatagcttatataaatgtacagtattcaattgtaatgcatgccttcggttgtaagtagccagatccctctccagtgacattggaacatgctactttttaattggccctgtacagtttgcttatttataaattcattaaaaacactacaggtgttgaatggttaaaatgtaggcctccagttcattttcagttattttctgagtgtgcagacagctatttcgcactgtattaaatgtaacttatttaatgaaatcagaagcagtagacagatgttggtgcaatacaaatattgtgatgcatttatcttaataaaatgctaaatgtcaatttatcactgcgcatgtttgactttagactgtaaatagagatcagtttgtttctttctgtgctggtaacaatgagcgtcgcacagacatggtttcaggtaaataaatctattctatgataaa

SEQ ID NO: 315977 - DNA, 4619 bp, Homo sapiens
  misc_feature (4222)..(4223): n is a, c, g, or t
  misc_feature (4225)..(4226): n is a, c, g, or t
  misc_feature (4229)..(4232): n is a, c, g, or t
  misc_feature (4244)..(4245): n is a, c, g, or t
  misc_feature (4248)..(4248): n is a, c, g, or t
  misc_feature (4252)..(4252): n is a, c, g, or t
  misc_feature (4255)..(4255): n is a, c, g, or t
  misc_feature (4265)..(4265): n is a, c, g, or t
  misc_feature (4268)..(4269): n is a, c, g, or t
  misc_feature (4272)..(4272): n is a, c, g, or t
  misc_feature (4286)..(4286): n is a, c, g, or t
  misc_feature (4293)..(4293): n is a, c, g, or t
  misc_feature (4304)..(4304): n is a, c, g, or t
  misc_feature (4307)..(4307): n is a, c, g, or t
gcgcgcgggaggagggagccgggaggagggggcggggccgcgccgcccgcgccgcgctgggcgctctcggccaatgagcggcgtccacatgccgcggcggcggcgaaaggggaggcagcggccgataaatgctattagagcagccgccgcggagccgtccccgacgccacctccttttccttcgccgcagtttcctccgccgctgtcgggcgtgcggcgctgagggacccgggcgagcgcgccgcgcaccgccccgccggctcgcctccctcgccgcgttccgccctcagtggtctgccgggcgccccctcctccggcccgggcggggcctctgatcgcctcaagagagcggggagggggctcgggggccgcggcctgccctcccggcgggcggctgagggcgagggaggccctcccttctggcgaggggagggagggtgggtcaggagcccccaacccgccctgcggagctcggggccgcgcgaggggcggttgtctgggggagggggcgcggggtgattcagcgcccggcgaggcggaagcggccgcaagaggaggaggggagagcccgtccgcgcctgggctcccggggtggcacgagcccgcggccggagtgcgaggcggaggcgaggaggccgcggggacgggaggcgaggccggccgggcccccgaagccatggagaacgcgcacaccaagacggtggaggaggtgctgggccacttcggcgtcaacgagagtacggggctgagcctggaacaggtcaagaagcttaaggagagatggggctccaacgagttaccggctgaagaaggaaaaaccttgctggaacttgtgattgagcagtttgaagacttgctagttaggattttattactggcagcatgtatatcttttgttttggcttggtttgaagaaggtgaagaaacaattacagcctttgtagaaccttttgtaattttactcatattagtagccaatgcaattgtgggtgtatggcaggaaagaaatgctgaaaatgccatcgaagcccttaaggaatatgagcctgaaatgggcaaagtgtatcgacaggacagaaagagtgtgcagcggattaaagctaaagacatagttcctggtgatattgtagaaattgctgttggtgacaaagttcctgctgatataaggttaacttccatcaaatctaccacactaagagttgaccagtcaattctcacaggtgaatctgtctctgtcatcaagcacactgatcccgtccctgacccacgagctgtcaaccaagataaaaagaacatgctgttttctggtacaaacattgctgctgggaaagctatgggagtggtggtagcaactggagttaacaccgaaattggcaagatccgggatgaaatggtggcaacagaacaggagagaacaccccttcagcaaaaactagatgaatttggggaacagctttccaaagtcatctcccttatttgcattgcagtctggatcataaatattgggcacttcaatgacccggttcatggagggtcctggatcagaggtgctatttactactttaaaattgcagtggccctggctgtagcagccattcctgaaggtctgcctgcagtcatcaccacctgcctggctcttggaactcgcagaatggcaaagaaaaatgccattgttcgaagcctcccgtctgtggaaacccttggttgtacttctgttatctgctcagacaagactggtacacttacaacaaaccagatgtcagtctgcaggatgttcattctggacagagtggaaggtgatacttgttcccttaatgagtttaccataactggatcaacttatgcacctattggagaagtgcataaagatgataaaccagtgaattgtcaccagtatgatggtctggtagaattagcaacaatttgtgctctttgtaatgactctgctttggattacaatgaggcaaagggtgtgtatgaaaaagttggagaagctacagagactgctctcacttgcctagtagagaagatgaatgtatttgataccgaattgaagggtctttctaaaatagaacgtgcaaatgcctgcaactcagtcattaaacagctgatgaaaaaggaattcactctagagttttcacgtgacagaaagtcaatgtcggtttactgtacaccaaataaaccaagcaggacatcaatgagcaagatgtttgtgaagggtgctcctgaaggtgtcattgacaggtgcacccacattcgagttggaagtactaaggttcctatgacctctggagtcaaacagaagatcatgtctgtcattcgagagtggggtagtggcagcgacacactgcgatgcctggccctggccactcatgacaacccactgagaagagaagaaatgcaccttgaggactctgccaactttattaaatatgagaccaatctgaccttcgttggctgcgtgggcatgctggatcctccgagaatcgaggtggcctcctccgtgaagctgtgccggcaagcaggcatccgggtcatcatgatcactggggacaacaagggcactgctgtggccatctgtcgccgcatcggcatcttcgggcaggatgaggacgtgacgtcaaaagctttcacaggccgggagtttgatgaactcaacccctccgcccagcgagacgcctgcctgaacgcccgctgttttgctcgagttgaaccctcccacaagtctaaaatcgtagaatttcttcagtcttttgatgagattacagctatgactggcgatggcgtgaacgatgctcctgctctgaagaaagccgagattggcattgctatgggctctggcactgcggtggctaaaaccgcctctgagatggtcctggcggatgacaacttctccaccattgtggctgccgttgaggaggggcgggcaatctacaacaacatgaaacagttcatccgctacctcatctcgtccaacgtcggggaagttgtctgtattttcctgacagcagcccttggatttcccgaggctttgattcctgttcagctgctctgggtcaatctggtgacagatggcctgcctgccactgcactggggttcaaccctcctgatctggacatcatgaataaacctccccggaacccaaaggaaccattgatcagcgggtggctctttttccgttacttggctattggctgttacgtcggcgctgctaccgtgggtgctgctgcatggtggttcattgctgctgacggtggtccaagagtgtccttctaccagctgagtcatttcctacagtgtaaagaggacaacccggactttgaaggcgtggattgtgcaatctttgaatccccatacccgatgacaatggcgctctctgttctagtaactatagaaatgtgtaacgccctcaacagcttgtccgaaaaccagtccttgctgaggatgcccccctgggagaacatctggctcgtgggctccatctgcctgtccatgtcactccacttcctgatcctctatgtcgaacccttgccactcatcttccagatcacaccgctgaacgtgacccagtggctgatggtgctgaaaatctccttgcccgtgattctcatggatgagacgctcaagtttgtggcccgcaactacctggaacctgctggtaaagagtgtgtgcagcctgccaccaaatcctgctcgttctcggcatgcaccgatgggatttcctggccgtttgtgctgctcataatgcccctggtgatctgggtctatagcacagacactaactttagcgatatgttctggtcttgactgacagttttccataaagaagatgtttaacttaatcaattaatttttttattgtttaaagcaactgtctatttctgctgaattttcacatgaacatactggctggtgatggaggtttcatactctagattttgttttgctttttctgactccagtggggcaagattttccttttttatacacataattaaagtgtccattgacatgtacagagaactaacactattttatgcaaatatttttttgtagatgaaaaagcatgtacagtgttctgtttaatactcatccttgtataaaaaaaatagttgagccagcagacattgtcagcaaattaattggcagcagattttaggaaatgaatgtgtgtggttttttttctaaaactaaatagcatgtattgtgtcttttgcatgnnannagnnnnaaaaaaaaaaannaanaaanaanaaaaaaaaanaannaanaaaaaaaaaaaaanaaaaaanaaaaaaaaaanaanaaaaaaaaaaaaaaaaacagaaccccacctctccccaccttacccccgccccgcttggcttcttctttaggattgtgatggttcgttctgtttacatcagttttaacgagaggtatgcctgtactcgcttgtgcagaaaacattgttccagattcaatcgactgggtttatgtcccttcacatagtttttaaggttatttatttaaatgtctaatgtattttattgtaacagacattgttttgccaacattgcctatttcagtggcacgtcatctagttttaaaaaaataaaacattttaaatggacagaga

SEQ ID NO: 315978 - DNA, 2382 bp, Homo sapiens
aacgatggtcctacagctgagtcgggacagaggcctctctcttccccgctcacctccggcccttggcgttgggcagatacaggcatcagcttctctaactctgcagcacttttgcttctgtcttgattcctctgctttttaggcacagttttcttctctaagaaagcgttcttgttctctagcttcctgttccctctagtgtcctcagcctttctcggggtcttctttttcctcctgcctctgacatcggtatcctcctcagcactcatggcactgtctaggggcttctcaaagccatgagagctgaggaccatcgttcaacgatggtcctcagcttcagacccctccagcccacagaggagcccatggagggacccacttcccttggtccagacagctgggagtgggttaggcccactgctgttttgagcagggccacttgctccatttcactgaaggctttgctgggtgaaaacacttcagcatctcctcctcaggtcaacccataaagaccaggtccagcaccgtggtcttggcacatccctggcctcaggccctcacctaacagtgaggcagcagctgcccagccccgcaatgtgcctgctgtcaggcagctcttgcctgaaacttacttccacattctttcctgatgggcaggtggctgaaggcccagccatcagtgtcgcttgttgccaccccgtgcctcccttggcctctctgagctttgcccagaagaccaacaatcatacataccctaactgggacaccactctgcagaatgcagatgatccattctggaggaagctgtcccttgagctcagtgagctcccaggcaagcagggcatctggccgacttccctcacaacagctgctcccacatcccctcggactggagcttcagccctgactgaggtgggcagacctaagacctgagaccacaagattagctcagtgtctaccaagcatctagccactgtccagggccagagcataccacgtctgcagtgcctgtgagcagagccagcagttgccctgtgactgtaaccaccaaattgtccaaacacccgctgcagttagcaagaagggtaggcttcaccctcctttactgaggagaatgatgcggaggagtttcctctccagggctaggcaaggcaggcgagcagccagaagccgggtgcccacagggcagggacaggaaggctgtgctgctactggctgctcacttctccatcaacctcaccctctgcaccactaaccaagaccttgtcctcttgcctgtctcgctgctttcacagctgcaacgattgtgtctgcctcatggggttttcctccagagcctttattctgtagccagacgacacgaggagtctgtgtcactgagccagtgcttctagatgctaccctgtgtgggcggcacctcagggacagtaaatcagaaatgctggtcttgaaaccttgaaaagatcaagctgaatgttccttttcatctgtcgctgttgatcttcatctatttaaataggtattctaacgtttcctctctgtatttcatgaagctgatttcctctctctttccttttcagcaatactggagtaaccgcttcctaaaccattttgcagaaatgtaagggtgttcggttgcgtgcatgtgcgtttttagcaacacatctaccaaccctgtgcatgactgatgttggggaaaaagaaaagtaaaaaacttcccaactcactttgtgttatgtggaggaaatgtgtattaccaatggggttgttagcttttaaatcaaaatactgattacagatgtacaatttagcttaatcagaaagcctctccagagaagtttggtttctttgctgcaagaggaatgaggctctgtaaccttatctaagaacttggaagccgtcagccaagtcgccacatttctctgcaaaatgtcatagcttatataaatgtacagtattcaattgtaatgcatgccttcggttgtaagtagccagatccctctccagtgacattggaacatgctactttttaattggccctgtacagtttgcttatttataaattcattaaaaacactacaggtgttgaatggttaaaatgtaggcctccagttcattttcagttattttctgagtgtgcagacagctatttcgcactgtattaaatgtaacttatttaatgaaatcagaagcagtagacagatgttggtgcaatacaaatattgtgatgcatttatcttaataaaatgctaaatgtcaatttatcactgcgcatgtttgactttagactgtaaatagagatcagtttgtttctttctgtgctggtaacaatgagcgtcgcacagacatggtttcaggtaaataaatctattctatgataaa

SEQ ID NO: 315979 - DNA, 1396 bp, Homo sapiens
aaatcccatcggtgcatgccgagaacgagcaggattggtggcaggctgcacacactctttaccaggttccaggtagttgcgggccacaaacttgagcgtctcatccatgagaatcacgggcaaggagattttcagcaccatcagccactgggtcacgttcagcggtgtgatctggaagatgagtggcaagggttcgacatagaggacaggaaggctgtgctgctactggctgctcacttctccatcaacctcaccctctgcaccactaaccaagaccttgtcctcttgcctgtctcgctgctttcacagctgcaacgattgtgtctgcctcatggggttttcctccagagcctttattctgtagccagacgacacgaggagtctgtgtcactgagccagtgcttctagatgctaccctgtgtgggcggcacctcagggacagtaaatcagaaatgctggtcttgaaaccttgaaaagatcaagctgaatgttccttttcatctgtcgctgttgatcttcatctatttaaataggtattctaacgtttcctctctgtatttcatgaagctgatttcctctctctttccttttcagcaatactggagtaaccgcttcctaaaccattttgcagaaatgtaagggtgttcggttgcgtgcatgtgcgtttttagcaacacatctaccaaccctgtgcatgactgatgttggggaaaaagaaaagtaaaaaacttcccaactcactttgtgttatgtggaggaaatgtgtattaccaatggggttgttagcttttaaatcaaaatactgattacagatgtacaatttagcttaatcagaaagcctctccagagaagtttggtttctttgctgcaagaggaatgaggctctgtaaccttatctaagaacttggaagccgtcagccaagtcgccacatttctctgcaaaatgtcatagcttatataaatgtacagtattcaattgtaatgcatgccttcggttgtaagtagccagatccctctccagtgacattggaacatgctactttttaattggccctgtacagtttgcttatttataaattcattaaaaacactacaggtgttgaatggttaaaatgtaggcctccagttcattttcagttattttctgagtgtgcagacagctatttcgcactgtattaaatgtaacttatttaatgaaatcagaagcagtagacagatgttggtgcaatacaaatattgtgatgcatttatcttaataaaatgctaaatgtcaatttatcactgcgcatgtttgactttagactgtaaatagagatcagtttgtttctttctgtgctggtaacaatgagcgtcgcacagacatggtttcaggtaaataaatctattctatgataaa

SEQ ID NO: 315980 - DNA, 3753 bp, Homo sapiens
gcgcgcgggaggagggagccgggaggagggggcggggccgcgccgcccgcgccgcgctgggcgctctcggccaatgagcggcgtccacatgccgcggcggcggcgaaaggggaggcagcggccgataaatgctattagagcagccgccgcggagccgtccccgacgccacctccttttccttcgccgcagtttcctccgccgctgtcgggcgtgcggcgctgagggacccgggcgagcgcgccgcgcaccgccccgccggctcgcctccctcgccgcgttccgccctcagtggtctgccgggcgccccctcctccggcccgggcggggcctctgatcgcctcaagagagcggggagggggctcgggggccgcggcctgccctcccggcgggcggctgagggcgagggaggccctcccttctggcgaggggagggagggtgggtcaggagcccccaacccgccctgcggagctcggggccgcgcgaggggcggttgtctgggggagggggcgcggggtgattcagcgcccggcgaggcggaagcggccgcaagaggaggaggggagagcccgtccgcgcctgggctcccggggtggcacgagcccgcggccggagtgcgaggcggaggcgaggaggccgcggggacgggaggcgaggccggccgggcccccgaagccatggagaacgcgcacaccaagacggtggaggaggtgctgggccacttcggcgtcaacgagagtacggggctgagcctggaacaggtcaagaagcttaaggagagatggggctccaacgagttaccggctgaagaaggaaaaaccttgctggaacttgtgattgagcagtttgaagacttgctagttaggattttattactggcagcatgtatatcttttgttttggcttggtttgaagaaggtgaagaaacaattacagcctttgtagaaccttttgtaattttactcatattagtagccaatgcaattgtgggtgtatggcaggaaagaaatgctgaaaatgccatcgaagcccttaaggaatatgagcctgaaatgggcaaagtgtatcgacaggacagaaagagtgtgcagcggattaaagctaaagacatagttcctggtgatattgtagaaattgctgttggtgacaaagttcctgctgatataaggttaacttccatcaaatctaccacactaagagttgaccagtcaattctcacaggtgaatctgtctctgtcatcaagcacactgatcccgtccctgacccacgagctgtcaaccaagataaaaagaacatgctgttttctggtacaaacattgctgctgggaaagctatgggagtggtggtagcaactggagttaacaccgaaattggcaagatccgggatgaaatggtggcaacagaacaggagagaacaccccttcagcaaaaactagatgaatttggggaacagctttccaaagtcatctcccttatttgcattgcagtctggatcataaatattgggcacttcaatgacccggttcatggagggtcctggatcagaggtgctatttactactttaaaattgcagtggccctggctgtagcagccattcctgaaggtctgcctgcagtcatcaccacctgcctggctcttggaactcgcagaatggcaaagaaaaatgccattgttcgaagcctcccgtctgtggaaacccttggttgtacttctgttatctgctcagacaagactggtacacttacaacaaaccagatgtcagtctgcaggatgttcattctggacagagtggaaggtgatacttgttcccttaatgagtttaccataactggatcaacttatgcacctattggagaagtgcataaagatgataaaccagtgaattgtcaccagtatgatggtctggtagaattagcaacaatttgtgctctttgtaatgactctgctttggattacaatgaggcaaagggtgtgtatgaaaaagttggagaagctacagagactgctctcacttgcctagtagagaagatgaatgtatttgataccgaattgaagggtctttctaaaatagaacgtgcaaatgcctgcaactcagtcattaaacagctgatgaaaaaggaattcactctagagttttcacgtgacagaaagtcaatgtcggtttactgtacaccaaataaaccaagcaggacatcaatgagcaagatgtttgtgaagggtgctcctgaaggtgtcattgacaggtgcacccacattcgagttggaagtactaaggttcctatgacctctggagtcaaacagaagatcatgtctgtcattcgagagtggggtagtggcagcgacacactgcgatgcctggccctggccactcatgacaacccactgagaagagaagaaatgcaccttgaggactctgccaactttattaaatatgagaccaatctgaccttcgttggctgcgtgggcatgctggatcctccgagaatcgaggtggcctcctccgtgaagctgtgccggcaagcaggcatccgggtcatcatgatcactggggacaacaagggcactgctgtggccatctgtcgccgcatcggcatcttcgggcaggatgaggacgtgacgtcaaaagctttcacaggccgggagtttgatgaactcaacccctccgcccagcgagacgcctgcctgaacgcccgctgttttgctcgagttgaaccctcccacaagtctaaaatcgtagaatttcttcagtcttttgatgagattacagctatgactggcgatggcgtgaacgatgctcctgctctgaagaaagccgagattggcattgctatgggctctggcactgcggtggctaaaaccgcctctgagatggtcctggcggatgacaacttctccaccattgtggctgccgttgaggaggggcgggcaatctacaacaacatgaaacagttcatccgctacctcatctcgtccaacgtcggggaagttgtctgtattttcctgacagcagcccttggatttcccgaggctttgattcctgttcagctgctctgggtcaatctggtgacagatggcctgcctgccactgcactggggttcaaccctcctgatctggacatcatgaataaacctccccggaacccaaaggaaccattgatcagcgggtggctctttttccgttacttggctattggctgttacgtcggcgctgctaccgtgggtgctgctgcatggtggttcattgctgctgacggtggtccaagagtgtccttctaccagctgagtcatttcctacagtgtaaagaggacaacccggactttgaaggcgtggattgtgcaatctttgaatccccatacccgatgacaatggcgctctctgttctagtaactatagaaatgtgtaacgccctcaacagcttgtccgaaaaccagtccttgctgaggatgcccccctgggagaacatctggctcgtgggctccatctgcctgtccatgtcactccacttcctgatcctctatgtcgaacccttgccactcatcttccagatcacaccgctgaacgtgacccagtggctgatggtgctgaaaatctccttgcccgtgattctcatggatgagacgctcaagtttgtggcccgcaactacctggaacctgggtgctgaaaatctccttgcccgtgattctcatggatgagacgctcaaggagattttcagcaccatcagccatgagaatctccttgcccgtgattct

SEQ ID NO: 315981 - DNA, 2811 bp, Homo sapiens
gcgcgcgggaggagggagccgggaggagggggcggggccgcgccgcccgcgccgcgctgggcgctctcggccaatgagcggcgtccacatgccgcggcggcggcgaaaggggaggcagcggccgataaatgctattagagcagccgccgcggagccgtccccgacgccacctccttttccttcgccgcagtttcctccgccgctgtcgggcgtgcggcgctgagggacccgggcgagcgcgccgcgcaccgccccgccggctcgcctccctcgccgcgttccgccctcagtggtctgccgggcgccccctcctccggcccgggcggggcctctgatcgcctcaagagagcggggagggggctcgggggccgcggcctgccctcccggcgggcggctgagggcgagggaggccctcccttctggcgaggggagggagggtgggtcaggagcccccaacccgccctgcggagctcggggccgcgcgaggggcggttgtctgggggagggggcgcggggtgattcagcgcccggcgaggcggaagcggccgcaagaggaggaggggagagcccgtccgcgcctgggctcccggggtggcacgagcccgcggccggagtgcgaggcggaggcgaggaggccgcggggacgggaggcgaggccggccgggcccccgaagccatggagaacgcgcacaccaagacggtggaggaggtgctgggccacttcggcgtcaacgagagtacggggctgagcctggaacaggtcaagaagcttaaggagagatggggctccaacgagttaccggctgaagaaggaaaaaccttgctggaacttgtgattgagcagtttgaagacttgctagttaggattttattactggcagcatgtatatcttttgttttggcttggtttgaagaaggtgaagaaacaattacagcctttgtagaaccttttgtaattttactcatattagtagccaatgcaattgtgggtgtatggcaggaaagaaatgctgaaaatgccatcgaagcccttaaggaatatgagcctgaaatgggcaaagtgtatcgacaggacagaaagagtgtgcagcggattaaagctaaagacatagttcctggtgatattgtagaaattgctgttggtgacaaagttcctgctgatataaggttaacttccatcaaatctaccacactaagagttgaccagtcaattctcacaggtgaatctgtctctgtcatcaagcacactgatcccgtccctgacccacgagctgtcaaccaagataaaaagaacatgctgttttctggtacaaacattgctgctgggaaagctatgggagtggtggtagcaactggagttaacaccgaaattggcaagatccgggatgaaatggtggcaacagaacaggagagaacaccccttcagcaaaaactagatgaatttggggaacagctttccaaagtcatctcccttatttgcattgcagtctggatcataaatattgggcacttcaatgacccggttcatggagggtcctggatcagaggtgctatttactactttaaaattgcagtggccctggctgtagcagccattcctgaaggtctgcctgcagtcatcaccacctgcctggctcttggaactcgcagaatggcaaagaaaaatgccattgttcgaagcctcccgtctgtggaaacccttggttgtacttctgttatctgctcagacaagactggtacacttacaacaaaccagatgtcagtctgcaggatgttcattctggacagagtggaaggtgatacttgttcccttaatgagtttaccataactggatcaacttatgcacctattggagaagtgcataaagatgataaaccagtgaattgtcaccagtatgatggtctggtagaattagcaacaatttgtgctctttgtaatgactctgctttggattacaatgaggcaaagggtgtgtatgaaaaagttggagaagctacagagactgctctcacttgcctagtagagaagatgaatgtatttgataccgaattgaagggtctttctaaaatagaacgtgcaaatgcctgcaactcagtcattaaacagctgatgaaaaaggaattcactctagagttttcacgtgacagaaagtcaatgtcggtttactgtacaccaaataaaccaagcaggacatcaatgagcaagatgtttgtgaagggtgctcctgaaggtgtcattgacaggtgcacccacattcgagttggaagtactaaggttcctatgacctctggagtcaaacagaagatcatgtctgtcattcgagagtggggtagtggcagcgacacactgcgatgcctggccctggccactcatgacaacccactgagaagagaagaaatgcaccttgaggactctgccaactttattaaatatgagaccaatctgaccttcgttggctgcgtgggcatgctggatcctccgagaatcgaggtggcctcctccgtgaagctgtgccggcaagcaggcatccgggtcatcatgatcactggggacaacaagggcactgctgtggccatctgtcgccgcatcggcatcttcgggcaggatgaggacgtgacgtcaaaagctttcacaggccgggagtttgatgaactcaacccctccgcccagcgagacgcctgcctgaacgcccgctgttttgctcgagttgaaccctcccacaagtctaaaatctttgtttctttctgtgctggtaacaatgagcgtcgcacagacatggtttcaggtaaataaatctattctatgataaa

SEQ ID NO: 315982 - DNA, 2027 bp, Homo sapiens
gcgcgcgggaggagggagccgggaggagggggcggggccgcgccgcccgcgccgcgctgggcgctctcggccaatgagcggcgtccacatgccgcggcggcggcgaaaggggaggcagcggccgataaatgctattagagcagccgccgcggagccgtccccgacgccacctccttttccttcgccgcagtttcctccgccgctgtcgggcgtgcggcgctgagggacccgggcgagcgcgccgcgcaccgccccgccggctcgcctccctcgccgcgttccgccctcagtggtctgccgggcgccccctcctccggcccgggcggggcctctgatcgcctcaagagagcggggagggggctcgggggccgcggcctgccctcccggcgggcggctgagggcgagggaggccctcccttctggcgaggggagggagggtgggtcaggagcccccaacccgccctgcggagctcggggccgcgcgaggggcggttgtctgggggagggggcgcggggtgattcagcgcccggcgaggcggaagcggccgcaagaggaggaggggagagcccgtccgcgcctgggctcccggggtggcacgagcccgcggccggagtgcgaggcggaggcgaggaggccgcggggacgggaggcgaggccggccgggcccccgaagccatggagaacgcgcacaccaagacggtggaggaggtgctgggccacttcggcgtcaacgagagtacggggctgagcctggaacaggtcaagaagcttaaggagagatggggctccaacgagttaccggctgaagaaggaaaaaccttgctggaacttgtgattgagcagtttgaagacttgctagttaggattttattactggcagcatgtatatcttttgttttggcttggtttgaagaaggtgaagaaacaattacagcctttgtagaaccttttgtaattttactcatattagtagccaatgcaattgtgggtgtatggcaggaaagaaatgctgaaaatgccatcgaagcccttaaggaatatgagcctgaaatgggcaaagtgtatcgacaggacagaaagagtgtgcagcggattaaagctaaagacatagttcctggtgatattgtagaaattgctgttggtgacaaagttcctgctgatataaggttaacttccatcaaatctaccacactaagagttgaccagtcaattctcacaggtgaatctgtctctgtcatcaagcacactgatcccgtccctgacccacgagctgtcaaccaagataaaaagaacatgctgttttctggtacaaacattgctgctgggaaagctatgggagtggtggtagcaactggagttaacaccgaaattggcaagatccgggatgaaatggtggcaacagaacaggagagaacaccccttcagcaaaaactagatgaatttggggaacagctttccaaagtcatctcccttatttgcattgcagtctggatcataaatattgggcacttcaatgacccggttcatggagggtcctggatcagaggtgctatttactactttaaaattgcagtggccctggctgtagcagccattcctgaaggtctgcctgcagtcatcaccacctgcctggctcttggaactcgcagaatggcaaagaaaaatgccattgttcgaagcctcccgtctgtggaaacccttggttgtacttctgttatctgctcagacaagactggtacacttacaacaaaccagatgtcagtctgcaggatgttcattctggacagagtggaaggtgatacttgttcccttaatgagtttaccataactggatcaacttatgcacctattggagaagtgcataaagatgataaaccagtgaattgtcaccagtatgatggtctggtagaattagcaacaatttgtgctctttgtaatgactctgctttggattacaatgaggcaaagggtgtgtatgaaaaaaatgtatctttgggaaaacaattacagtttgttaatttgaaaa

SEQ ID NO: 315983 - DNA, 1990 bp, Homo sapiens
gcgcgcgggaggagggagccgggaggagggggcggggccgcgccgcccgcgccgcgctgggcgctctcggccaatgagcggcgtccacatgccgcggcggcggcgaaaggggaggcagcggccgataaatgctattagagcagccgccgcggagccgtccccgacgccacctccttttccttcgccgcagtttcctccgccgctgtcgggcgtgcggcgctgagggacccgggcgagcgcgccgcgcaccgccccgccggctcgcctccctcgccgcgttccgccctcagtggtctgccgggcgccccctcctccggcccgggcggggcctctgatcgcctcaagagagcggggagggggctcgggggccgcggcctgccctcccggcgggcggctgagggcgagggaggccctcccttctggcgaggggagggagggtgggtcaggagcccccaacccgccctgcggagctcggggccgcgcgaggggcggttgtctgggggagggggcgcggggtgattcagcgcccggcgaggcggaagcggccgcaagaggaggaggggagagcccgtccgcgcctgggctcccggggtggcacgagcccgcggccggagtgcgaggcggaggcgaggaggccgcggggacgggaggcgaggccggccgggcccccgaagccatggagaacgcgcacaccaagacggtggaggaggtgctgggccacttcggcgtcaacgagagtacggggctgagcctggaacaggtcaagaagcttaaggagagatggggctccaacgagttaccggctgaagaaggaaaaaccttgctggaacttgtgattgagcagtttgaagacttgctagttaggattttattactggcagcatgtatatcttttgttttggcttggtttgaagaaggtgaagaaacaattacagcctttgtagaaccttttgtaattttactcatattagtagccaatgcaattgtgggtgtatggcaggaaagaaatgctgaaaatgccatcgaagcccttaaggaatatgagcctgaaatgggcaaagtgtatcgacaggacagaaagagtgtgcagcggattaaagctaaagacatagttcctggtgatattgtagaaattgctgttggtgacaaagttcctgctgatataaggttaacttccatcaaatctaccacactaagagttgaccagtcaattctcacaggtgaatctgtctctgtcatcaagcacactgatcccgtccctgacccacgagctgtcaaccaagataaaaagaacatgctgttttctggtacaaacattgctgctgggaaagctatgggagtggtggtagcaactggagttaacaccgaaattggcaagatccgggatgaaatggtggcaacagaacaggagagaacaccccttcagcaaaaactagatgaatttggggaacagctttccaaagtcatctcccttatttgcattgcagtctggatcataaatattgggcacttcaatgacccggttcatggagggtcctggatcagaggtgctatttactactttaaaattgcagtggccctggctgtagcagccattcctgaaggtctgcctgcagtcatcaccacctgcctggctcttggaactcgcagaatggcaaagaaaaatgccattgttcgaagcctcccgtctgtggaaacccttggttgtacttctgttatctgctcagacaagactggtacacttacaacaaaccagatgtcagtctgcagggtaagaggagtaatttagaatattccgtgtcgtggttctttgttcatcctaccaatatgccttcatgccatcaaaacttttgatttgtaatttcatacatttctgtgggctgtatgtatagcctgagcttaatttctaatatttgagaggatctaatcatttaattcctaaaactttcacaaaatacaggatatctgtatggctgatatacttgtatta

SEQ ID NO: 315984 - DNA, 1306 bp, Homo sapiens
gcgcgcgggaggagggagccgggaggagggggcggggccgcgccgcccgcgccgcgctgggcgctctcggccaatgagcggcgtccacatgccgcggcggcggcgaaaggggaggcagcggccgataaatgctattagagcagccgccgcggagccgtccccgacgccacctccttttccttcgccgcagtttcctccgccgctgtcgggcgtgcggcgctgagggacccgggcgagcgcgccgcgcaccgccccgccggctcgcctccctcgccgcgttccgccctcagtggtctgccgggcgccccctcctccggcccgggcggggcctctgatcgcctcaagagagcggggagggggctcgggggccgcggcctgccctcccggcgggcggctgagggcgagggaggccctcccttctggcgaggggagggagggtgggtcaggagcccccaacccgccctgcggagctcggggccgcgcgaggggcggttgtctgggggagggggcgcggggtgattcagcgcccggcgaggcggaagcggccgcaagaggaggaggggagagcccgtccgcgcctgggctcccggggtggcacgagcccgcggccggagtgcgaggcggaggcgaggaggccgcggggacgggaggcgaggccggccgggcccccgaagccatggagaacgcgcacaccaagacggtggaggaggtgctgggccacttcggcgtcaacgagagtacggggctgagcctggaacaggtcaagaagcttaaggagagatggggctccaacgagttaccggctgaagaaggaaaaaccttgctggaacttgtgattgagcagtttgaagacttgctagttaggattttattactggcagcatgtatatcttttgttttggcttggtttgaagaaggtgaagaaacaattacagcctttgtagaaccttttgtaattttactcatattagtagccaatgcaattgtgggtgtatggcaggaaagaaatgctgaaaatgccatcgaagcccttaaggaatatgagcctgaaatgggcaaagtgtatcgacaggacagaaagagtgtgcagcggattaaagctaaagacatagttcctggtgatattgtagaaattgctgttggtgacaaagttcctgctgatataaggttaacttccatcaaatctaccacactaagagttgaccagtcaattctcacaggtaaatatgatatattaagtcattgaatttctgaagaccttcgcatattccatgccaatagagttggctcttgcctcactgtccct

SEQ ID NO: 315985 - DNA, 509 bp, Homo sapiens
gttaattgaatatctttttaaagggggccatttgcttcctgttcacaataatttagcttttttgatggaatgaatcatggcatatacaactttattctctttgctgtgccttgtgtatatgtagtaagacttttacttactgctaagtaggaaagtattctttaaagtgaaagcttgaaggcctgtctgaagatacagagcaaaatttcttagaataatgtagttaggtttccttaagcctcattctcttccttcctaattcaaatcttgaatccatctaaagttttttatgactccaagataggttgatcactttgcttgttttaactgaattttatgtatttgtgttatatgcagatcatttattttctttaaaaattgatttggagacaaattcatctttagataacatagttttaaaagttgctcatttcagccgccttttttttctcctaattagttggtgacaaagttcctgctgatataaggttaacttccatcaaatctac

SEQ ID NO: 315986 - DNA, 354 bp, Homo sapiens
gacttgggaaatatactgggctgataggaatttgattggattttcttgcagagtcatttcctacagtgtaaagaggacaacccggactttgaaggcgtggattgtgcaatctttgaatccccatacccgatgacaatggcgctctctgttctagtaactatagaaatgtgtaacgccctcaacagtagtgcaccttcacggcaggctgaggcgagcatggtgactgccagggcaccggggaattgtgtgtagtcacggttgattgaggatcacaggacagttcttcccttcccaaaagaaaggagaacaggcaataccagttttaaaagcatgagctgtcgtcacctccaggaa

SEQ ID NO: 315987 - DNA, 277 bp, Homo sapiens
ggtgcgtttccccacctctccttgctctgcagcttgtccgaaaaccagtccttgctgaggatgcccccctgggagaacatctggctcgtgggctccatctgcctgtccatgtcactccacttcctgatcctctatgtcgaacccttgccagtaagtggttgggtggggcttgggaccagccacctccttccaggggaggctggaggcgtgacacgtcttccctgtgtgtcagctcatcttccagatcacaccgctgaacgtgacccagtggctgatg

SEQ ID NO: 315988 - DNA, 4458 bp, Homo sapiens
gcgcgcgggaggagggagccgggaggagggggcggggccgcgccgcccgcgccgcgctgggcgctctcggccaatgagcggcgtccacatgccgcggcggcggcgaaaggggaggcagcggccgataaatgctattagagcagccgccgcggagccgtccccgacgccacctccttttccttcgccgcagtttcctccgccgctgtcgggcgtgcggcgctgagggacccgggcgagcgcgccgcgcaccgccccgccggctcgcctccctcgccgcgttccgccctcagtggtctgccgggcgccccctcctccggcccgggcggggcctctgatcgcctcaagagagcggggagggggctcgggggccgcggcctgccctcccggcgggcggctgagggcgagggaggccctcccttctggcgaggggagggagggtgggtcaggagcccccaacccgccctgcggagctcggggccgcgcgaggggcggttgtctgggggagggggcgcggggtgattcagcgcccggcgaggcggaagcggccgcaagaggaggaggggagagcccgtccgcgcctgggctcccggggtggcacgagcccgcggccggagtgcgaggcggaggcgaggaggccgcggggacgggaggcgaggccggccgggcccccgaagccatggagaacgcgcacaccaagacggtggaggaggtgctgggccacttcggcgtcaacgagagtacggggctgagcctggaacaggtcaagaagcttaaggagagatggggctccaacgagttaccggctgaagaaggaaaaaccttgctggaacttgtgattgagcagtttgaagacttgctagttaggattttattactggcagcatgtatatcttttgttttggcttggtttgaagaaggtgaagaaacaattacagcctttgtagaaccttttgtaattttactcatattagtagccaatgcaattgtgggtgtatggcaggaaagaaatgctgaaaatgccatcgaagcccttaaggaatatgagcctgaaatgggcaaagtgtatcgacaggacagaaagagtgtgcagcggattaaagctaaagacatagttcctggtgatattgtagaaattgctgttggtgacaaagttcctgctgatataaggttaacttccatcaaatctaccacactaagagttgaccagtcaattctcacaggtgaatctgtctctgtcatcaagcacactgatcccgtccctgacccacgagctgtcaaccaagataaaaagaacatgctgttttctggtacaaacattgctgctgggaaagctatgggagtggtggtagcaactggagttaacaccgaaattggcaagatccgggatgaaatggtggcaacagaacaggagagaacaccccttcagcaaaaactagatgaatttggggaacagctttccaaagtcatctcccttatttgcattgcagtctggatcataaatattgggcacttcaatgacccggttcatggagggtcctggatcagaggtgctatttactactttaaaattgcagtggccctggctgtagcagccattcctgaaggtctgcctgcagtcatcaccacctgcctggctcttggaactcgcagaatggcaaagaaaaatgccattgttcgaagcctcccgtctgtggaaacccttggttgtacttctgttatctgctcagacaagactggtacacttacaacaaaccagatgtcagtctgcaggatgttcattctggacagagtggaaggtgatacttgttcccttaatgagtttaccataactggatcaacttatgcacctattggagaagtgcataaagatgataaaccagtgaattgtcaccagtatgatggtctggtagaattagcaacaatttgtgctctttgtaatgactctgctttggattacaatgaggcaaagggtgtgtatgaaaaagttggagaagctacagagactgctctcacttgcctagtagagaagatgaatgtatttgataccgaattgaagggtctttctaaaatagaacgtgcaaatgcctgcaactcagtcattaaacagctgatgaaaaaggaattcactctagagttttcacgtgacagaaagtcaatgtcggtttactgtacaccaaataaaccaagcaggacatcaatgagcaagatgtttgtgaagggtgctcctgaaggtgtcattgacaggtgcacccacattcgagttggaagtactaaggttcctatgacctctggagtcaaacagaagatcatgtctgtcattcgagagtggggtagtggcagcgacacactgcgatgcctggccctggccactcatgacaacccactgagaagagaagaaatgcaccttgaggactctgccaactttattaaatatgagaccaatctgaccttcgttggctgcgtgggcatgctggatcctccgagaatcgaggtggcctcctccgtgaagctgtgccggcaagcaggcatccgggtcatcatgatcactggggacaacaagggcactgctgtggccatctgtcgccgcatcggcatcttcgggcaggatgaggacgtgacgtcaaaagctttcacaggccgggagtttgatgaactcaacccctccgcccagcgagacgcctgcctgaacgcccgctgttttgctcgagttgaaccctcccacaagtctaaaatcgtagaatttcttcagtcttttgatgagattacagctatgactggcgatggcgtgaacgatgctcctgctctgaagaaagccgagattggcattgctatgggctctggcactgcggtggctaaaaccgcctctgagatggtcctggcggatgacaacttctccaccattgtggctgccgttgaggaggggcgggcaatctacaacaacatgaaacagttcatccgctacctcatctcgtccaacgtcggggaagttgtctgtattttcctgacagcagcccttggatttcccgaggctttgattcctgttcagctgctctgggtcaatctggtgacagatggcctgcctgccactgcactggggttcaaccctcctgatctggacatcatgaataaacctccccggaacccaaaggaaccattgatcagcgggtggctctttttccgttacttggctattggctgttacgtcggcgctgctaccgtgggtgctgctgcatggtggttcattgctgctgacggtggtccaagagtgtccttctaccagctgagtcatttcctacagtgtaaagaggacaacccggactttgaaggcgtggattgtgcaatctttgaatccccatacccgatgacaatggcgctctctgttctagtaactatagaaatgtgtaacgccctcaacagcttgtccgaaaaccagtccttgctgaggatgcccccctgggagaacatctggctcgtgggctccatctgcctgtccatgtcactccacttcctgatcctctatgtcgaacccttgccactcatcttccagatcacaccgctgaacgtgacccagtggctgatggtgctgaaaatctccttgcccgtgattctcatggatgagacgctcaagtttgtggcccgcaactacctggaacctgcaatactggagtaaccgcttcctaaaccattttgcagaaatgtaagggtgttcggttgcgtgcatgtgcgtttttagcaacacatctaccaaccctgtgcatgactgatgttggggaaaaagaaaagtaaaaaacttcccaactcactttgtgttatgtggaggaaatgtgtattaccaatggggttgttagcttttaaatcaaaatactgattacagatgtacaatttagcttaatcagaaagcctctccagagaagtttggtttctttgctgcaagaggaatgaggctctgtaaccttatctaagaacttggaagccgtcagccaagtcgccacatttctctgcaaaatgtcatagcttatataaatgtacagtattcaattgtaatgcatgccttcggttgtaagtagccagatccctctccagtgacattggaacatgctactttttaattggccctgtacagtttgcttatttataaattcattaaaaacactacaggtgttgaatggttaaaatgtaggcctccagttcattttcagttattttctgagtgtgcagacagctatttcgcactgtattaaatgtaacttatttaatgaaatcagaagcagtagacagatgttggtgcaatacaaatattgtgatgcatttatcttaataaaatgctaaatgtcaatttatcactgcgcatgtttgactttagactgtaaatagagatcagtttgtttctttctgtgctggtaacaatgagcgtcgcacagacatggtttcaggtaaataaatctattctatgataaa

SEQ ID NO: 315989 - DNA, 4657 bp, Homo sapiens
gcgcgcgggaggagggagccgggaggagggggcggggccgcgccgcccgcgccgcgctgggcgctctcggccaatgagcggcgtccacatgccgcggcggcggcgaaaggggaggcagcggccgataaatgctattagagcagccgccgcggagccgtccccgacgccacctccttttccttcgccgcagtttcctccgccgctgtcgggcgtgcggcgctgagggacccgggcgagcgcgccgcgcaccgccccgccggctcgcctccctcgccgcgttccgccctcagtggtctgccgggcgccccctcctccggcccgggcggggcctctgatcgcctcaagagagcggggagggggctcgggggccgcggcctgccctcccggcgggcggctgagggcgagggaggccctcccttctggcgaggggagggagggtgggtcaggagcccccaacccgccctgcggagctcggggccgcgcgaggggcggttgtctgggggagggggcgcggggtgattcagcgcccggcgaggcggaagcggccgcaagaggaggaggggagagcccgtccgcgcctgggctcccggggtggcacgagcccgcggccggagtgcgaggcggaggcgaggaggccgcggggacgggaggcgaggccggccgggcccccgaagccatggagaacgcgcacaccaagacggtggaggaggtgctgggccacttcggcgtcaacgagagtacggggctgagcctggaacaggtcaagaagcttaaggagagatggggctccaacgagttaccggctgaagaaggaaaaaccttgctggaacttgtgattgagcagtttgaagacttgctagttaggattttattactggcagcatgtatatcttttgttttggcttggtttgaagaaggtgaagaaacaattacagcctttgtagaaccttttgtaattttactcatattagtagccaatgcaattgtgggtgtatggcaggaaagaaatgctgaaaatgccatcgaagcccttaaggaatatgagcctgaaatgggcaaagtgtatcgacaggacagaaagagtgtgcagcggattaaagctaaagacatagttcctggtgatattgtagaaattgctgttggtgacaaagttcctgctgatataaggttaacttccatcaaatctaccacactaagagttgaccagtcaattctcacaggtgaatctgtctctgtcatcaagcacactgatcccgtccctgacccacgagctgtcaaccaagataaaaagaacatgctgttttctggtacaaacattgctgctgggaaagctatgggagtggtggtagcaactggagttaacaccgaaattggcaagatccgggatgaaatggtggcaacagaacaggagagaacaccccttcagcaaaaactagatgaatttggggaacagctttccaaagtcatctcccttatttgcattgcagtctggatcataaatattgggcacttcaatgacccggttcatggagggtcctggatcagaggtgctatttactactttaaaattgcagtggccctggctgtagcagccattcctgaaggtctgcctgcagtcatcaccacctgcctggctcttggaactcgcagaatggcaaagaaaaatgccattgttcgaagcctcccgtctgtggaaacccttggttgtacttctgttatctgctcagacaagactggtacacttacaacaaaccagatgtcagtctgcaggatgttcattctggacagagtggaaggtgatacttgttcccttaatgagtttaccataactggatcaacttatgcacctattggagaagtgcataaagatgataaaccagtgaattgtcaccagtatgatggtctggtagaattagcaacaatttgtgctctttgtaatgactctgctttggattacaatgaggcaaagggtgtgtatgaaaaagttggagaagctacagagactgctctcacttgcctagtagagaagatgaatgtatttgataccgaattgaagggtctttctaaaatagaacgtgcaaatgcctgcaactcagtcattaaacagctgatgaaaaaggaattcactctagagttttcacgtgacagaaagtcaatgtcggtttactgtacaccaaataaaccaagcaggacatcaatgagcaagatgtttgtgaagggtgctcctgaaggtgtcattgacaggtgcacccacattcgagttggaagtactaaggttcctatgacctctggagtcaaacagaagatcatgtctgtcattcgagagtggggtagtggcagcgacacactgcgatgcctggccctggccactcatgacaacccactgagaagagaagaaatgcaccttgaggactctgccaactttattaaatatgagaccaatctgaccttcgttggctgcgtgggcatgctggatcctccgagaatcgaggtggcctcctccgtgaagctgtgccggcaagcaggcatccgggtcatcatgatcactggggacaacaagggcactgctgtggccatctgtcgccgcatcggcatcttcgggcaggatgaggacgtgacgtcaaaagctttcacaggccgggagtttgatgaactcaacccctccgcccagcgagacgcctgcctgaacgcccgctgttttgctcgagttgaaccctcccacaagtctaaaatcgtagaatttcttcagtcttttgatgagattacagctatgactggcgatggcgtgaacgatgctcctgctctgaagaaagccgagattggcattgctatgggctctggcactgcggtggctaaaaccgcctctgagatggtcctggcggatgacaacttctccaccattgtggctgccgttgaggaggggcgggcaatctacaacaacatgaaacagttcatccgctacctcatctcgtccaacgtcggggaagttgtctgtattttcctgacagcagcccttggatttcccgaggctttgattcctgttcagctgctctgggtcaatctggtgacagatggcctgcctgccactgcactggggttcaaccctcctgatctggacatcatgaataaacctccccggaacccaaaggaaccattgatcagcgggtggctctttttccgttacttggctattggctgttacgtcggcgctgctaccgtgggtgctgctgcatggtggttcattgctgctgacggtggtccaagagtgtccttctaccagctgagtcatttcctacagtgtaaagaggacaacccggactttgaaggcgtggattgtgcaatctttgaatccccatacccgatgacaatggcgctctctgttctagtaactatagaaatgtgtaacgccctcaacagcttgtccgaaaaccagtccttgctgaggatgcccccctgggagaacatctggctcgtgggctccatctgcctgtccatgtcactccacttcctgatcctctatgtcgaacccttgccactcatcttccagatcacaccgctgaacgtgacccagtggctgatggtgctgaaaatctccttgcccgtgattctcatggatgagacgctcaagtttgtggcccgcaactacctggaacctgctggtaaagagtgtgtgcagcctgccaccaaatcctgctcgttctcggcatgcaccgatgggatttcctggccgtttgtgctgctcataatgcccctggtgatctgggtctatagcacagacactaactttagcgatatgttctggtcttgactgacagttttccataaagaagatgtttaacttaatcaattaatttttttattgtttaaagcaactgtctatttctgctgaattttcacatgaacatactggctggtgatggaggtttcatactctagattttgttttgctttttctgactccagtggggcaagattttccttttttatacacataattaaagtgtccattgacatgtacagagaactaacactattttatgcaaatatttttttgtagatgaaaaagcatgtacagtgttctgtttaatactcatccttgtataaaaaaaatagttgagccagcagacattgtcagcaaattaattggcagcagattttaggaaatgaatgtgtgtggttttttttctaaaactaaatagcatgtattgtgtcttttgcatgatgatccggatttaatttgatatcacagtctaatttttattcataagccaatttttctgcactgagcagagtcttgctacctcagtcagtattgttttggtttgctacttccctcacccactttggcctccgttcaccccaccccaccccacctctccccaccttacccccgccccgcttggcttcttctttaggattgtgatggttcgttctgtttacatcagttttaacgagaggtatgcctgtactcgcttgtgcagaaaacattgttccagattcaatcgactgggtttatgtcccttcacatagtttttaaggttatttatttaaatgtctaatgtattttattgtaacagacattgttttgccaacattgcctatttcagtggcacgtcatctagttttaaaaaaataaaacattttaaatggacagaga

SEQ ID NO: 315990 - DNA, 7766 bp, Homo sapiens
tatacatcaaaactgaggtacacgtgttaccagctttcatctttgtgtcatttgattctctttaggctggtttgattctacaacttccattctgaaatcgggaagaaaattactgtgacttctacacggttgatagttcatatatgatgtcatgagaaatatatagcttgggactggcagtgctatgatgagagtccagccattcattggtctttacaactggagggatagttcttagaatttgtgagagatactcatcactcatagcatttactgtgtgcccaaacacaatctaagcatgttacatatgacttcttatcctcacaaaccttgaggaaagaaatgctgaaaatgccatcgaagcccttaaggaatatgagcctgaaatgggcaaagtgtatcgacaggacagaaagagtgtgcagcggattaaagctaaagacatagttcctggtgatattgtagaaattgctgttggtgacaaagttcctgctgatataaggttaacttccatcaaatctaccacactaagagttgaccagtcaattctcacaggtgaatctgtctctgtcatcaagcacactgatcccgtccctgacccacgagctgtcaaccaagataaaaagaacatgctgttttctggtacaaacattgctgctgggaaagctatgggagtggtggtagcaactggagttaacaccgaaattggcaagatccgggatgaaatggtggcaacagaacaggagagaacaccccttcagcaaaaactagatgaatttggggaacagctttccaaagtcatctcccttatttgcattgcagtctggatcataaatattgggcacttcaatgacccggttcatggagggtcctggatcagaggtgctatttactactttaaaattgcagtggccctggctgtagcagccattcctgaaggtctgcctgcagtcatcaccacctgcctggctcttggaactcgcagaatggcaaagaaaaatgccattgttcgaagcctcccgtctgtggaaacccttggttgtacttctgttatctgctcagacaagactggtacacttacaacaaaccagatgtcagtctgcaggatgttcattctggacagagtggaaggtgatacttgttcccttaatgagtttaccataactggatcaacttatgcacctattggagaagtgcataaagatgataaaccagtgaattgtcaccagtatgatggtctggtagaattagcaacaatttgtgctctttgtaatgactctgctttggattacaatgaggcaaagggtgtgtatgaaaaagttggagaagctacagagactgctctcacttgcctagtagagaagatgaatgtatttgataccgaattgaagggtctttctaaaatagaacgtgcaaatgcctgcaactcagtcattaaacagctgatgaaaaaggaattcactctagagttttcacgtgacagaaagtcaatgtcggtttactgtacaccaaataaaccaagcaggacatcaatgagcaagatgtttgtgaagggtgctcctgaaggtgtcattgacaggtgcacccacattcgagttggaagtactaaggttcctatgacctctggagtcaaacagaagatcatgtctgtcattcgagagtggggtagtggcagcgacacactgcgatgcctggccctggccactcatgacaacccactgagaagagaagaaatgcaccttgaggactctgccaactttattaaatatgagaccaatctgaccttcgttggctgcgtgggcatgctggatcctccgagaatcgaggtggcctcctccgtgaagctgtgccggcaagcaggcatccgggtcatcatgatcactggggacaacaagggcactgctgtggccatctgtcgccgcatcggcatcttcgggcaggatgaggacgtgacgtcaaaagctttcacaggccgggagtttgatgaactcaacccctccgcccagcgagacgcctgcctgaacgcccgctgttttgctcgagttgaaccctcccacaagtctaaaatcgtagaatttcttcagtcttttgatgagattacagctatgactggcgatggcgtgaacgatgctcctgctctgaagaaagccgagattggcattgctatgggctctggcactgcggtggctaaaaccgcctctgagatggtcctggcggatgacaacttctccaccattgtggctgccgttgaggaggggcgggcaatctacaacaacatgaaacagttcatccgctacctcatctcgtccaacgtcggggaagttgtctgtattttcctgacagcagcccttggatttcccgaggctttgattcctgttcagctgctctgggtcaatctggtgacagatggcctgcctgccactgcactggggttcaaccctcctgatctggacatcatgaataaacctccccggaacccaaaggaaccattgatcagcgggtggctctttttccgttacttggctattggctgttacgtcggcgctgctaccgtgggtgctgctgcatggtggttcattgctgctgacggtggtccaagagtgtccttctaccagctgagtcatttcctacagtgtaaagaggacaacccggactttgaaggcgtggattgtgcaatctttgaatccccatacccgatgacaatggcgctctctgttctagtaactatagaaatgtgtaacgccctcaacagcttgtccgaaaaccagtccttgctgaggatgcccccctgggagaacatctggctcgtgggctccatctgcctgtccatgtcactccacttcctgatcctctatgtcgaacccttgccactcatcttccagatcacaccgctgaacgtgacccagtggctgatggtgctgaaaatctccttgcccgtgattctcatggatgagacgctcaagtttgtggcccgcaactacctggaacctgctggtaaagagtgtgtgcagcctgccaccaaatcctgctcgttctcggcatgcaccgatgggatttcctggccgtttgtgctgctcataatgcccctggtgatctgggtctatagcacagacactaactttagcgatatgttctggtcttgactgacagttttccataaagaagatgtttaacttaatcaattaatttttttattgtttaaagcaactgtctatttctgctgaattttcacatgaacatactggctggtgatggaggtttcatactctagattttgttttgctttttctgactccagtggggcaagattttccttttttatacacataattaaagtgtccattgacatgtacagagaactaacactattttatgcaaatatttttttgtagatgaaaaagcatgtacagtgttctgtttaatactcatccttgtataaaaaaaatagttgagccagcagacattgtcagcaaattaattggcagcagattttaggaaatgaatgtgtgtggttttttttctaaaactaaatagcatgtattgtgtcttttgcatgatgatccggatttaatttgatatcacagtctaatttttattcataagccaatttttctgcactgagcagagtcttgctacctcagtcagtattgttttggtttgctacttccctcacccactttggcctccgttcaccccaccccaccccacctctccccaccttacccccgccccgcttggcttcttctttaggattgtgatggttcgttctgtttacatcagttttaacgagaggtatgcctgtactcgcttgtgcagaaaacattgttccagattcaatcgactgggtttatgtcccttcacatagtttttaaggttatttatttaaatgtctaatgtattttattgtaacagacattgttttgccaacattgcctatttcagtggcacgtcatctagttttaaaaaaataaaacattttaaatggacagagaaaaataactgtcttgtctttaactcgtaagtggcttacctgggactaacagacatgtccaactttctctccagttcttagctcagaactttagttgtactctgcttgaggggaagaaggctcctgctctgctgtgtaggtagtcataggaattgtattcttaatgtacaggcactaattgtcatctgtgatgtacattttatgcaagtttctgctggcctggtatagagaacataagggcaagtgtgtatgtgtgtgtatgtgtgtgttttgtaaaatctgtaaatagcacatgaccaaatgaacatattgtatagaactatttttatttgaatgtggcactaaccaccaccaccgttactacgatcaatgtttgcgcatgttcgagatgagtctcaccaacagtgtgtaagtcattaacagtcctaactgtggtgttttcctccaatgccttccaacatccatcaactaacgtgagtattttcttcctgggatttggatgctttagcctaaaggtgactgccaccaagtgagataactgtatgtcactaacttataagccgcctccatggcagatgctgctgtgctccctgatgccctgtgagcaccggggttgcctgtggcgcctgccatgtgactcgggcgcagcatcagctggctggaggtgtggctttcatagacctccacaggctgcctaggacaagatgaccaggagggcccaagccagacaaaagccggagtggggagagaggcatttcagccagaccaacaggctgaaggagctgtgcagactattgctaaaatgagggttcgcagctgccaggagtcatcccagaacattgctacttatttattaaaaagctaaaaactagtgaaagcaagtaactgaaccagtgaactctgggtatcgataggttcgtcttaaataggccacttccccactcccccacccccccttgcttggtcttgtccttggtggctaagacttagctctgcaggggatgttaaagcacagttagtaggacgtggctctgcacagcccaaaaaccagcttactccttagccagggtgtgaggcctcgactatattcttcaaaatgtacttaggctctggttactgggatggccagtagatgtaatgcagatggttggagtttggggagggttaggaggcatcaagcaggacaaggtgctgctgagttcagagggcccacgttcaagggatggaggtggaacctggagaccgactcttaaaagcacagtccgtggttgggtgtggtggctcatgcctgtaagtaagtctcagccctttggaggccacagcagaaggattgcttgagcccaggtactcaaaccagcctgggcaacagagtgaggccctgtcaaaaaaaaatcagccttactgtgaagcctccaaggctgctcgcaggcagctgtggctctcgggaagggaggctgctttgcccagcagggaacatttggggcagggggtaaattttgccagtttgagcatcatgaggtgtaacaagaaatgggttgaatgggccaaatgcaaggagtgcatctctgggctgcaaactgacttgagtgctgcactattgctattccgtgcaaacaaaactcagcttttcctgactcagttccttgacttagtggcctttacaaaaaaagttgagtagtgtgtggcctgctgtcgcacagcccctagttagcttcatggtttctcagcttcagacccctccagcccacagaggagcccatggagggacccacttcccttggtccagacagctgggagtgggttaggcccactgctgttttgagcagggccacttgctccatttcactgaaggctttgctgggtgaaaacacttcagcatctcctcctcaggtcaacccataaagaccaggtccagcaccgtggtcttggcacatccctggcctcaggccctcacctaacagtgaggcagcagctgcccagccccgcaatgtgcctgctgtcaggcagctcttgcctgaaacttacttccacattctttcctgatgggcaggtggctgaaggcccagccatcagtgtcgcttgttgccaccccgtgcctcccttggcctctctgagctttgcccagaagaccaacaatcatacataccctaactgggacaccactctgcagaatgcagatgatccattctggaggaagctgtcccttgagctcagtgagctcccaggcaagcagggcatctggccgacttccctcacaacagctgctcccacatcccctcggactggagcttcagccctgactgaggtgggcagacctaagacctgagaccacaagattagctcagtgtctaccaagcatctagccactgtccagggccagagcataccacgtctgcagtgcctgtgagcagagccagcagttgccctgtgactgtaaccaccaaattgtccaaacacccgctgcagttagcaagaagggtaggcttcaccctcctttactgaggagaatgatgcggaggagtttcctctccagggctaggcaaggcaggcgagcagccagaagccgggtgcccacagggcagggacaggaaggctgtgctgctactggctgctcacttctccatcaacctcaccctctgcaccactaaccaagaccttgtcctcttgcctgtctcgctgctttcacagctgcaacgattgtgtctgcctcatggggttttcctccagagcctttattctgtagccagacgacacgaggagtctgtgtcactgagccagtgcttctagatgctaccctgtgtgggcggcacctcagggacagtaaatcagaaatgctggtcttgaaaccttgaaaagatcaagctgaatgttccttttcatctgtcgctgttgatcttcatctatttaaataggtattctaacgtttcctctctgtatttcatgaagctgatttcctctctctttccttttcagcaatactggagtaaccgcttcctaaaccattttgcagaaatgtaagggtgttcggttgcgtgcatgtgcgtttttagcaacacatctaccaaccctgtgcatgactgatgttggggaaaaagaaaagtaaaaaacttcccaactcactttgtgttatgtggaggaaatgtgtattaccaatggggttgttagcttttaaatcaaaatactgattacagatgtacaatttagcttaatcagaaagcctctccagagaagtttggtttctttgctgcaagaggaatgaggctctgtaaccttatctaagaacttggaagccgtcagccaagtcgccacatttctctgcaaaatgtcatagcttatataaatgtacagtattcaattgtaatgcatgccttcggttgtaagtagccagatccctctccagtgacattggaacatgctactttttaattggccctgtacagtttgcttatttataaattcattaaaaacactacaggtgttgaatggttaaaatgtaggcctccagttcattttcagttattttctgagtgtgcagacagctatttcgcactgtattaaatgtaacttatttaatgaaatcagaagcagtagacagatgttggtgcaatacaaatattgtgatgcatttatcttaataaaatgctaaatgtcaatttatcactgcgcatgtttgactttagactgtaaatagagatcagtttgtttctttctgtgctggtaacaatgagcgtcgcacagacatggtttcaggtaaataaatctattctatgataaa

SEQ ID NO: 315991 - DNA, 9028 bp, Homo sapiens
  misc_feature (3346)..(3346): n is a, c, g, or t
  misc_feature (3546)..(3546): n is a, c, g, or t
  misc_feature (3835)..(3835): n is a, c, g, or t
  misc_feature (4004)..(4004): n is a, c, g, or t
  misc_feature (4630)..(4632): n is a, c, g, or t
cgctgctgggcggcggcagggtggcggacggagcgggggaccggggagcggcggccgcgaggaggttatgtttgtgtttggggttgtcaagtgaaggagggatcccaggcgccgccgccgccgccgcgggggtcgcgagatcccgagccgcggccgccgccatcagcagcgcagctccagggccggctgcagcggcagcggctccgccgggcgtcctggcagcagcacatggattaattgatgtatgttgagtttatggagctgccttttggtggcttgctttatctgcagtttttaagaagaaaaagaaggccctgagtcaaagaagatgcctcgaactaaacaaattcatcccagaaatctaagagacaaaattgaagaagcacaaaaagaacttaatggggcagaagtttcaaaaaaagaaatcttacaggctggtgttaaaggaacttcggaatcccttaaaggtgtgaaacgcaaaaagatcgtagctgagaatcacctgaaaaaaataccaaaatccccactgagaaatcctcttcaggcaaaacataaacaaaatacagaagagtcatctttcgccgttcttcatagtgcttcggagtctcacaagaaacagaattatattcctgtaaaaaatgggaagcagtttaccaaacaaaatggagaaacacctggaataattgctgaagcctcaaaatctgaagaatctgtctccccaaagaagcccttgtttctgcagcaaccatctgaactgcgtagatggagatccgaaggcgctgatcctgccaaattcagtgacctcgatgaacaatgtgactcaagttccttgtcaagtaaaaccaggactgacaatagcgaatgcatctcttctcattgtggcactacgtccccctcctatacaaacactgcattcgatgtcttactgaaagcaatggagccagaactgagcaccttgtcacaaaagggctcaccttgtgcaattaagacagaaaaactgaggccaaataaaactgcacgttcccctcccaaattaaaaaacagttcaatggatgccccaaatcagacttcacaggaattggttgctgaatcacagtcttcttgtacctcatacacagtccatatgtctgctgctcagaagaatgagcaaggggcaatgcagtcagcttctcatttgtatcatcaacatgaacactttgttcccaaatccaaccaacataatcaacagcttccggggtgttcaggtttcacaggatcactgacaaatctgcaaaatcaagagaatgccaaacttgaacaggtttataatatagcagtgacatcatctgtaggcctaacttcaccttccagtagatctcaggttactcctcaaaaccagcaaatggattctgcttcacctttgtcaataagtccggctaattctacacagtcgccccccatgccaatctataattcaactcatgttgcctctgttgttaatcaaagcgtagagcaaatgtgcaatcttcttctgaaagatcagaagccaaaaaaacaaggaaaatatatttgtgagtattgcaatagagcatgtgcaaagcctagtgtgcttttaaagcatatccgctcccacactggagagcgaccctatccctgtgtgacttgtggattttcatttaagactaaaagtaatctgtataagcacaagaaatcccacgcacatactatcaaactgggtcttgtcttgcaaccagatgctggtggcttgttcttgtcccacgagtcccccaaagcacttagtattcattcagacgtagaagacagtggggagagcgaggaggaaggcgccactgatgagagacagcatgacctgggcgccatggagctgcagaatgtgcacataataaagaggatgtcaaatgctgaaactttactaaaatcaagcttcactccaagcagtccagaaaatgtgataggtgactttttgctacaggacagatctgcagaatcacaagctgtgacagagttaccgaaagttgtggtccaccatgtcactgtgtcccccttaagaactgacagtccaaaggccatggatcccaagcctgaactttctagtgcacaaaagcagaaggaccttcaggtgacaaacgtacagccactttcagccaacatgtcccagggtggagtctccaggttggagactaatgagaattcccaccagaaaggcgacatgaatccactggaaggaaagcaagactctcacgtaggaacggtacacgcccagctacaaaggcagcaggctaccgattactcccaagagcagcaaggaaagctcctgagtcctcgaagtttaggaagtacggattctggttacttttcacgttctgaaagtgccgatcaaacagtgagtccaccaactccctttgccagaaggttcccagcacagaacaagactctggaaggagtaacggaccctctgcagctcttgtcaccacgtcaacaccctctgctttgccacagggaaaaggcattgcttttaccaggtcagatgcgcccacctttggccacaaaaacacttgaggagcggatatcgaagcttatctcagacaatgaagctttggtagatgacaagcaactggatagtgtgaagccgcggagaacctcactgtcaagacgaggaagcattgattcccccaaatcatacatatttaaagattctttccagtttgatttaaaaccagtgggacggagaacaagttcaagctctgatataccgaagtcacctttcacccctactgaaaaatcaaagcaagtgtttcttctgtctgtaccttcacttgactgtttacctatcacaagaagtaattccatgccgaccacaggttattcagcagtacctgcaaatataatacctcctcctcatccactaagaggaagtcagtcatttgatgacaaaattggcgctttctatgatgatgtctttgtatcgggacctaacgctcctgtgccccagagtgggcatccccgtacacttgtgagacaagcagccatagaagactcttcagcaaatgaaagtcatgttcttggtactggacagtccctggatgagagccaccaaggatgccatgctgctggtgaagccatgtcagtgaggagcaaggcactggcacaaggcccacatatagaaaaaaagaagtctcatcaagggcgagggacaatgtttgagtgtgaaacttgtagaaacaggtataggaaactggaaaattttgaaaatcataagaaattttactgttctgagttacatggaccaaaaacaaaggtagccatgagagaacctgagcacagccctgtgcccggcggtctgcancctcagattctacactacagagtcgctgggtcctccggcatctgggaacagacgccccagataagaaaaaggaggaaaatgaaaagtgttggggatgatgaagaacttcagcaaaatgaaagtggaacatctccaaaaagttctgaaggccttcagtttcagaatgctctgggctgtaatcccagtttgcctaaacatantgttaccataagaagtgaccagcagcataaaaatatacagttgcaaaactcccatattcaccttgttgccaggggccctgagcagaccatggatcccaagctgtcgaccatcatggaacaacagataagttcagcagcccaggacaagatagaactgcagagacacggaactggaatctctgtcatccagcacaccaactccctgagcaggcccaactcatttgacaagcctgagccttttgaaagagcctccccagtttctttccaggagctgaatagaacggggaantccgggtctctaaaagtgataggaatctcccaagaggaaagtcacccttctcgggacgggtctcatcctcaccagcttgcactatcagacgctctcagaggagaacttcaggaaagctccagaaagagtccaagtgaacgacatgtgttaggacagccctcaagacttntccggcagcacaacatccaagttccagagattttggtcacagaagaaccagatcgagacctggaagctcaatgccatgatcaagaaaagtcagagaagttcagttggccccagcgtagtgaaaccttgtcaaaattgccaacagagaaactgccacccaaaaagaaaaggctccgtctggctgagatagaacattcctcaacagaatcgagctttgattccactctctccaggagtctaagtagggagagcagtttatctcacacttcaagtttctcagcctctttagacatagaggacgtttctaaaacggaggcttcccccaaaatcgattttctaaataaagccgagtttcttatgattccagctggcttgaatactctgaatgttcctggatgtcaccgggaaatgaggcgtactgcatcagaacagattaattgcacgcaaacgtcaatggaggtctctgatctcagaagcaaatcattcgattgtggaagcatcaccccaccccagacaacaccacttactgaattgcagcctccatcttcaccttctcgagtgggagtgactgggcatgtgcctctcttagaaagaaggagaggcccactggtacggcaaatatctttnnncatagccccagatagtcatctgtctcctgtacacccaacatctttccaaaatactgctcttcccagtgtgaatgcagtgccatatcaggggcctcagctcactagtacatctttagctgagttttctgcaaatactttgcactctcagactcaggttaaggatctgcaggcagaaacatcaaactccagctctaccaacgtttttcctgttcaacagctctgtgatatcaatttgttaaatcaaatccatgcaccgcctagccaccagagcacacagctatctctgcaagtgtctacgcagggtagcaagccagataaaaattctgttttatctgggtcttctaaaagtgaggattgctttgctcccaaataccaattgcattgtcaggttttcacttcaggcccatcttgctcttctaatcctgtgcattctttgccaaatcaagttatttcagatccagttggaacagatcattgtgtgacatcagcaacattaccaaccaaattaattgacagcatgtctaattcgcatcctctgctaccaccagagctcaggccccttggaagtcaggtgcagaaggtgccatcatcattcatgctgcccatacgcctgcagagtagtgttcctgcttactgttttgctacactcacatccctgccacaaatactagtgacccaagatctgcccaatcagccaatttgccagactaatcatagtgtagtgccaatcagtgaagaacaaaattctgtgccaacattacaaaaaggtcatcagaatgctttgccaaacccagagaaggaatttctatgtgaaaatgttttttcagagatgagccaaaattcttctctatcagaatccttgcccataactcagaaaatatctgttggtcgactttcccctcaacaagaatcttcagcttcgagtaaaaggatgctttccccagcaaatagtttagacattgccatggaaaagcaccagaagcgggccaaagatgaaaatggagctgtttgtgcaacagacgtgagacctttagaggctttgagttcgagagttaatgaagctagtaaacagaagaagcctattttagtgagacaggtttgtactacagagcccctggacggtgtgatgttggaaaaggatgttttttctcaacctgaaattagtaatgaggctgttaatttgacaaatgttttaccagctgataattcatcaacaggatgctctaaatttgtcgttatagaacctataagtgaattgcaggaatttgaaaacatcaagtcatccacatcattaactcttacagttcgaagttcacctgctccttcagaaaatactcatatttctcctttgaaatgtacagacaataaccaagaaaggaagtctccaggggttaaaaatcaaggtgacaaagtgaacatccaagagcaaagtcaacagccagtcacttctctttcattgtttaacatcaaggacacccagcagctggctttccctagcctgaaaactacaaccaactttacatggtgttatctcttaaggcagaagtcgttgcatttgcctcagaaggaccagaaaacttcagcctatactgattggacagtaagcgccagtaatccaaatccactcggtttgcccacaaaagttgcacttgctctccttaattcaaaacagaacactggaaaatcactatactgtcaagcaataactacccattccaagtcagacttattggtctattcaagcaagtggaaaagcagcttaagcaagagagcattaggtaatcaaaagtccacagtagttgaattcagcaataaagatgcctctgaaattaacagtgagcaagataaagaaaattccttaatcaaaagtgaaccaagaagaattaaaatatttgatggaggatataagtcaaatgaagagtatgtatatgtccgaggcaggggaagaggaaaatacatttgtgaagaatgtggaatacgttgtaagaaacctagcatgttaaagaaacacatacgaacccatacagatgtccgcccctaccactgcacttactgtaacttctcctttaagactaaaggaaatctgacaaaacacatgaagtccaaggcacatagcaagaaatgtgtggatttaggcgtctcagtaggtttaatagatgaacaggatacagaagaatcagatgaaaaacagagattcagttatgagcgatctggatatgatcttgaagaatctgatggcccagatgaggatgacaatgaaaatgaagacgatgatgaggacagccaggctgaatcagtcctgtcagccacaccctcagtcacagctagcccgcagcaccttccatctagaagtagccttcaggaccctgtgagtactgacgaggatgtcaggatcaccgattgcttttctggggtacacacggacccaatggacgttctgcccagggcgctgctcaccagaatgactgtcctgagcacagcacagtctgactacaataggaagacactctctccggggaaggccaggcagcgtgctgcgagagatgaaaacgacacaattccgtctgtagacacttccaggtccccgtgtcatcagatgtctgtggactaccctgagtcagaagaaattctgagaagttctatggcaggaaaagctgttgctataacacagagcccatcatctgtaagacttcctcctgctgcagctgagcacagcccccagacagcagcggggatgccttctgtggcctcaccacatcctgaccctcaagaacagaagcagcaaataactctacagccgactccaggcttgccttctccccacactcatttgtttagccaccttcctttgcattcccagcagcaatcgaggacaccttataatatggttccagttggggggatccatgtggtacctgctggcctcacatactccacgtttgtgccccttcaggctggaccagtgcagctcacgatccctgctgtcagtgtcgttcacagaactttgggtactcataggaatacggtcacagaagtgtctggcactacaaaccctgctggagtggctgaattaagcagtgttgtgccatgtattcctatcggccaaatccgcgtgccaggccttcagaacctaagtaccccaggcttgcagtcactcccctcgttaagcatggaaaccgtcaatattgtaggcctagccaatacaaatatggccccacaagtccatccaccaggactggctctgaatgctgtcggactgcaggttctgactgcaaacccttcatcacaaagcagccccgcccctcaggcacacattccaggtctccagatcttgaacatagcattgcccaccttaatcccctcagtcagtcaagtagccgttgatgcacagggagctccagaaatgccagcttcccaaagcaaagcatgcgagacacaacccaagcagacttctgtagccagcgcaaaccaggtcagcaggaccgagtctcctcaggggttacctacagtccagcgggaaaatgcaaaaaaagttctgaatccacctgcccctgcaggtgaccatgcaaggcttgatggcctgagtaaaatggacacagagaaggctgcctcggcaaatcacgtgaagcccaagcctgaactcacttccatacagggccaaccagcgtccacgtcacaacctctgctgaaggcacattctgaagtttttacaaagccctcaggccagcagactctctctccagacagacaggttcccaggcccacagcactaccgcggaggcagcccactgtgcacttcagcgacgtgagcagcgatgatgacgaggacaggcttgtgatagcaacctgatggattttattttttatttgctttttttttatataacacttaaaggtttctttgaaaaccctcctttccttaaagcacatttttctgacataaactcatgactaatctttgtgcaatcatgaacttttgaccaataattgttgttttgtgtcagctccagccatttttgtacatgttgtatagacaattgtgccttttaggagctttatgtttagaaactgtacagattgttgaatatctatatacataaaaatatattatatatgtatatgaaaaccaggtagttatttgtgtttagtaaggaaaacctgtcaaataaatcaaatgattaaattatatgttccactgttgaatataaattttatggctatggggcagagtttctgtgtataaattagtatgtaaactccatatttattgtattcatattagtctttgaaaatgggtctgtcctccttgtgtaagacagtaactttacacttcagacagattttctgtgttatgaaatgtttcagtaaaatattgtttactgactttaaaaatgct

SEQ ID NO: 315992 - DNA, 9199 bp, Homo sapiens
  misc_feature (3517)..(3517): n is a, c, g, or t
  misc_feature (3717)..(3717): n is a, c, g, or t
  misc_feature (4006)..(4006): n is a, c, g, or t
  misc_feature (4175)..(4175): n is a, c, g, or t
  misc_feature (4801)..(4803): n is a, c, g, or t
cgctgctgggcggcggcagggtggcggacggagcgggggaccggggagcggcggccgcgaggaggttatgtttgtgtttggggttgtcaagtgaaggagggatcccaggcgccgccgccgccgccgcgggggtcgcgagatcccgagccgcggccgccgccatcagcagcgcagctccagggccggctgcagcggcagcggctccgccgggcgtcctggcagcagcacatggattaattgatgtatgttgagtttatggagctgccttttggtggcttgctttatctgcagtttttaagaagaaaaagaaggccctgagtcaaagaagatgcctcgaactaaacaaattcatcccagaaatctaagaggaaacgtggtgggtgccgttttgacaccgacctatcctttgtgaggttgaagaattttggaagagcatgagagcagcacttggtgttcagaagaaaggcttagcatgttgtcctgggttccgtggagaagggtcactggactgcacggggtggctcttccgcatggtcttgacaaaattgaagaagcacaaaaagaacttaatggggcagaagtttcaaaaaaagaaatcttacaggctggtgttaaaggaacttcggaatcccttaaaggtgtgaaacgcaaaaagatcgtagctgagaatcacctgaaaaaaataccaaaatccccactgagaaatcctcttcaggcaaaacataaacaaaatacagaagagtcatctttcgccgttcttcatagtgcttcggagtctcacaagaaacagaattatattcctgtaaaaaatgggaagcagtttaccaaacaaaatggagaaacacctggaataattgctgaagcctcaaaatctgaagaatctgtctccccaaagaagcccttgtttctgcagcaaccatctgaactgcgtagatggagatccgaaggcgctgatcctgccaaattcagtgacctcgatgaacaatgtgactcaagttccttgtcaagtaaaaccaggactgacaatagcgaatgcatctcttctcattgtggcactacgtccccctcctatacaaacactgcattcgatgtcttactgaaagcaatggagccagaactgagcaccttgtcacaaaagggctcaccttgtgcaattaagacagaaaaactgaggccaaataaaactgcacgttcccctcccaaattaaaaaacagttcaatggatgccccaaatcagacttcacaggaattggttgctgaatcacagtcttcttgtacctcatacacagtccatatgtctgctgctcagaagaatgagcaaggggcaatgcagtcagcttctcatttgtatcatcaacatgaacactttgttcccaaatccaaccaacataatcaacagcttccggggtgttcaggtttcacaggatcactgacaaatctgcaaaatcaagagaatgccaaacttgaacaggtttataatatagcagtgacatcatctgtaggcctaacttcaccttccagtagatctcaggttactcctcaaaaccagcaaatggattctgcttcacctttgtcaataagtccggctaattctacacagtcgccccccatgccaatctataattcaactcatgttgcctctgttgttaatcaaagcgtagagcaaatgtgcaatcttcttctgaaagatcagaagccaaaaaaacaaggaaaatatatttgtgagtattgcaatagagcatgtgcaaagcctagtgtgcttttaaagcatatccgctcccacactggagagcgaccctatccctgtgtgacttgtggattttcatttaagactaaaagtaatctgtataagcacaagaaatcccacgcacatactatcaaactgggtcttgtcttgcaaccagatgctggtggcttgttcttgtcccacgagtcccccaaagcacttagtattcattcagacgtagaagacagtggggagagcgaggaggaaggcgccactgatgagagacagcatgacctgggcgccatggagctgcagaatgtgcacataataaagaggatgtcaaatgctgaaactttactaaaatcaagcttcactccaagcagtccagaaaatgtgataggtgactttttgctacaggacagatctgcagaatcacaagctgtgacagagttaccgaaagttgtggtccaccatgtcactgtgtcccccttaagaactgacagtccaaaggccatggatcccaagcctgaactttctagtgcacaaaagcagaaggaccttcaggtgacaaacgtacagccactttcagccaacatgtcccagggtggagtctccaggttggagactaatgagaattcccaccagaaaggcgacatgaatccactggaaggaaagcaagactctcacgtaggaacggtacacgcccagctacaaaggcagcaggctaccgattactcccaagagcagcaaggaaagctcctgagtcctcgaagtttaggaagtacggattctggttacttttcacgttctgaaagtgccgatcaaacagtgagtccaccaactccctttgccagaaggttcccagcacagaacaagactctggaaggagtaacggaccctctgcagctcttgtcaccacgtcaacaccctctgctttgccacagggaaaaggcattgcttttaccaggtcagatgcgcccacctttggccacaaaaacacttgaggagcggatatcgaagcttatctcagacaatgaagctttggtagatgacaagcaactggatagtgtgaagccgcggagaacctcactgtcaagacgaggaagcattgattcccccaaatcatacatatttaaagattctttccagtttgatttaaaaccagtgggacggagaacaagttcaagctctgatataccgaagtcacctttcacccctactgaaaaatcaaagcaagtgtttcttctgtctgtaccttcacttgactgtttacctatcacaagaagtaattccatgccgaccacaggttattcagcagtacctgcaaatataatacctcctcctcatccactaagaggaagtcagtcatttgatgacaaaattggcgctttctatgatgatgtctttgtatcgggacctaacgctcctgtgccccagagtgggcatccccgtacacttgtgagacaagcagccatagaagactcttcagcaaatgaaagtcatgttcttggtactggacagtccctggatgagagccaccaaggatgccatgctgctggtgaagccatgtcagtgaggagcaaggcactggcacaaggcccacatatagaaaaaaagaagtctcatcaagggcgagggacaatgtttgagtgtgaaacttgtagaaacaggtataggaaactggaaaattttgaaaatcataagaaattttactgttctgagttacatggaccaaaaacaaaggtagccatgagagaacctgagcacagccctgtgcccggcggtctgcancctcagattctacactacagagtcgctgggtcctccggcatctgggaacagacgccccagataagaaaaaggaggaaaatgaaaagtgttggggatgatgaagaacttcagcaaaatgaaagtggaacatctccaaaaagttctgaaggccttcagtttcagaatgctctgggctgtaatcccagtttgcctaaacatantgttaccataagaagtgaccagcagcataaaaatatacagttgcaaaactcccatattcaccttgttgccaggggccctgagcagaccatggatcccaagctgtcgaccatcatggaacaacagataagttcagcagcccaggacaagatagaactgcagagacacggaactggaatctctgtcatccagcacaccaactccctgagcaggcccaactcatttgacaagcctgagccttttgaaagagcctccccagtttctttccaggagctgaatagaacggggaantccgggtctctaaaagtgataggaatctcccaagaggaaagtcacccttctcgggacgggtctcatcctcaccagcttgcactatcagacgctctcagaggagaacttcaggaaagctccagaaagagtccaagtgaacgacatgtgttaggacagccctcaagacttntccggcagcacaacatccaagttccagagattttggtcacagaagaaccagatcgagacctggaagctcaatgccatgatcaagaaaagtcagagaagttcagttggccccagcgtagtgaaaccttgtcaaaattgccaacagagaaactgccacccaaaaagaaaaggctccgtctggctgagatagaacattcctcaacagaatcgagctttgattccactctctccaggagtctaagtagggagagcagtttatctcacacttcaagtttctcagcctctttagacatagaggacgtttctaaaacggaggcttcccccaaaatcgattttctaaataaagccgagtttcttatgattccagctggcttgaatactctgaatgttcctggatgtcaccgggaaatgaggcgtactgcatcagaacagattaattgcacgcaaacgtcaatggaggtctctgatctcagaagcaaatcattcgattgtggaagcatcaccccaccccagacaacaccacttactgaattgcagcctccatcttcaccttctcgagtgggagtgactgggcatgtgcctctcttagaaagaaggagaggcccactggtacggcaaatatctttnnncatagccccagatagtcatctgtctcctgtacacccaacatctttccaaaatactgctcttcccagtgtgaatgcagtgccatatcaggggcctcagctcactagtacatctttagctgagttttctgcaaatactttgcactctcagactcaggttaaggatctgcaggcagaaacatcaaactccagctctaccaacgtttttcctgttcaacagctctgtgatatcaatttgttaaatcaaatccatgcaccgcctagccaccagagcacacagctatctctgcaagtgtctacgcagggtagcaagccagataaaaattctgttttatctgggtcttctaaaagtgaggattgctttgctcccaaataccaattgcattgtcaggttttcacttcaggcccatcttgctcttctaatcctgtgcattctttgccaaatcaagttatttcagatccagttggaacagatcattgtgtgacatcagcaacattaccaaccaaattaattgacagcatgtctaattcgcatcctctgctaccaccagagctcaggccccttggaagtcaggtgcagaaggtgccatcatcattcatgctgcccatacgcctgcagagtagtgttcctgcttactgttttgctacactcacatccctgccacaaatactagtgacccaagatctgcccaatcagccaatttgccagactaatcatagtgtagtgccaatcagtgaagaacaaaattctgtgccaacattacaaaaaggtcatcagaatgctttgccaaacccagagaaggaatttctatgtgaaaatgttttttcagagatgagccaaaattcttctctatcagaatccttgcccataactcagaaaatatctgttggtcgactttcccctcaacaagaatcttcagcttcgagtaaaaggatgctttccccagcaaatagtttagacattgccatggaaaagcaccagaagcgggccaaagatgaaaatggagctgtttgtgcaacagacgtgagacctttagaggctttgagttcgagagttaatgaagctagtaaacagaagaagcctattttagtgagacaggtttgtactacagagcccctggacggtgtgatgttggaaaaggatgttttttctcaacctgaaattagtaatgaggctgttaatttgacaaatgttttaccagctgataattcatcaacaggatgctctaaatttgtcgttatagaacctataagtgaattgcaggaatttgaaaacatcaagtcatccacatcattaactcttacagttcgaagttcacctgctccttcagaaaatactcatatttctcctttgaaatgtacagacaataaccaagaaaggaagtctccaggggttaaaaatcaaggtgacaaagtgaacatccaagagcaaagtcaacagccagtcacttctctttcattgtttaacatcaaggacacccagcagctggctttccctagcctgaaaactacaaccaactttacatggtgttatctcttaaggcagaagtcgttgcatttgcctcagaaggaccagaaaacttcagcctatactgattggacagtaagcgccagtaatccaaatccactcggtttgcccacaaaagttgcacttgctctccttaattcaaaacagaacactggaaaatcactatactgtcaagcaataactacccattccaagtcagacttattggtctattcaagcaagtggaaaagcagcttaagcaagagagcattaggtaatcaaaagtccacagtagttgaattcagcaataaagatgcctctgaaattaacagtgagcaagataaagaaaattccttaatcaaaagtgaaccaagaagaattaaaatatttgatggaggatataagtcaaatgaagagtatgtatatgtccgaggcaggggaagaggaaaatacatttgtgaagaatgtggaatacgttgtaagaaacctagcatgttaaagaaacacatacgaacccatacagatgtccgcccctaccactgcacttactgtaacttctcctttaagactaaaggaaatctgacaaaacacatgaagtccaaggcacatagcaagaaatgtgtggatttaggcgtctcagtaggtttaatagatgaacaggatacagaagaatcagatgaaaaacagagattcagttatgagcgatctggatatgatcttgaagaatctgatggcccagatgaggatgacaatgaaaatgaagacgatgatgaggacagccaggctgaatcagtcctgtcagccacaccctcagtcacagctagcccgcagcaccttccatctagaagtagccttcaggaccctgtgagtactgacgaggatgtcaggatcaccgattgcttttctggggtacacacggacccaatggacgttctgcccagggcgctgctcaccagaatgactgtcctgagcacagcacagtctgactacaataggaagacactctctccggggaaggccaggcagcgtgctgcgagagatgaaaacgacacaattccgtctgtagacacttccaggtccccgtgtcatcagatgtctgtggactaccctgagtcagaagaaattctgagaagttctatggcaggaaaagctgttgctataacacagagcccatcatctgtaagacttcctcctgctgcagctgagcacagcccccagacagcagcggggatgccttctgtggcctcaccacatcctgaccctcaagaacagaagcagcaaataactctacagccgactccaggcttgccttctccccacactcatttgtttagccaccttcctttgcattcccagcagcaatcgaggacaccttataatatggttccagttggggggatccatgtggtacctgctggcctcacatactccacgtttgtgccccttcaggctggaccagtgcagctcacgatccctgctgtcagtgtcgttcacagaactttgggtactcataggaatacggtcacagaagtgtctggcactacaaaccctgctggagtggctgaattaagcagtgttgtgccatgtattcctatcggccaaatccgcgtgccaggccttcagaacctaagtaccccaggcttgcagtcactcccctcgttaagcatggaaaccgtcaatattgtaggcctagccaatacaaatatggccccacaagtccatccaccaggactggctctgaatgctgtcggactgcaggttctgactgcaaacccttcatcacaaagcagccccgcccctcaggcacacattccaggtctccagatcttgaacatagcattgcccaccttaatcccctcagtcagtcaagtagccgttgatgcacagggagctccagaaatgccagcttcccaaagcaaagcatgcgagacacaacccaagcagacttctgtagccagcgcaaaccaggtcagcaggaccgagtctcctcaggggttacctacagtccagcgggaaaatgcaaaaaaagttctgaatccacctgcccctgcaggtgaccatgcaaggcttgatggcctgagtaaaatggacacagagaaggctgcctcggcaaatcacgtgaagcccaagcctgaactcacttccatacagggccaaccagcgtccacgtcacaacctctgctgaaggcacattctgaagtttttacaaagccctcaggccagcagactctctctccagacagacaggttcccaggcccacagcactaccgcggaggcagcccactgtgcacttcagcgacgtgagcagcgatgatgacgaggacaggcttgtgatagcaacctgatggattttattttttatttgctttttttttatataacacttaaaggtttctttgaaaaccctcctttccttaaagcacatttttctgacataaactcatgactaatctttgtgcaatcatgaacttttgaccaataattgttgttttgtgtcagctccagccatttttgtacatgttgtatagacaattgtgccttttaggagctttatgtttagaaactgtacagattgttgaatatctatatacataaaaatatattatatatgtatatgaaaaccaggtagttatttgtgtttagtaaggaaaacctgtcaaataaatcaaatgattaaattatatgttccactgttgaatataaattttatggctatggggcagagtttctgtgtataaattagtatgtaaactccatatttattgtattcatattagtctttgaaaatgggtctgtcctccttgtgtaagacagtaactttacacttcagacagattttctgtgttatgaaatgtttcagtaaaatattgtttactgactttaaaaatgct

SEQ ID NO: 315993 - DNA, 6891 bp, Homo sapiens
  misc_feature (1209)..(1209): n is a, c, g, or t
  misc_feature (1409)..(1409): n is a, c, g, or t
  misc_feature (1698)..(1698): n is a, c, g, or t
  misc_feature (1867)..(1867): n is a, c, g, or t
  misc_feature (2493)..(2495): n is a, c, g, or t
cgggggacgaaagggaaaaaagtgagaccagaaagcctgaagaaccagtgcaccccagagccaagtggcgacatgaatccactggaaggaaagcaagactctcacgtaggaacggtacacgcccagctacaaaggcagcaggctaccgattactcccaagagcagcaaggaaagctcctgagtcctcgaagtttaggaagtacggattctggttacttttcacgttctgaaagtgccgatcaaacagtgagtccaccaactccctttgccagaaggttcccagcacagaacaagactctggaaggagtaacggaccctctgcagctcttgtcaccacgtcaacaccctctgctttgccacagggaaaaggcattgcttttaccaggtcagatgcgcccacctttggccacaaaaacacttgaggagcggatatcgaagcttatctcagacaatgaagctttggtagatgacaagcaactggatagtgtgaagccgcggagaacctcactgtcaagacgaggaagcattgattcccccaaatcatacatatttaaagattctttccagtttgatttaaaaccagtgggacggagaacaagttcaagctctgatataccgaagtcacctttcacccctactgaaaaatcaaagcaagtgtttcttctgtctgtaccttcacttgactgtttacctatcacaagaagtaattccatgccgaccacaggttattcagcagtacctgcaaatataatacctcctcctcatccactaagaggaagtcagtcatttgatgacaaaattggcgctttctatgatgatgtctttgtatcgggacctaacgctcctgtgccccagagtgggcatccccgtacacttgtgagacaagcagccatagaagactcttcagcaaatgaaagtcatgttcttggtactggacagtccctggatgagagccaccaaggatgccatgctgctggtgaagccatgtcagtgaggagcaaggcactggcacaaggcccacatatagaaaaaaagaagtctcatcaagggcgagggacaatgtttgagtgtgaaacttgtagaaacaggtataggaaactggaaaattttgaaaatcataagaaattttactgttctgagttacatggaccaaaaacaaaggtagccatgagagaacctgagcacagccctgtgcccggcggtctgcancctcagattctacactacagagtcgctgggtcctccggcatctgggaacagacgccccagataagaaaaaggaggaaaatgaaaagtgttggggatgatgaagaacttcagcaaaatgaaagtggaacatctccaaaaagttctgaaggccttcagtttcagaatgctctgggctgtaatcccagtttgcctaaacatantgttaccataagaagtgaccagcagcataaaaatatacagttgcaaaactcccatattcaccttgttgccaggggccctgagcagaccatggatcccaagctgtcgaccatcatggaacaacagataagttcagcagcccaggacaagatagaactgcagagacacggaactggaatctctgtcatccagcacaccaactccctgagcaggcccaactcatttgacaagcctgagccttttgaaagagcctccccagtttctttccaggagctgaatagaacggggaantccgggtctctaaaagtgataggaatctcccaagaggaaagtcacccttctcgggacgggtctcatcctcaccagcttgcactatcagacgctctcagaggagaacttcaggaaagctccagaaagagtccaagtgaacgacatgtgttaggacagccctcaagacttntccggcagcacaacatccaagttccagagattttggtcacagaagaaccagatcgagacctggaagctcaatgccatgatcaagaaaagtcagagaagttcagttggccccagcgtagtgaaaccttgtcaaaattgccaacagagaaactgccacccaaaaagaaaaggctccgtctggctgagatagaacattcctcaacagaatcgagctttgattccactctctccaggagtctaagtagggagagcagtttatctcacacttcaagtttctcagcctctttagacatagaggacgtttctaaaacggaggcttcccccaaaatcgattttctaaataaagccgagtttcttatgattccagctggcttgaatactctgaatgttcctggatgtcaccgggaaatgaggcgtactgcatcagaacagattaattgcacgcaaacgtcaatggaggtctctgatctcagaagcaaatcattcgattgtggaagcatcaccccaccccagacaacaccacttactgaattgcagcctccatcttcaccttctcgagtgggagtgactgggcatgtgcctctcttagaaagaaggagaggcccactggtacggcaaatatctttnnncatagccccagatagtcatctgtctcctgtacacccaacatctttccaaaatactgctcttcccagtgtgaatgcagtgccatatcaggggcctcagctcactagtacatctttagctgagttttctgcaaatactttgcactctcagactcaggttaaggatctgcaggcagaaacatcaaactccagctctaccaacgtttttcctgttcaacagctctgtgatatcaatttgttaaatcaaatccatgcaccgcctagccaccagagcacacagctatctctgcaagtgtctacgcagggtagcaagccagataaaaattctgttttatctgggtcttctaaaagtgaggattgctttgctcccaaataccaattgcattgtcaggttttcacttcaggcccatcttgctcttctaatcctgtgcattctttgccaaatcaagttatttcagatccagttggaacagatcattgtgtgacatcagcaacattaccaaccaaattaattgacagcatgtctaattcgcatcctctgctaccaccagagctcaggccccttggaagtcaggtgcagaaggtgccatcatcattcatgctgcccatacgcctgcagagtagtgttcctgcttactgttttgctacactcacatccctgccacaaatactagtgacccaagatctgcccaatcagccaatttgccagactaatcatagtgtagtgccaatcagtgaagaacaaaattctgtgccaacattacaaaaaggtcatcagaatgctttgccaaacccagagaaggaatttctatgtgaaaatgttttttcagagatgagccaaaattcttctctatcagaatccttgcccataactcagaaaatatctgttggtcgactttcccctcaacaagaatcttcagcttcgagtaaaaggatgctttccccagcaaatagtttagacattgccatggaaaagcaccagaagcgggccaaagatgaaaatggagctgtttgtgcaacagacgtgagacctttagaggctttgagttcgagagttaatgaagctagtaaacagaagaagcctattttagtgagacaggtttgtactacagagcccctggacggtgtgatgttggaaaaggatgttttttctcaacctgaaattagtaatgaggctgttaatttgacaaatgttttaccagctgataattcatcaacaggatgctctaaatttgtcgttatagaacctataagtgaattgcaggaatttgaaaacatcaagtcatccacatcattaactcttacagttcgaagttcacctgctccttcagaaaatactcatatttctcctttgaaatgtacagacaataaccaagaaaggaagtctccaggggttaaaaatcaaggtgacaaagtgaacatccaagagcaaagtcaacagccagtcacttctctttcattgtttaacatcaaggacacccagcagctggctttccctagcctgaaaactacaaccaactttacatggtgttatctcttaaggcagaagtcgttgcatttgcctcagaaggaccagaaaacttcagcctatactgattggacagtaagcgccagtaatccaaatccactcggtttgcccacaaaagttgcacttgctctccttaattcaaaacagaacactggaaaatcactatactgtcaagcaataactacccattccaagtcagacttattggtctattcaagcaagtggaaaagcagcttaagcaagagagcattaggtaatcaaaagtccacagtagttgaattcagcaataaagatgcctctgaaattaacagtgagcaagataaagaaaattccttaatcaaaagtgaaccaagaagaattaaaatatttgatggaggatataagtcaaatgaagagtatgtatatgtccgaggcaggggaagaggaaaatacatttgtgaagaatgtggaatacgttgtaagaaacctagcatgttaaagaaacacatacgaacccatacagatgtccgcccctaccactgcacttactgtaacttctcctttaagactaaaggaaatctgacaaaacacatgaagtccaaggcacatagcaagaaatgtgtggatttaggcgtctcagtaggtttaatagatgaacaggatacagaagaatcagatgaaaaacagagattcagttatgagcgatctggatatgatcttgaagaatctgatggcccagatgaggatgacaatgaaaatgaagacgatgatgaggacagccaggctgaatcagtcctgtcagccacaccctcagtcacagctagcccgcagcaccttccatctagaagtagccttcaggaccctgtgagtactgacgaggatgtcaggatcaccgattgcttttctggggtacacacggacccaatggacgttctgcccagggcgctgctcaccagaatgactgtcctgagcacagcacagtctgactacaataggaagacactctctccggggaaggccaggcagcgtgctgcgagagatgaaaacgacacaattccgtctgtagacacttccaggtccccgtgtcatcagatgtctgtggactaccctgagtcagaagaaattctgagaagttctatggcaggaaaagctgttgctataacacagagcccatcatctgtaagacttcctcctgctgcagctgagcacagcccccagacagcagcggggatgccttctgtggcctcaccacatcctgaccctcaagaacagaagcagcaaataactctacagccgactccaggcttgccttctccccacactcatttgtttagccaccttcctttgcattcccagcagcaatcgaggacaccttataatatggttccagttggggggatccatgtggtacctgctggcctcacatactccacgtttgtgccccttcaggctggaccagtgcagctcacgatccctgctgtcagtgtcgttcacagaactttgggtactcataggaatacggtcacagaagtgtctggcactacaaaccctgctggagtggctgaattaagcagtgttgtgccatgtattcctatcggccaaatccgcgtgccaggccttcagaacctaagtaccccaggcttgcagtcactcccctcgttaagcatggaaaccgtcaatattgtaggcctagccaatacaaatatggccccacaagtccatccaccaggactggctctgaatgctgtcggactgcaggttctgactgcaaacccttcatcacaaagcagccccgcccctcaggcacacattccaggtctccagatcttgaacatagcattgcccaccttaatcccctcagtcagtcaagtagccgttgatgcacagggagctccagaaatgccagcttcccaaagcaaagcatgcgagacacaacccaagcagacttctgtagccagcgcaaaccaggtcagcaggaccgagtctcctcaggggttacctacagtccagcgggaaaatgcaaaaaaagttctgaatccacctgcccctgcaggtgaccatgcaaggcttgatggcctgagtaaaatggacacagagaaggctgcctcggcaaatcacgtgaagcccaagcctgaactcacttccatacagggccaaccagcgtccacgtcacaacctctgctgaaggcacattctgaagtttttacaaagccctcaggccagcagactctctctccagacagacaggttcccaggcccacagcactaccgcggaggcagcccactgtgcacttcagcgacgtgagcagcgatgatgacgaggacaggcttgtgatagcaacctgatggattttattttttatttgctttttttttatataacacttaaaggtttctttgaaaaccctcctttccttaaagcacatttttctgacataaactcatgactaatctttgtgcaatcatgaacttttgaccaataattgttgttttgtgtcagctccagccatttttgtacatgttgtatagacaattgtgccttttaggagctttatgtttagaaactgtacagattgttgaatatctatatacataaaaatatattatatatgtatatgaaaaccaggtagttatttgtgtttagtaaggaaaacctgtcaaataaatcaaatgattaaattatatgttccactgttgaatataaattttatggctatggggcagagtttctgtgtataaattagtatgtaaactccatatttattgtattcatattagtctttgaaaatgggtctgtcctccttgtgtaagacagtaactttacacttcagacagattttctgtgttatgaaatgtttcagtaaaatattgtttactgactttaaaaatgct

SEQ ID NO: 315994 - DNA, 2956 bp, Homo sapiens
cgctgctgggcggcggcagggtggcggacggagcgggggaccggggagcggcggccgcgaggaggttatgtttgtgtttggggttgtcaagtgaaggagggatcccaggcgccgccgccgccgccgcgggggtcgcgagatcccgagccgcggccgccgccatcagcagcgcagctccagggccggctgcagcggcagcggctccgccgggcgtcctggcagcagcacatggattaattgatgtatgttgagtttatggagctgccttttggtggcttgctttatctgcagtttttaagaagaaaaagaaggccctgagtcaaagaagatgcctcgaactaaacaaattcatcccagaaatctaagaggaaacgtggtgggtgccgttttgacaccgacctatcctttgtgaggttgaagaattttggaagagcatgagagcagcacttggtgttcagaagaaaggcttagcatgttgtcctgggttccgtggagaagggtcactggactgcacggggtggctcttccgcatggtcttgacaaaattgaagaagcacaaaaagaacttaatggggcagaagtttcaaaaaaagaaatcttacaggctggtgttaaaggaacttcggaatcccttaaaggaaatctgacaaaacacatgaagtccaaggcacatagcaagaaatgtgtggatttaggcgtctcagtaggtttaatagatgaacaggatacagaagaatcagatgaaaaacagagattcagttatgagcgatctggatatgatcttgaagaatctgatggcccagatgaggatgacaatgaaaatgaagacgatgatgaggacagccaggctgaatcagtcctgtcagccacaccctcagtcacagctagcccgcagcaccttccatctagaagtagccttcaggaccctgtgagtactgacgaggatgtcaggatcaccgattgcttttctggggtacacacggacccaatggacgttctgcccagggcgctgctcaccagaatgactgtcctgagcacagcacagtctgactacaataggaagacactctctccggggaaggccaggcagcgtgctgcgagagatgaaaacgacacaattccgtctgtagacacttccaggtccccgtgtcatcagatgtctgtggactaccctgagtcagaagaaattctgagaagttctatggcaggaaaagctgttgctataacacagagcccatcatctgtaagacttcctcctgctgcagctgagcacagcccccagacagcagcggggatgccttctgtggcctcaccacatcctgaccctcaagaacagaagcagcaaataactctacagccgactccaggcttgccttctccccacactcatttgtttagccaccttcctttgcattcccagcagcaatcgaggacaccttataatatggttccagttggggggatccatgtggtacctgctggcctcacatactccacgtttgtgccccttcaggctggaccagtgcagctcacgatccctgctgtcagtgtcgttcacagaactttgggtactcataggaatacggtcacagaagtgtctggcactacaaaccctgctggagtggctgaattaagcagtgttgtgccatgtattcctatcggccaaatccgcgtgccaggccttcagaacctaagtaccccaggcttgcagtcactcccctcgttaagcatggaaaccgtcaatattgtaggcctagccaatacaaatatggccccacaagtccatccaccaggactggctctgaatgctgtcggactgcaggttctgactgcaaacccttcatcacaaagcagccccgcccctcaggcacacattccaggtctccagatcttgaacatagcattgcccaccttaatcccctcagtcagtcaagtagccgttgatgcacagggagctccagaaatgccagcttcccaaagcaaagcatgcgagacacaacccaagcagacttctgtagccagcgcaaaccaggtcagcaggaccgagtctcctcaggggttacctacagtccagcgggaaaatgcaaaaaaagttctgaatccacctgcccctgcaggtgaccatgcaaggcttgatggcctgagtaaaatggacacagagaaggctgcctcggcaaatcacgtgaagcccaagcctgaactcacttccatacagggccaaccagcgtccacgtcacaacctctgctgaaggcacattctgaagtttttacaaagccctcaggccagcagactctctctccagacagacaggttcccaggcccacagcactaccgcggaggcagcccactgtgcacttcagcgacgtgagcagcgatgatgacgaggacaggcttgtgatagcaacctgatggattttattttttatttgctttttttttatataacacttaaaggtttctttgaaaaccctcctttccttaaagcacatttttctgacataaactcatgactaatctttgtgcaatcatgaacttttgaccaataattgttgttttgtgtcagctccagccatttttgtacatgttgtatagacaattgtgccttttaggagctttatgtttagaaactgtacagattgttgaatatctatatacataaaaatatattatatatgtatatgaaaaccaggtagttatttgtgtttagtaaggaaaacctgtcaaataaatcaaatgattaaattatatgttccactgttgaatataaattttatggctatggggcagagtttctgtgtataaattagtatgtaaactccatatttattgtattcatattagtctttgaaaatgggtctgtcctccttgtgtaagacagtaactttacacttcagacagattttctgtgttatgaaatgtttcagtaaaatattgtttactgactttaaaaatgct

SEQ ID NO: 315995 - DNA, 8339 bp, Homo sapiens
  misc_feature (3346)..(3346): n is a, c, g, or t
  misc_feature (3546)..(3546): n is a, c, g, or t
  misc_feature (3835)..(3835): n is a, c, g, or t
  misc_feature (4004)..(4004): n is a, c, g, or t
  misc_feature (4630)..(4632): n is a, c, g, or t
cgctgctgggcggcggcagggtggcggacggagcgggggaccggggagcggcggccgcgaggaggttatgtttgtgtttggggttgtcaagtgaaggagggatcccaggcgccgccgccgccgccgcgggggtcgcgagatcccgagccgcggccgccgccatcagcagcgcagctccagggccggctgcagcggcagcggctccgccgggcgtcctggcagcagcacatggattaattgatgtatgttgagtttatggagctgccttttggtggcttgctttatctgcagtttttaagaagaaaaagaaggccctgagtcaaagaagatgcctcgaactaaacaaattcatcccagaaatctaagagacaaaattgaagaagcacaaaaagaacttaatggggcagaagtttcaaaaaaagaaatcttacaggctggtgttaaaggaacttcggaatcccttaaaggtgtgaaacgcaaaaagatcgtagctgagaatcacctgaaaaaaataccaaaatccccactgagaaatcctcttcaggcaaaacataaacaaaatacagaagagtcatctttcgccgttcttcatagtgcttcggagtctcacaagaaacagaattatattcctgtaaaaaatgggaagcagtttaccaaacaaaatggagaaacacctggaataattgctgaagcctcaaaatctgaagaatctgtctccccaaagaagcccttgtttctgcagcaaccatctgaactgcgtagatggagatccgaaggcgctgatcctgccaaattcagtgacctcgatgaacaatgtgactcaagttccttgtcaagtaaaaccaggactgacaatagcgaatgcatctcttctcattgtggcactacgtccccctcctatacaaacactgcattcgatgtcttactgaaagcaatggagccagaactgagcaccttgtcacaaaagggctcaccttgtgcaattaagacagaaaaactgaggccaaataaaactgcacgttcccctcccaaattaaaaaacagttcaatggatgccccaaatcagacttcacaggaattggttgctgaatcacagtcttcttgtacctcatacacagtccatatgtctgctgctcagaagaatgagcaaggggcaatgcagtcagcttctcatttgtatcatcaacatgaacactttgttcccaaatccaaccaacataatcaacagcttccggggtgttcaggtttcacaggatcactgacaaatctgcaaaatcaagagaatgccaaacttgaacaggtttataatatagcagtgacatcatctgtaggcctaacttcaccttccagtagatctcaggttactcctcaaaaccagcaaatggattctgcttcacctttgtcaataagtccggctaattctacacagtcgccccccatgccaatctataattcaactcatgttgcctctgttgttaatcaaagcgtagagcaaatgtgcaatcttcttctgaaagatcagaagccaaaaaaacaaggaaaatatatttgtgagtattgcaatagagcatgtgcaaagcctagtgtgcttttaaagcatatccgctcccacactggagagcgaccctatccctgtgtgacttgtggattttcatttaagactaaaagtaatctgtataagcacaagaaatcccacgcacatactatcaaactgggtcttgtcttgcaaccagatgctggtggcttgttcttgtcccacgagtcccccaaagcacttagtattcattcagacgtagaagacagtggggagagcgaggaggaaggcgccactgatgagagacagcatgacctgggcgccatggagctgcagaatgtgcacataataaagaggatgtcaaatgctgaaactttactaaaatcaagcttcactccaagcagtccagaaaatgtgataggtgactttttgctacaggacagatctgcagaatcacaagctgtgacagagttaccgaaagttgtggtccaccatgtcactgtgtcccccttaagaactgacagtccaaaggccatggatcccaagcctgaactttctagtgcacaaaagcagaaggaccttcaggtgacaaacgtacagccactttcagccaacatgtcccagggtggagtctccaggttggagactaatgagaattcccaccagaaaggcgacatgaatccactggaaggaaagcaagactctcacgtaggaacggtacacgcccagctacaaaggcagcaggctaccgattactcccaagagcagcaaggaaagctcctgagtcctcgaagtttaggaagtacggattctggttacttttcacgttctgaaagtgccgatcaaacagtgagtccaccaactccctttgccagaaggttcccagcacagaacaagactctggaaggagtaacggaccctctgcagctcttgtcaccacgtcaacaccctctgctttgccacagggaaaaggcattgcttttaccaggtcagatgcgcccacctttggccacaaaaacacttgaggagcggatatcgaagcttatctcagacaatgaagctttggtagatgacaagcaactggatagtgtgaagccgcggagaacctcactgtcaagacgaggaagcattgattcccccaaatcatacatatttaaagattctttccagtttgatttaaaaccagtgggacggagaacaagttcaagctctgatataccgaagtcacctttcacccctactgaaaaatcaaagcaagtgtttcttctgtctgtaccttcacttgactgtttacctatcacaagaagtaattccatgccgaccacaggttattcagcagtacctgcaaatataatacctcctcctcatccactaagaggaagtcagtcatttgatgacaaaattggcgctttctatgatgatgtctttgtatcgggacctaacgctcctgtgccccagagtgggcatccccgtacacttgtgagacaagcagccatagaagactcttcagcaaatgaaagtcatgttcttggtactggacagtccctggatgagagccaccaaggatgccatgctgctggtgaagccatgtcagtgaggagcaaggcactggcacaaggcccacatatagaaaaaaagaagtctcatcaagggcgagggacaatgtttgagtgtgaaacttgtagaaacaggtataggaaactggaaaattttgaaaatcataagaaattttactgttctgagttacatggaccaaaaacaaaggtagccatgagagaacctgagcacagccctgtgcccggcggtctgcancctcagattctacactacagagtcgctgggtcctccggcatctgggaacagacgccccagataagaaaaaggaggaaaatgaaaagtgttggggatgatgaagaacttcagcaaaatgaaagtggaacatctccaaaaagttctgaaggccttcagtttcagaatgctctgggctgtaatcccagtttgcctaaacatantgttaccataagaagtgaccagcagcataaaaatatacagttgcaaaactcccatattcaccttgttgccaggggccctgagcagaccatggatcccaagctgtcgaccatcatggaacaacagataagttcagcagcccaggacaagatagaactgcagagacacggaactggaatctctgtcatccagcacaccaactccctgagcaggcccaactcatttgacaagcctgagccttttgaaagagcctccccagtttctttccaggagctgaatagaacggggaantccgggtctctaaaagtgataggaatctcccaagaggaaagtcacccttctcgggacgggtctcatcctcaccagcttgcactatcagacgctctcagaggagaacttcaggaaagctccagaaagagtccaagtgaacgacatgtgttaggacagccctcaagacttntccggcagcacaacatccaagttccagagattttggtcacagaagaaccagatcgagacctggaagctcaatgccatgatcaagaaaagtcagagaagttcagttggccccagcgtagtgaaaccttgtcaaaattgccaacagagaaactgccacccaaaaagaaaaggctccgtctggctgagatagaacattcctcaacagaatcgagctttgattccactctctccaggagtctaagtagggagagcagtttatctcacacttcaagtttctcagcctctttagacatagaggacgtttctaaaacggaggcttcccccaaaatcgattttctaaataaagccgagtttcttatgattccagctggcttgaatactctgaatgttcctggatgtcaccgggaaatgaggcgtactgcatcagaacagattaattgcacgcaaacgtcaatggaggtctctgatctcagaagcaaatcattcgattgtggaagcatcaccccaccccagacaacaccacttactgaattgcagcctccatcttcaccttctcgagtgggagtgactgggcatgtgcctctcttagaaagaaggagaggcccactggtacggcaaatatctttnnncatagccccagatagtcatctgtctcctgtacacccaacatctttccaaaatactgctcttcccagtgtgaatgcagtgccatatcaggggcctcagctcactagtacatctttagctgagttttctgcaaatactttgcactctcagactcaggttaaggatctgcaggcagaaacatcaaactccagctctaccaacgtttttcctgttcaacagctctgtgatatcaatttgttaaatcaaatccatgcaccgcctagccaccagagcacacagctatctctgcaagtgtctacgcagggtagcaagccagataaaaattctgttttatctgggtcttctaaaagtgaggattgctttgctcccaaataccaattgcattgtcaggttttcacttcaggcccatcttgctcttctaatcctgtgcattctttgccaaatcaagttatttcagatccagttggaacagatcattgtgtgacatcagcaacattaccaaccaaattaattgacagcatgtctaattcgcatcctctgctaccaccagagctcaggccccttggaagtcaggtgcagaaggtgccatcatcattcatgctgcccatacgcctgcagagtagtgttcctgcttactgttttgctacactcacatccctgccacaaatactagtgacccaagatctgcccaatcagccaatttgccagactaatcatagtgtagtgccaatcagtgaagaacaaaattctgtgccaacattacaaaaaggtcatcagaatgctttgccaaacccagagaaggaatttctatgtgaaaatgttttttcagagatgagccaaaattcttctctatcagaatccttgcccataactcagaaaatatctgttggtcgactttcccctcaacaagaatcttcagcttcgagtaaaaggatgctttccccagcaaatagtttagacattgccatggaaaagcaccagaagcgggccaaagatgaaaatggagctgtttgtgcaacagacgtgagacctttagaggctttgagttcgagagttaatgaagctagtaaacagaagaagcctattttagtgagacaggtttgtactacagagcccctggacggtgtgatgttggaaaaggatgttttttctcaacctgaaattagtaatgaggctgttaatttgacaaatgttttaccagctgataattcatcaacaggatgctctaaatttgtcgttatagaacctataagtgaattgcaggaatttgaaaacatcaagtcatccacatcattaactcttacagttcgaagttcacctgctccttcagaaaatactcatatttctcctttgaaatgtacagacaataaccaagaaaggaagtctccaggggttaaaaatcaaggtgacaaagtgaacatccaagagcaaagtcaacagccagtcacttctctttcattgtttaacatcaaggacacccagcagctggctttccctagcctgaaaactacaaccaactttacatggtgttatctcttaaggcagaagtcgttgcatttgcctcagaaggaccagaaaacttcagcctatactgattggacagtaagcgccagtaatccaaatccactcggtttgcccacaaaagttgcacttgctctccttaattcaaaacagaacactggaaaatcactatactgtcaagcaataactacccattccaagtcagacttattggtctattcaagcaagtggaaaagcagcttaagcaagagagcattaggtaatcaaaagtccacagtagttgaattcagcaataaagatgcctctgaaattaacagtgagcaagataaagaaaattccttaatcaaaagtgaaccaagaagaattaaaatatttgatggaggatataagtcaaatgaagagtatgtatatgtccgaggcaggggaagaggaaaatacatttgtgaagaatgtggaatacgttgtaagaaacctagcatgttaaagaaacacatacgaacccatacagatgtccgcccctaccactgcacttactgtaacttctcctttaagactaaaggaaatctgacaaaacacatgaagtccaaggcacatagcaagaaatgtgtggatttaggcgtctcagtaggtttaatagatgaacaggatacagaagaatcagatgaaaaacagagattcagttatgagcgatctggatatgatcttgaagaatctgatggcccagatgaggatgacaatgaaaatgaagacgatgatgaggacagccaggctgaatcagtcctgtcagccacaccctcagtcacagctagcccgcagcaccttccatctagaagtagccttcaggaccctgtgagtactgacgaggatgtcaggatcaccgattgcttttctggggtacacacggacccaatggacgttctgcccagggcgctgctcaccagaatgactgtcctgagcacagcacagtctgactacaataggaagacactctctccggggaaggccaggcagcgtgctgcgagagatgaaaacgacacaattccgtctgtagacacttccaggtccccgtgtcatcagatgtctgtggactaccctgagtcagaagaaattctgagaagttctatggcaggaaaagctgttgctataacacagagcccatcatctgtaagacttcctcctgctgcagctgagcacagcccccagacagcagcggggatgccttctgtggcctcaccacatcctgaccctcaagaacagaagcagcaaataactctacagccgactccaggcttgccttctccccacactcatttgtttagccaccttcctttgcattcccagcagcaatcgaggacaccttataatatggttccagttggggggatccatgtggtacctgctggcctcacatactccacgtttgtgccccttcaggctggaccagtgcagctcacgatccctgctgtcagtgtcgttcacagaactttgggtactcataggaatacggtcacagaagtgtctggcactacaaaccctgctggagtggctgaattaagcagtgttgtgccatgtattcctatcggccaaatccgcgtgccaggccttcagaacctaagtaccccaggcttgcagtcactcccctcgttaagcatggaaaccgtcaatattgtaggcctagccaatacaaatatggccccacaagtccatccaccaggactggctctgaatgctgtcggactgcaggttctgactgcaaacccttcatcacaaagcagccccgcccctcaggcacacattccaggtctccagatcttgaacatagcattgcccaccttaatcccctcagtcagtcaagtagccgttgatgcacagggagctccagaaatgccagcttcccaaagcaaagcatgcgagacacaacccaagcagacttctgtagccagcgcaaacctgtcaaataaatcaaatgattaaattatatgttccactgttgaatataaattttatggctatggggcagagtttctgtgtataaattagtatgtaaactccatatttattgtattcatattagtctttgaaaatgggtctgtcctccttgtgtaagacagtaactttacacttcagacagattttctgtgttatgaaatgtttcagtaaaatattgtttactgactttaaaaatgct

SEQ ID NO: 315996 - DNA, 7253 bp, Homo sapiens
  misc_feature (3346)..(3346): n is a, c, g, or t
  misc_feature (3546)..(3546): n is a, c, g, or t
  misc_feature (3835)..(3835): n is a, c, g, or t
  misc_feature (4004)..(4004): n is a, c, g, or t
  misc_feature (4630)..(4632): n is a, c, g, or t
  misc_feature (7218)..(7218): n is a, c, g, or t
  misc_feature (7220)..(7220): n is a, c, g, or t
cgctgctgggcggcggcagggtggcggacggagcgggggaccggggagcggcggccgcgaggaggttatgtttgtgtttggggttgtcaagtgaaggagggatcccaggcgccgccgccgccgccgcgggggtcgcgagatcccgagccgcggccgccgccatcagcagcgcagctccagggccggctgcagcggcagcggctccgccgggcgtcctggcagcagcacatggattaattgatgtatgttgagtttatggagctgccttttggtggcttgctttatctgcagtttttaagaagaaaaagaaggccctgagtcaaagaagatgcctcgaactaaacaaattcatcccagaaatctaagagacaaaattgaagaagcacaaaaagaacttaatggggcagaagtttcaaaaaaagaaatcttacaggctggtgttaaaggaacttcggaatcccttaaaggtgtgaaacgcaaaaagatcgtagctgagaatcacctgaaaaaaataccaaaatccccactgagaaatcctcttcaggcaaaacataaacaaaatacagaagagtcatctttcgccgttcttcatagtgcttcggagtctcacaagaaacagaattatattcctgtaaaaaatgggaagcagtttaccaaacaaaatggagaaacacctggaataattgctgaagcctcaaaatctgaagaatctgtctccccaaagaagcccttgtttctgcagcaaccatctgaactgcgtagatggagatccgaaggcgctgatcctgccaaattcagtgacctcgatgaacaatgtgactcaagttccttgtcaagtaaaaccaggactgacaatagcgaatgcatctcttctcattgtggcactacgtccccctcctatacaaacactgcattcgatgtcttactgaaagcaatggagccagaactgagcaccttgtcacaaaagggctcaccttgtgcaattaagacagaaaaactgaggccaaataaaactgcacgttcccctcccaaattaaaaaacagttcaatggatgccccaaatcagacttcacaggaattggttgctgaatcacagtcttcttgtacctcatacacagtccatatgtctgctgctcagaagaatgagcaaggggcaatgcagtcagcttctcatttgtatcatcaacatgaacactttgttcccaaatccaaccaacataatcaacagcttccggggtgttcaggtttcacaggatcactgacaaatctgcaaaatcaagagaatgccaaacttgaacaggtttataatatagcagtgacatcatctgtaggcctaacttcaccttccagtagatctcaggttactcctcaaaaccagcaaatggattctgcttcacctttgtcaataagtccggctaattctacacagtcgccccccatgccaatctataattcaactcatgttgcctctgttgttaatcaaagcgtagagcaaatgtgcaatcttcttctgaaagatcagaagccaaaaaaacaaggaaaatatatttgtgagtattgcaatagagcatgtgcaaagcctagtgtgcttttaaagcatatccgctcccacactggagagcgaccctatccctgtgtgacttgtggattttcatttaagactaaaagtaatctgtataagcacaagaaatcccacgcacatactatcaaactgggtcttgtcttgcaaccagatgctggtggcttgttcttgtcccacgagtcccccaaagcacttagtattcattcagacgtagaagacagtggggagagcgaggaggaaggcgccactgatgagagacagcatgacctgggcgccatggagctgcagaatgtgcacataataaagaggatgtcaaatgctgaaactttactaaaatcaagcttcactccaagcagtccagaaaatgtgataggtgactttttgctacaggacagatctgcagaatcacaagctgtgacagagttaccgaaagttgtggtccaccatgtcactgtgtcccccttaagaactgacagtccaaaggccatggatcccaagcctgaactttctagtgcacaaaagcagaaggaccttcaggtgacaaacgtacagccactttcagccaacatgtcccagggtggagtctccaggttggagactaatgagaattcccaccagaaaggcgacatgaatccactggaaggaaagcaagactctcacgtaggaacggtacacgcccagctacaaaggcagcaggctaccgattactcccaagagcagcaaggaaagctcctgagtcctcgaagtttaggaagtacggattctggttacttttcacgttctgaaagtgccgatcaaacagtgagtccaccaactccctttgccagaaggttcccagcacagaacaagactctggaaggagtaacggaccctctgcagctcttgtcaccacgtcaacaccctctgctttgccacagggaaaaggcattgcttttaccaggtcagatgcgcccacctttggccacaaaaacacttgaggagcggatatcgaagcttatctcagacaatgaagctttggtagatgacaagcaactggatagtgtgaagccgcggagaacctcactgtcaagacgaggaagcattgattcccccaaatcatacatatttaaagattctttccagtttgatttaaaaccagtgggacggagaacaagttcaagctctgatataccgaagtcacctttcacccctactgaaaaatcaaagcaagtgtttcttctgtctgtaccttcacttgactgtttacctatcacaagaagtaattccatgccgaccacaggttattcagcagtacctgcaaatataatacctcctcctcatccactaagaggaagtcagtcatttgatgacaaaattggcgctttctatgatgatgtctttgtatcgggacctaacgctcctgtgccccagagtgggcatccccgtacacttgtgagacaagcagccatagaagactcttcagcaaatgaaagtcatgttcttggtactggacagtccctggatgagagccaccaaggatgccatgctgctggtgaagccatgtcagtgaggagcaaggcactggcacaaggcccacatatagaaaaaaagaagtctcatcaagggcgagggacaatgtttgagtgtgaaacttgtagaaacaggtataggaaactggaaaattttgaaaatcataagaaattttactgttctgagttacatggaccaaaaacaaaggtagccatgagagaacctgagcacagccctgtgcccggcggtctgcancctcagattctacactacagagtcgctgggtcctccggcatctgggaacagacgccccagataagaaaaaggaggaaaatgaaaagtgttggggatgatgaagaacttcagcaaaatgaaagtggaacatctccaaaaagttctgaaggccttcagtttcagaatgctctgggctgtaatcccagtttgcctaaacatantgttaccataagaagtgaccagcagcataaaaatatacagttgcaaaactcccatattcaccttgttgccaggggccctgagcagaccatggatcccaagctgtcgaccatcatggaacaacagataagttcagcagcccaggacaagatagaactgcagagacacggaactggaatctctgtcatccagcacaccaactccctgagcaggcccaactcatttgacaagcctgagccttttgaaagagcctccccagtttctttccaggagctgaatagaacggggaantccgggtctctaaaagtgataggaatctcccaagaggaaagtcacccttctcgggacgggtctcatcctcaccagcttgcactatcagacgctctcagaggagaacttcaggaaagctccagaaagagtccaagtgaacgacatgtgttaggacagccctcaagacttntccggcagcacaacatccaagttccagagattttggtcacagaagaaccagatcgagacctggaagctcaatgccatgatcaagaaaagtcagagaagttcagttggccccagcgtagtgaaaccttgtcaaaattgccaacagagaaactgccacccaaaaagaaaaggctccgtctggctgagatagaacattcctcaacagaatcgagctttgattccactctctccaggagtctaagtagggagagcagtttatctcacacttcaagtttctcagcctctttagacatagaggacgtttctaaaacggaggcttcccccaaaatcgattttctaaataaagccgagtttcttatgattccagctggcttgaatactctgaatgttcctggatgtcaccgggaaatgaggcgtactgcatcagaacagattaattgcacgcaaacgtcaatggaggtctctgatctcagaagcaaatcattcgattgtggaagcatcaccccaccccagacaacaccacttactgaattgcagcctccatcttcaccttctcgagtgggagtgactgggcatgtgcctctcttagaaagaaggagaggcccactggtacggcaaatatctttnnncatagccccagatagtcatctgtctcctgtacacccaacatctttccaaaatactgctcttcccagtgtgaatgcagtgccatatcaggggcctcagctcactagtacatctttagctgagttttctgcaaatactttgcactctcagactcaggttaaggatctgcaggcagaaacatcaaactccagctctaccaacgtttttcctgttcaacagctctgtgatatcaatttgttaaatcaaatccatgcaccgcctagccaccagagcacacagctatctctgcaagtgtctacgcagggtagcaagccagataaaaattctgttttatctgggtcttctaaaagtgaggattgctttgctcccaaataccaattgcattgtcaggttttcacttcaggcccatcttgctcttctaatcctgtgcattctttgccaaatcaagttatttcagatccagttggaacagatcattgtgtgacatcagcaacattaccaaccaaattaattgacagcatgtctaattcgcatcctctgctaccaccagagctcaggccccttggaagtcaggtgcagaaggtgccatcatcattcatgctgcccatacgcctgcagagtagtgttcctgcttactgttttgctacactcacatccctgccacaaatactagtgacccaagatctgcccaatcagccaatttgccagactaatcatagtgtagtgccaatcagtgaagaacaaaattctgtgccaacattacaaaaaggtcatcagaatgctttgccaaacccagagaaggaatttctatgtgaaaatgttttttcagagatgagccaaaattcttctctatcagaatccttgcccataactcagaaaatatctgttggtcgactttcccctcaacaagaatcttcagcttcgagtaaaaggatgctttccccagcaaatagtttagacattgccatggaaaagcaccagaagcgggccaaagatgaaaatggagctgtttgtgcaacagacgtgagacctttagaggctttgagttcgagagttaatgaagctagtaaacagaagaagcctattttagtgagacaggtttgtactacagagcccctggacggtgtgatgttggaaaaggatgttttttctcaacctgaaattagtaatgaggctgttaatttgacaaatgttttaccagctgataattcatcaacaggatgctctaaatttgtcgttatagaacctataagtgaattgcaggaatttgaaaacatcaagtcatccacatcattaactcttacagttcgaagttcacctgctccttcagaaaatactcatatttctcctttgaaatgtacagacaataaccaagaaaggaagtctccaggggttaaaaatcaaggtgacaaagtgaacatccaagagcaaagtcaacagccagtcacttctctttcattgtttaacatcaaggacacccagcagctggctttccctagcctgaaaactacaaccaactttacatggtgttatctcttaaggcagaagtcgttgcatttgcctcagaaggaccagaaaacttcagcctatactgattggacagtaagcgccagtaatccaaatccactcggtttgcccacaaaagttgcacttgctctccttaattcaaaacagaacactggaaaatcactatactgtcaagcaataactacccattccaagtcagacttattggtctattcaagcaagtggaaaagcagcttaagcaagagagcattaggtaatcaaaagtccacagtagttgaattcagcaataaagatgcctctgaaattaacagtgagcaagataaagaaaattccttaatcaaaagtgaaccaagaagaattaaaatatttgatggaggatataagtcaaatgaagagtatgtatatgtccgaggcaggggaagaggaaaatacatttgtgaagaatgtggaatacgttgtaagaaacctagcatgttaaagaaacacatacgaacccatacagatgtccgcccctaccactgcacttactgtaacttctcctttaagactaaaggaaatctgacaaaacacatgaagtccaaggcacatagcaagaaatgtgtggatttaggcgtctcagtaggtttaatagatgaacaggatacagaagaatcagatgaaaaacagagattcagttatgagcgatctggatatgatcttgaagaatctgatggcccagatgaggatgacaatgaaaatgaagacgatgatgaggacagccaggctgaatcagtcctgtcagccacaccctcagtcacagctagcccgcagcaccttccatctagaagtagccttcaggaccctgtgagtactgacgaggatgtcaggatcaccgattgcttttctggggtacacacggacccaatggacgttctgcccagggcgctgctcaccagaatgactgtcctgagcacagcacagtctgactacaataggaagacactctctccggggaaggccaggcagcgtgctgcgagagatgaaaacgacacaatttcttctgactcagggtagtccacagncntctgatgacacggggacctggaagtgtcgacgc

SEQ ID NO: 315997 - DNA, 329 bp, Homo sapiens
ttgtttgattagaattagctatattaagtgttgatgtaaaaagctggaatattctgttacacatgcataaaattgttattggttgagtataaaagttgtgccttgttttatctttgggttgaattttaatcatcaatattttctcagaggcatagtgtccaatctccctattcattttttttctttaaattagatataagtcaaatgaagagtatgtatatgtccgaggcaggggaagaggaaaatacatttgtgaagaatgtggaatacgttgtaagaaacctagcatgttaaagaaacacatacgaacccatacagatgtccgcccc

SEQ ID NO: 315998 - DNA, 505 bp, Homo sapiens
gactgtcctgagcacagcacagtctgactacaataggaagacactctctccggggaaggccaggcagcgtgctgcgagagatgaaaacgacacaattccgtctgtagacacttccaggtccccgtgtcatcagatgtctgtggactaccctgagtcagaagaaattctgagaagttctatggcaggaaaagctgttgctataacacaggtaaatgattggcagttgttcttttatttcttttttcgttttaacctattaaatatggagaacttaatggcttaagaaaataatgcacttaagtgatttttttaggccaaatcagtttgtatagctttatttttttcttgtatttaagggtagagggtatttttgccctttggagtcttgttgagtatcttaagcagttcagatattttattgtaaatctatgaaagaaccaaatggttcttgaaaaatacacccatttatttttatttgctttttgaaaaatttttgaaattaaaa

SEQ ID NO: 315999 - DNA, 4567 bp, Homo sapiens
ggagcgggggtctcacaggagggtctcaatctccggacctcaggatctggccggcctcggcctcccagggggctggggataacagggcgtgagccaccgcacccggccctaaaccctaggtttggacttcggtaagaaggaaagatttaaacaaacaaacaaacattaaattacaaccataataaacaaaaaaacactaaattaaattacaaccataataaaatctcccaaggtcggtaggcacggacatattacagcctggccaaatcagaatagatgtctcaggtgtggtcaatttaccagacacaaagagtagctcagatctcatagactcttcgagatctggtagactaatttcaagtctttttaaagtttggaaaaacatgtgctattgggaattacgtcatcctcgaaatattaacccggagctcaaaaacctatggttggatatgggaaatagttaagtccagttttcttctataaagataaaaattctgttttatctgggtcttctaaaagtgaggattgctttgctcccaaataccaattgcattgtcaggttttcacttcaggcccatcttgctcttctaatcctgtgcattctttgccaaatcaagttatttcagatccagttggaacagatcattgtgtgacatcagcaacattaccaaccaaattaattgacagcatgtctaattcgcatcctctgctaccaccagagctcaggccccttggaagtcaggtgcagaaggtgccatcatcattcatgctgcccatacgcctgcagagtagtgttcctgcttactgttttgctacactcacatccctgccacaaatactagtgacccaagatctgcccaatcagccaatttgccagactaatcatagtgtagtgccaatcagtgaagaacaaaattctgtgccaacattacaaaaaggtcatcagaatgctttgccaaacccagagaaggaatttctatgtgaaaatgttttttcagagatgagccaaaattcttctctatcagaatccttgcccataactcagaaaatatctgttggtcgactttcccctcaacaagaatcttcagcttcgagtaaaaggatgctttccccagcaaatagtttagacattgccatggaaaagcaccagaagcgggccaaagatgaaaatggagctgtttgtgcaacagacgtgagacctttagaggctttgagttcgagagttaatgaagctagtaaacagaagaagcctattttagtgagacaggtttgtactacagagcccctggacggtgtgatgttggaaaaggatgttttttctcaacctgaaattagtaatgaggctgttaatttgacaaatgttttaccagctgataattcatcaacaggatgctctaaatttgtcgttatagaacctataagtgaattgcaggaatttgaaaacatcaagtcatccacatcattaactcttacagttcgaagttcacctgctccttcagaaaatactcatatttctcctttgaaatgtacagacaataaccaagaaaggaagtctccaggggttaaaaatcaaggtgacaaagtgaacatccaagagcaaagtcaacagccagtcacttctctttcattgtttaacatcaaggacacccagcagctggctttccctagcctgaaaactacaaccaactttacatggtgttatctcttaaggcagaagtcgttgcatttgcctcagaaggaccagaaaacttcagcctatactgattggacagtaagcgccagtaatccaaatccactcggtttgcccacaaaagttgcacttgctctccttaattcaaaacagaacactggaaaatcactatactgtcaagcaataactacccattccaagtcagacttattggtctattcaagcaagtggaaaagcagcttaagcaagagagcattaggtaatcaaaagtccacagtagttgaattcagcaataaagatgcctctgaaattaacagtgagcaagataaagaaaattccttaatcaaaagtgaaccaagaagaattaaaatatttgatggaggatataagtcaaatgaagagtatgtatatgtccgaggcaggggaagaggaaaatacatttgtgaagaatgtggaatacgttgtaagaaacctagcatgttaaagaaacacatacgaacccatacagatgtccgcccctaccactgcacttactgtaacttctcctttaagactaaaggaaatctgacaaaacacatgaagtccaaggcacatagcaagaaatgtgtggatttaggcgtctcagtaggtttaatagatgaacaggatacagaagaatcagatgaaaaacagagattcagttatgagcgatctggatatgatcttgaagaatctgatggcccagatgaggatgacaatgaaaatgaagacgatgatgaggacagccaggctgaatcagtcctgtcagccacaccctcagtcacagctagcccgcagcaccttccatctagaagtagccttcaggaccctgtgagtactgacgaggatgtcaggatcaccgattgcttttctggggtacacacggacccaatggacgttctgcccagggcgctgctcaccagaatgactgtcctgagcacagcacagtctgactacaataggaagacactctctccggggaaggccaggcagcgtgctgcgagagatgaaaacgacacaattccgtctgtagacacttccaggtccccgtgtcatcagatgtctgtggactaccctgagtcagaagaaattctgagaagttctatggcaggaaaagctgttgctataacacagagcccatcatctgtaagacttcctcctgctgcagctgagcacagcccccagacagcagcggggatgccttctgtggcctcaccacatcctgaccctcaagaacagaagcagcaaataactctacagccgactccaggcttgccttctccccacactcatttgtttagccaccttcctttgcattcccagcagcaatcgaggacaccttataatatggttccagttggggggatccatgtggtacctgctggcctcacatactccacgtttgtgccccttcaggctggaccagtgcagctcacgatccctgctgtcagtgtcgttcacagaactttgggtactcataggaatacggtcacagaagtgtctggcactacaaaccctgctggagtggctgaattaagcagtgttgtgccatgtattcctatcggccaaatccgcgtgccaggccttcagaacctaagtaccccaggcttgcagtcactcccctcgttaagcatggaaaccgtcaatattgtaggcctagccaatacaaatatggccccacaagtccatccaccaggactggctctgaatgctgtcggactgcaggttctgactgcaaacccttcatcacaaagcagccccgcccctcaggcacacattccaggtctccagatcttgaacatagcattgcccaccttaatcccctcagtcagtcaagtagccgttgatgcacagggagctccagaaatgccagcttcccaaagcaaagcatgcgagacacaacccaagcagacttctgtagccagcgcaaaccaggtcagcaggaccgagtctcctcaggggttacctacagtccagcgggaaaatgcaaaaaaagttctgaatccacctgcccctgcaggtgaccatgcaaggcttgatggcctgagtaaaatggacacagagaaggctgcctcggcaaatcacgtgaagcccaagcctgaactcacttccatacagggccaaccagcgtccacgtcacaacctctgctgaaggcacattctgaagtttttacaaagccctcaggccagcagactctctctccagacagacaggttcccaggcccacagcactaccgcggaggcagcccactgtgcacttcagcgacgtgagcagcgatgatgacgaggacaggcttgtgatagcaacctgatggattttattttttatttgctttttttttatataacacttaaaggtttctttgaaaaccctcctttccttaaagcacatttttctgacataaactcatgactaatctttgtgcaatcatgaacttttgaccaataattgttgttttgtgtcagctccagccatttttgtacatgttgtatagacaattgtgccttttaggagctttatgtttagaaactgtacagattgttgaatatctatatacataaaaatatattatatatgtatatgaaaaccaggtagttatttgtgtttagtaaggaaaacctgtcaaataaatcaaatgattaaattatatgttccactgttgaatataaattttatggctatggggcagagtttctgtgtataaattagtatgtaaactccatatttattgtattcatattagtctttgaaaatgggtctgtcctccttgtgtaagacagtaactttacacttcagacagattttctgtgttatgaaatgtttcagtaaaatattgtttactgactttaaaaatgct

SEQ ID NO: 316000 - DNA, 1012 bp, Homo sapiens
cgctgctgggcggcggcagggtggcggacggagcgggggaccggggagcggcggccgcgaggaggttatgtttgtgtttggggttgtcaagtgaaggagggatcccaggcgccgccgccgccgccgcgggggtcgcgagatcccgagccgcggccgccgccatcagcagcgcagctccagggccggctgcagcggcagcggctccgccgggcgtcctggcagcagcacatggattaattgatgtatgttgagtttatggagctgccttttggtggcttgctttatctgcagtttttaagaagaaaaagaaggccctgagtcaaagaagatgcctcgaactaaacaaattcatcccagaaatctaagagggtcttgctcttttgctcaggctggagtgcagtggtgtagttgtagctcactgcaaccccaaacttctggggacaagctaaggcttgtccccttcctgctttagcgtcccgaatagcttggactacaggcacatgccagtgtgcctagctactttttttttttggcggaggggaggggagttcctcactttgttgcccagactggtcttgaactcccagcctcaagtgaacctcctgtgttggccccccaaagcactgagattacaggcatgagccaccgcacctagtctgtggtttttcttcttcttatttttaaacatcctgtgcagaaaaaaattaaggaacctgatgtatctgttagacattaataccgtgcaaattcagtatgttttagtgttttgatctattgatatcctttctattgaaggcaaggaacaatagttattcggggctttattagattttatttaatgctttcataaagaagcacagatattactatttatcaactgtaatttttaatatttgagaactatattttggtgtaattgtttttttaatcctgtgtattttatgcattttaaaacattctgaaaaggggtccatcaatttggctaaactgcagaggcatacagggtacacag

SEQ ID NO: 316001 - DNA, 696 bp, Homo sapiens
tttaattcatgaggatctttcatattaaaattgcatcaactatttaattcatgaggatcctcatgaattaaatagttgatgcaatttttaacgttaattgatataaaaaaaaaaacaacaaaattaggcttgtaaaactgactttttcattacgtgggttttgaaatctagccccagacatactgtgttgagagatacttagagggagggagtaggttttgaagaggttgatggtggtggggagggaaggcctcctgaattgagtttgatgcagagctttttagccatgaagaatctttcagtcatagtactaataattaaattttcagtatttaaaaagacaaagtattttgtccatttgagattctgcactccatgaaaagttcacttggacgctggggccaaaagctgttgattttcttaagttgacggttgtcaatatatcgaactgttcccaagttagtcaagtatgtctcaacactagcatgatataaaaagggacactgcagctgaatgaaaaaggaatcaaaatccactttgtacataagttaaagtcctaattggatttgtaccgtcctcccattttgttctcggaagattaaatgctacatgtgtaagtctgcctaaataggtagcttaaacttatgtcaaaatgtctgcagcagtttgtcaataaagtttagtccttttttaatc

SEQ ID NO: 316002 - DNA, 2741 bp, Homo sapiens
cgcacgcgcgccgcctcatttccggtgctctctctcgctgggtcgctcgggtcggcttcggtcgctaccgctcccgctctgccacccccgccaaccgccgctcgggcctccgtcgctgccgcgtcgctttctcgctccttggatcgcacatcctcccagatgcagcgccgggacgaccccgccgcgcgcatgagccggtcttcgggccgtagcggctccatggacccctccggtgcccacccctcggtgcgtcagacgccgtctcggcagccgccgctgcctcaccggtcccggggaggcggagggggatcccgcgggggcgcccgggcctcgcccgccacgcagccgccaccgctgctgccgccctcggccacgggtcccgacgcgacagtgggcgggccagcgccgaccccgctgctgcccccctcggccacagcctcggtcaagatggagccagagaacaagtacctgcccgaactcatggccgagaaggactcgctcgacccgtccttcactcacgccatgcagctgctgacggcagaaattgagaagattcagaaaggagactcaaaaaaggatgatgaggagaattacttggatttattttctcataagaacatgaaactgaaagagcgagtgctgatacctgtcaagcagtatcccaagttcaattttgtggggaagattcttggaccacaagggaatacaatcaaaagactgcaggaagagactggtgcaaagatctctgtattgggaaagggctcaatgagagacaaagccaaggaggaagagctgcgcaaaggtggagaccccaaatatgcccacttgaatatggatctgcatgtcttcattgaagtctttggacccccatgtgaggcttatgctcttatggcccatgccatggaggaagtcaagaaatttctagtaccggatatgatggatgatatctgtcaggagcaatttctagagctgtcctacttgaatggagtacctgaaccctctcgtggacgtggggtgccagtgagaggccggggagctgcacctcctccaccacctgttcccaggggccgtggtgttggaccacctcggggggctttggtacgtggtacaccagtaaggggagccatcaccagaggtgccactgtgactcgaggcgtgccacccccacctactgtgaggggtgctccagcaccaagagcacggacagcgggcatccagaggatacctttgcctccacctcctgcaccagaaacatatgaagaatatggatatgatgatacatacgcagaacaaagttacgaaggctacgaaggctattacagccagagtcaaggggactcagaatattatgactatggacatggggaggttcaagattcttatgaagcttatggccaggacgactggaatgggaccaggccgtcgctgaaggcccctcctgctaggccagtgaagggagcatacagagagcacccatatggacgttattaaaaacaaacatgaggggaaaatatcagttatgagcaaagttgttactgatttcttgtatctcccaggattcctgttgctttacccacaacagacaagtaattgtctaagtgtttttcttcgtggtccccttcttctccccaccttattccattcttaactctgcattctggcttctgtatgtagtattttaaaatgagttaaaatagatttaggaatattgaattaattttttaagtgtgtagatgcttttttctttgttgtttaaatataaacagaagtgtaccttttataataaaaaaaagaagttgagtaaaaaaaaaaaacacacaaacctgttagtttcaaaaatgacattgcttgcttaaaggttctgaagtaaaggcttgttaagtttctcttagttttgatttgaggcatcccgtaaagttgtagttgcagaatcccaaactaggctacatttcaaaattcagggctgtttaagatttaaaatcacaaacattaacggcagtaggcaccaccatgtaaaagtgagctcagacgtctctaaaaaatgtttcctttataaaagcacatggcggttgaatcttaaggttaaattttaatatgaaagatcctcatgaattaaatagttgatgcaatttttaacgttaattgatataaaaaaaaaaacaacaaaattaggcttgtaaaactgactttttcattacgtgggttttgaaatctagccccagacatactgtgttgagagatacttagagggagggagtaggttttgaagaggttgatggtggtggggagggaaggcctcctgaattgagtttgatgcagagctttttagccatgaagaatctttcagtcatagtactaataattaaattttcagtatttaaaaagacaaagtattttgtccatttgagattctgcactccatgaaaagttcacttggacgctggggccaaaagctgttgattttcttaagttgacggttgtcaatatatcgaactgttcccaagttagtcaagtatgtctcaacactagcatgatataaaaagggacactgcagctgaatgaaaaaggaatcaaaatccactttgtacataagttaaagtcctaattggatttgtaccgtcctcccattttgttctcggaagattaaatgctacatgtgtaagtctgcctaaataggtagcttaaacttatgtcaaaatgtctgcagcagtttgtcaataaagtttagtccttttttaatc

SEQ ID NO: 316003 - DNA, 2725 bp, Homo sapiens
gaatataggctagtacgaggcctgggtcgctcgggtcggcttcggtcgctaccgctcccgctctgccacccccgccaaccgccgctcgggcctccgtcgctgccgcgtcgctttctcgctccttggatcgcacatcctcccagatgcagcgccgggacgaccccgccgcgcgcatgagccggtcttcgggccgtagcggctccatggacccctccggtgcccacccctcggtgcgtcagacgccgtctcggcagccgccgctgcctcaccggtcccggggaggcggagggggatcccgcgggggcgcccgggcctcgcccgccacgcagccgccaccgctgctgccgccctcggccacgggtcccgacgcgacagtgggcgggccagcgccgaccccgctgctgcccccctcggccacagcctcggtcaagatggagccagagaacaagtacctgcccgaactcatggccgagaaggactcgctcgacccgtccttcactcacgccatgcagctgctgacggcagaaattgagaagattcagaaaggagactcaaaaaaggatgatgaggagaattacttggatttattttctcataagaacatgaaactgaaagagcgagtgctgatacctgtcaagcagtatcccaagttcaattttgtggggaagattcttggaccacaagggaatacaatcaaaagactgcaggaagagactggtgcaaagatctctgtattgggaaagggctcaatgagagacaaagccaaggaggaagagctgcgcaaaggtggagaccccaaatatgcccacttgaatatggatctgcatgtcttcattgaagtctttggacccccatgtgaggcttatgctcttatggcccatgccatggaggaagtcaagaaatttctagtaccggatatgatggatgatatctgtcaggagcaatttctagagctgtcctacttgaatggagtacctgaaccctctcgtggacgtggggtgccagtgagaggccggggagctgcacctcctccaccacctgttcccaggggccgtggtgttggaccacctcggggggctttggtacgtggtacaccagtaaggggagccatcaccagaggtgccactgtgactcgaggcgtgccacccccacctactgtgaggggtgctccagcaccaagagcacggacagcgggcatccagaggatacctttgcctccacctcctgcaccagaaacatatgaagaatatggatatgatgatacatacgcagaacaaagttacgaaggctacgaaggctattacagccagagtcaaggggactcagaatattatgactatggacatggggaggttcaagattcttatgaagcttatggccaggacgactggaatgggaccaggccgtcgctgaaggcccctcctgctaggccagtgaagggagcatacagagagcacccatatggacgttattaaaaacaaacatgaggggaaaatatcagttatgagcaaagttgttactgatttcttgtatctcccaggattcctgttgctttacccacaacagacaagtaattgtctaagtgtttttcttcgtggtccccttcttctccccaccttattccattcttaactctgcattctggcttctgtatgtagtattttaaaatgagttaaaatagatttaggaatattgaattaattttttaagtgtgtagatgcttttttctttgttgtttaaatataaacagaagtgtaccttttataataaaaaaaagaagttgagtaaaaaaaaaaaacacacaaacctgttagtttcaaaaatgacattgcttgcttaaaggttctgaagtaaaggcttgttaagtttctcttagttttgatttgaggcatcccgtaaagttgtagttgcagaatcccaaactaggctacatttcaaaattcagggctgtttaagatttaaaatcacaaacattaacggcagtaggcaccaccatgtaaaagtgagctcagacgtctctaaaaaatgtttcctttataaaagcacatggcggttgaatcttaaggttaaattttaatatgaaagatcctcatgaattaaatagttgatgcaatttttaacgttaattgatataaaaaaaaaaacaacaaaattaggcttgtaaaactgactttttcattacgtgggttttgaaatctagccccagacatactgtgttgagagatacttagagggagggagtaggttttgaagaggttgatggtggtggggagggaaggcctcctgaattgagtttgatgcagagctttttagccatgaagaatctttcagtcatagtactaataattaaattttcagtatttaaaaagacaaagtattttgtccatttgagattctgcactccatgaaaagttcacttggacgctggggccaaaagctgttgattttcttaagttgacggttgtcaatatatcgaactgttcccaagttagtcaagtatgtctcaacactagcatgatataaaaagggacactgcagctgaatgaaaaaggaatcaaaatccactttgtacataagttaaagtcctaattggatttgtaccgtcctcccattttgttctcggaagattaaatgctacatgtgtaagtctgcctaaataggtagcttaaacttatgtcaaaatgtctgcagcagtttgtcaataaagtttagtccttttttaatc

SEQ ID NO: 316004 - DNA, 2824 bp, Homo sapiens
cgcacgcgcgccgcctcatttccggtgctctctctcgctgggtcgctcgggtcggcttcggtcgctaccgctcccgctctgccacccccgccaaccgccgctcgggcctccgtcgctgccgcgtcgctttctcgctccttggatcgcacatcctcccagatgcagcgccgggacgaccccgccgcgcgcatgagccggtcttcgggccgtagcggctccatggacccctccggtgcccacccctcggtgcgtcagacgccgtctcggcagccgccgctgcctcaccggtcccggggaggcggagggggatcccgcgggggcgcccgggcctcgcccgccacgcagccgccaccgctgctgccgccctcggccacgggtcccgacgcgacagtgggcgggccagcgccgaccccgctgctgcccccctcggccacagcctcggtcaagatggagccagagaacaagtacctgcccgaactcatggccgagaaggactcgctcgacccgtccttcactcacgccatgcagctgctgacggcagaaattgagaagattcagaaaggagactcaaaaaaggatgatgaggagaattacttggatttattttctcataagaacatgaaactgaaagagcgagtgctgatacctgtcaagcagtatcccaagttcaattttgtggggaagattcttggaccacaagggaatacaatcaaaagactgcaggaagagactggtgcaaagatctctgtattgggaaagggctcaatgagagacaaagccaaggaggaagagctgcgcaaaggtggagaccccaaatatgcccacttgaatatggatctgcatgtcttcattgaagtctttggacccccatgtgaggcttatgctcttatggcccatgccatggaggaagtcaagaaatttctagtaccggatatgatggatgatatctgtcaggagcaatttctagagctgtcctacttgaatggagtacctgaaccctctcgtggacgtggggtgccagtgagaggccggggagctgcacctcctccaccacctgttcccaggggccgtggtgttggaccacctcggggggctttggtacgtggtacaccagtaaggggagccatcaccagaggtgccactgtgactcgaggcgtgccacccccacctactgtgaggggtgctccagcaccaagagcacggacagcgggcatccagaggatacctttgcctccacctcctgcaccagaaacatatgaagaatatgtaagaaatttgaacaatgtgccatttcccagtacctagaaggctgctaaaggaagttgaatgacagggcctcggtcctttatggatatgatgatacatacgcagaacaaagttacgaaggctacgaaggctattacagccagagtcaaggggactcagaatattatgactatggacatggggaggttcaagattcttatgaagcttatggccaggacgactggaatgggaccaggccgtcgctgaaggcccctcctgctaggccagtgaagggagcatacagagagcacccatatggacgttattaaaaacaaacatgaggggaaaatatcagttatgagcaaagttgttactgatttcttgtatctcccaggattcctgttgctttacccacaacagacaagtaattgtctaagtgtttttcttcgtggtccccttcttctccccaccttattccattcttaactctgcattctggcttctgtatgtagtattttaaaatgagttaaaatagatttaggaatattgaattaattttttaagtgtgtagatgcttttttctttgttgtttaaatataaacagaagtgtaccttttataataaaaaaaagaagttgagtaaaaaaaaaaaacacacaaacctgttagtttcaaaaatgacattgcttgcttaaaggttctgaagtaaaggcttgttaagtttctcttagttttgatttgaggcatcccgtaaagttgtagttgcagaatcccaaactaggctacatttcaaaattcagggctgtttaagatttaaaatcacaaacattaacggcagtaggcaccaccatgtaaaagtgagctcagacgtctctaaaaaatgtttcctttataaaagcacatggcggttgaatcttaaggttaaattttaatatgaaagatcctcatgaattaaatagttgatgcaatttttaacgttaattgatataaaaaaaaaaacaacaaaattaggcttgtaaaactgactttttcattacgtgggttttgaaatctagccccagacatactgtgttgagagatacttagagggagggagtaggttttgaagaggttgatggtggtggggagggaaggcctcctgaattgagtttgatgcagagctttttagccatgaagaatctttcagtcatagtactaataattaaattttcagtatttaaaaagacaaagtattttgtccatttgagattctgcactccatgaaaagttcacttggacgctggggccaaaagctgttgattttcttaagttgacggttgtcaatatatcgaactgttcccaagttagtcaagtatgtctcaacactagcatgatataaaaagggacactgcagctgaatgaaaaaggaatcaaaatccactttgtacataagttaaagtcctaattggatttgtaccgtcctcccattttgttctcggaagattaaatgctacatgtgtaagtctgcctaaataggtagcttaaacttatgtcaaaatgtctgcagcagtttgtcaataaagtttagtccttttttaatc

SEQ ID NO: 316005 - DNA, 3627 bp, Homo sapiens
cgcacgcgcgccgcctcatttccggtgctctctctcgctgggtcgctcgggtcggcttcggtcgctaccgctcccgctctgccacccccgccaaccgccgctcgggcctccgtcgctgccgcgtcgctttctcgctccttggatcgcacatcctcccagatgcagcgccgggacgaccccgccgcgcgcatgagccggtcttcgggccgtagcggctccatggacccctccggtgcccacccctcggtgcgtcagacgccgtctcggcagccgccgctgcctcaccggtcccggggaggcggagggggatcccgcgggggcgcccgggcctcgcccgccacgcagccgccaccgctgctgccgccctcggccacgggtcccgacgcgacagtgggcgggccagcgccgaccccgctgctgcccccctcggccacagcctcggtcaagatggagccagagaacaagtacctgcccgaactcatggccgagaaggactcgctcgacccgtccttcactcacgccatgcagctgctgacggcagaaattgagaagattcagaaaggagactcaaaaaaggatgatgaggagaattacttggatttattttctcataagaacatgaaactgaaagagcgagtgctgatacctgtcaagcagtatcccaagttcaattttgtggggaagattcttggaccacaagggaatacaatcaaaagactgcaggaagagactggtgcaaagatctctgtattgggaaagggctcaatgagagacaaagccaaggaggaagagctgcgcaaaggtggagaccccaaatatgcccacttgaatatggatctgcatgtcttcattgaagtctttggacccccatgtgaggcttatgctcttatggcccatgccatggaggaagtcaagaaatttctagtaccggatatgatggatgatatctgtcaggagcaatttctagagctgtcctacttgaatggagtacctgaaccctctcgtggacgtggggtgccagtgagaggccggggagctgcacctcctccaccacctgttcccaggggccgtggtgttggaccacctcggggggctttggtacgtggtacaccagtaaggggagccatcaccagaggtgccactgtgactcgaggcgtgccacccccacctactgtgaggggtgctccagcaccaagagcacggacagcgggcatccagaggatacctttgcctccacctcctgcaccagaaacatatgaagaatatggatatgatgatacatacgcagaacaaagttacgaaggctacgaaggctattacagccagagtcaaggggactcagaatattatgactatggacatggggaggttcaagattcttatgaagcttatggccaggacgactggaatgggaccaggccgtcgctgaaggcccctcctgctaggccagtgaagggagcatacagagagcacccatatggacgttattaaaaacaaacatgaggggaaaatatcagttatgagcaaagttgttactgatttcttgtatctcccaggattcctgttgctttacccacaacagacaagtaattgtctaagtgtttttcttcgtggtccccttcttctccccaccttattccattcttaactctgcattctggcttctgtatgtagtattttaaaatgagttaaaatagatttaggaatattgaattaattttttaagtgtgtagatgcttttttctttgttgtttaaatataaacagaagtgtaccttttataataaaaaaaagaagttgagtaaaaaaaaaaaacacacaaacctgttagtttcaaaaatgacattgcttgcttaaaggttctgaagtaaaggcttgttaagtttctcttagttttgatttgaggcatcccgtaaagttgtagttgcagaatcccaaactaggctacatttcaaaattcagggctgtttaagatttaaaatcacaaacattaacggcagtaggcaccaccatgtaaaagtgagctcagacgtctctaaaaaatgtttcctttataaaagcacatggcggttgaatcttaaggttaaattttaatatgaaagatcctcatgaattaaatagttgatgcaatttttaacgttaattgatataaaaaaaaaaacaacaaaattaggcttgtaaaactgactttttcattacgtgggttttgaaatctagccccagacatactgtgttgagagatacttagagggagggagtaggttttgaagaggttgatggtggtggggagggaaggcctcctgaattgagtttgatgcagagctttttagccatgaagaatctttcagtcatagtactaataattaaattttcagtatttaaaaagacaaagtattttgtccatttgagattctgcactccatgaaaagttcacttggacgctggggccaaaagctgttgattttcttaagttgacggttgtcaatatatcgaactgttcccaagttagtcaagtatgtctcaacactagcatgatataaaaagggacactgcagctgaatgaaaaaggaatcaaaatccactttgtacataagttaaagtcctaattggatttgtaccgtcctcccattttgttctcggaagattaaatgctacatgtgtaagtctgcctaaataggtagcttaaacttatgtcaaaatgtctgcagcagtttgtcaataaagtttagtccttttttaatccaaaaaaaaaataaccaatacactcacacccagacacacaacaaccacacacacacaacaccacagcccaaaccaagactcaccacacacaccacaccccacccaaccacaccacaccacccacaccaccagtcaacagcacaacgccgacaacaacacaccaaaacccacactcgacgcccagcacccttaaacaaaactaaaaaataccaaacaacacaaccacacctactatctcctactcacacgtaacaaatctacatactatacactaacacaacacaatacaatactacactaatcactactacccacaccttcttcataattataaataactcaaccactatcttaacaaatccacccaacactctctcccatcgcaacaagataccaataaacatactatcaattatcaatactccccaacacacacacaccatacgaacaatatatgaagcgagaagagcaggtgaaaaagaggccacacaggaacggcgaagactagagacgcgcgaagaagatcacgaaaccaagcgcagactggcgtggtcgattacacgcctactaccacgcacgacgaatgtaagctaaggtagtaagggagtatgcggcacggcaggaggagccagggcaggagtgaacgggagattcaactgggaacatcgcgacgcactgcaagcgactgcacatcgagagacgaatcacacaacgcggcggatcggaacagcagcgagcatggagaggctaacgagcgcgtgccaaacagctagaaaccataggcgagcgaacctcagacgatcggactacacgcttacgacccagagatcatgacggaaaccaaagcaacggcagtgagccggagatcgcatgcagacaaggcaga

SEQ ID NO: 316006 - DNA, 2689 bp, Homo sapiens
cgcacgcgcgccgcctcatttccggtgctctctctcgctgggtcgctcgggtcggcttcggtcgctaccgctcccgctctgccacccccgccaaccgccgctcgggcctccgtcgctgccgcgtcgctttctcgctccttggatcgcacatcctcccagatgcagcgccgggacgaccccgccgcgcgcatgagccggtcttcgggccgtagcggctccatggacccctccggtgcccacccctcggtgcgtcagacgccgtctcggcagccgccgctgcctcaccggtcccggggaggcggagggggatcccgcgggggcgcccgggcctcgcccgccacgcagccgccaccgctgctgccgccctcggccacgggtcccgacgcgacagtgggcgggccagcgccgaccccgctgctgcccccctcggccacagcctcggtcaagatggagccagagaacaagtacctgcccgaactcatggccgagaaggactcgctcgacccgtccttcactcacgccatgcagctgctgacggcagaaattgagaagattcagaaaggagactcaaaaaaggatgatgaggagaattacttggatttattttctcataagaacatgaaactgaaagagcgagtgctgatacctgtcaagcagtatcccaagttcaattttgtggggaagattcttggaccacaagggaatacaatcaaaagactgcaggaagagactggtgcaaagatctctgtattgggaaagggctcaatgagagacaaagccaaggaggaagagctgcgcaaaggtggagaccccaaatatgcccacttgaatatggatctgcatgtcttcattgaagtctttggacccccatgtgaggcttatgctcttatggcccatgccatggaggaagtcaagaaatttctagtaccggatatgatggatgatatctgtcaggagcaatttctagagctgtcctacttgaatggagtacctgaaccctctcgtggacgtggggtgccagtgagaggccggggagctgcacctcctccaccacctgttcccaggggccgtggtgttggaccacctcggggggctttggtacgtggtacaccagtaaggggagccatcaccagaggtgccactgtgactcgaggcgtgccacccccacctactgtgaggggtgctccagcaccaagagcacggacagcgggcatccagaggatacctttgcctccacctcctgcaccagaaacatatgaagaatatggatatgatgatacatacgcagaacaaagttacgaaggctacgaaggctattacagccagagtcaaggggactcagaatattatgactatggacatggggaggttcaagattcttatgaagcttatggccaggacgactggaatgggaccaggccgtcgctgaaggcccctcctgctaggccagtgaagggagcatacagagagcacccatatggacgttattaaaaacaaacatgaggggaaaatatcagttatgagcaaagttgttactgatttcttgtatctcccaggattcctgttgctttacccacaaccttattccattcttaactctgcattctggcttctgtatgtagtattttaaaatgagttaaaatagatttaggaatattgaattaattttttaagtgtgtagatgcttttttctttgttgtttaaatataaacagaagtgtaccttttataataaaaaaaagaagttgagtaaaaaaaaaaaacacacaaacctgttagtttcaaaaatgacattgcttgcttaaaggttctgaagtaaaggcttgttaagtttctcttagttttgatttgaggcatcccgtaaagttgtagttgcagaatcccaaactaggctacatttcaaaattcagggctgtttaagatttaaaatcacaaacattaacggcagtaggcaccaccatgtaaaagtgagctcagacgtctctaaaaaatgtttcctttataaaagcacatggcggttgaatcttaaggttaaattttaatatgaaagatcctcatgaattaaatagttgatgcaatttttaacgttaattgatataaaaaaaaaaacaacaaaattaggcttgtaaaactgactttttcattacgtgggttttgaaatctagccccagacatactgtgttgagagatacttagagggagggagtaggttttgaagaggttgatggtggtggggagggaaggcctcctgaattgagtttgatgcagagctttttagccatgaagaatctttcagtcatagtactaataattaaattttcagtatttaaaaagacaaagtattttgtccatttgagattctgcactccatgaaaagttcacttggacgctggggccaaaagctgttgattttcttaagttgacggttgtcaatatatcgaactgttcccaagttagtcaagtatgtctcaacactagcatgatataaaaagggacactgcagctgaatgaaaaaggaatcaaaatccactttgtacataagttaaagtcctaattggatttgtaccgtcctcccattttgttctcggaagattaaatgctacatgtgtaagtctgcctaaataggtagcttaaacttatgtcaaaatgtctgcagcagtttgtcaataaagtttagtccttttttaatc

SEQ ID NO: 316007 - DNA, 2720 bp, Homo sapiens
cgcacgcgcgccgcctcatttccggtgctctctctcgctgggtcgctcgggtcggcttcggtcgctaccgctcccgctctgccacccccgccaaccgccgctcgggcctccgtcgctgccgcgtcgctttctcgctccttggatcgcacatcctcccagatgcagcgccgggacgaccccgccgcgcgcatgagccggtcttcgggccgtagcggctccatggacccctccggtgcccacccctcggtgcgtcagacgccgtctcggcagccgccgctgcctcaccggtcccggggaggcggagggggatcccgcgggggcgcccgggcctcgcccgccacgcagccgccaccgctgctgccgccctcggccacgggtcccgacgcgacagtgggcgggccagcgccgaccccgctgctgcccccctcggccacagcctcggtcaagatggagccagagaacaagtacctgcccgaactcatggccgagaaggactcgctcgacccgtccttcactcacgccatgcagctgctgacggcagaaattgagaagattcagaaaggagactcaaaaaaggatgatgaggagaattacttggatttattttctcataagaacatgaaactgaaagagcgagtgctgatacctgtcaagcagtatcccaagttcaattttgtggggaagattcttggaccacaagggaatacaatcaaaagactgcaggaagagactggtgcaaagatctctgtattgggaaagggctcaatgagagacaaagccaaggaggaagagctgcgcaaaggtggagaccccaaatatgcccacttgaatatggatctgcatgtcttcattgaagtctttggacccccatgtgaggcttatgctcttatggcccatgccatggaggaagtcaagaaatttctagtaccggatatgatggatgatatctgtcaggagcaatttctagagctgtcctacttgaatggagtacctgaaccctctcgtggacgtggggtgccagtgagaggccggggagctgcacctcctccaccacctgttcccaggggccgtggtgttggaccacctcggggggctttggtacgtggtacaccagtaaggggagccatcaccagaggtgccactgtgactcgaggcgtgccacccccacctactgtgaggggtgctccagcaccaagagcacggacagcgggcatccagaggatacctttgcctccacctcctgcaccagaaacatatgaagaatatggatatgatgatacatacgcagaacaaagttacgaaggctacgaaggctattacagccagagtcaaggggactcagaatattatgactatggacatggggaggttcaagattcttatgaagcttatggccaggacgactggaatgggaccaggccgtcgccagtgaagggagcatacagagagcacccatatggacgttattaaaaacaaacatgaggggaaaatatcagttatgagcaaagttgttactgatttcttgtatctcccaggattcctgttgctttacccacaacagacaagtaattgtctaagtgtttttcttcgtggtccccttcttctccccaccttattccattcttaactctgcattctggcttctgtatgtagtattttaaaatgagttaaaatagatttaggaatattgaattaattttttaagtgtgtagatgcttttttctttgttgtttaaatataaacagaagtgtaccttttataataaaaaaaagaagttgagtaaaaaaaaaaaacacacaaacctgttagtttcaaaaatgacattgcttgcttaaaggttctgaagtaaaggcttgttaagtttctcttagttttgatttgaggcatcccgtaaagttgtagttgcagaatcccaaactaggctacatttcaaaattcagggctgtttaagatttaaaatcacaaacattaacggcagtaggcaccaccatgtaaaagtgagctcagacgtctctaaaaaatgtttcctttataaaagcacatggcggttgaatcttaaggttaaattttaatatgaaagatcctcatgaattaaatagttgatgcaatttttaacgttaattgatataaaaaaaaaaacaacaaaattaggcttgtaaaactgactttttcattacgtgggttttgaaatctagccccagacatactgtgttgagagatacttagagggagggagtaggttttgaagaggttgatggtggtggggagggaaggcctcctgaattgagtttgatgcagagctttttagccatgaagaatctttcagtcatagtactaataattaaattttcagtatttaaaaagacaaagtattttgtccatttgagattctgcactccatgaaaagttcacttggacgctggggccaaaagctgttgattttcttaagttgacggttgtcaatatatcgaactgttcccaagttagtcaagtatgtctcaacactagcatgatataaaaagggacactgcagctgaatgaaaaaggaatcaaaatccactttgtacataagttaaagtcctaattggatttgtaccgtcctcccattttgttctcggaagattaaatgctacatgtgtaagtctgcctaaataggtagcttaaacttatgtcaaaatgtctgcagcagtttgtcaataaagtttagtccttttttaatc

SEQ ID NO: 316008 - DNA, 2996 bp, Homo sapiens
cgcacgcgcgccgcctcatttccggtgctctctctcgctgggtcgctcgggtcggcttcggtcgctaccgctcccgctctgccacccccgccaaccgccgctcgggcctccgtcgctgccgcgtcgctttctcgctccttggatcgcacatcctcccagatgcagcgccgggacgaccccgccgcgcgcatgagccggtcttcgggccgtagcggctccatggacccctccggtgcccacccctcggtgcgtcagacgccgtctcggcagccgccgctgcctcaccggtcccggggaggcggagggggatcccgcgggggcgcccgggcctcgcccgccacgcagccgccaccgctgctgccgccctcggccacgggtcccgacgcgacagtgggcgggccagcgccgaccccgctgctgcccccctcggccacagcctcggtcaagatggagccagagaacaagtacctgcccgaactcatggccgagaaggactcgctcgacccgtccttcactcacgccatgcagctgctgacggcagaaattgagaagattcagaaaggagactcaaaaaaggatgatgaggagaattacttggatttattttctcataagaacatgaaactgaaagagcgagtgctgatacctgtcaagcagtatcccaagttcaattttgtggggaagattcttggaccacaagggaatacaatcaaaagactgcaggaagagactggtgcaaagatctctgtattgggaaagggctcaatgagagacaaagccaaggaggaagagctgcgcaaaggtggagaccccaaatatgcccacttgaatatggatctgcatgtcttcattgaagtctttggacccccatgtgaggcttatgctcttatggcccatgccatggaggaagtcaagaaatttctagtaccggatatgatggatgatatctgtcaggagcaatttctagagctgtcctacttgaatggagtacctgaaccctctcgtggacgtggggtgccagtgagaggccggggagctgcacctcctccaccacctgttcccaggggccgtggtgttggaccacctcggggggctttggtacgtggtacaccagtaaggggagccatcaccagaggtgccactgtgactcgaggcgtgccacccccacctactgtgaggggtgctccagcaccaagagcacggacagcgggcatccagaggatacctttgcctccacctcctgcaccagaaacatatgaagaatatggatatgatgatacatacgcagaacaaagttacgaaggctacgaaggctattacagccagagtcaaggggactcagaatattatgactatggacatggggaggttcaagattcttatgaagcttatggccaggacgactggaatgggaccaggccgtcgctgaaggcccctcctgctaggccagtgaagggagcatacagagagcacccatatggacgttattaaaaacaaacatgaggggaaaatatcagttatgagcaaagttgttactgatttcttgtatctcccaggattcctgttgctttacccacaacagacaagtaattgtctaagtgtttttcttcgtggtccccttcttctccccaccttattccattcttaactctgcattctggcttctgtatgtagtattttaaaatgagttaaaatagatttaggaatattgaattaattttttaagtgtgtagatgcttttttctttgttgtttaaatataaacagaagtgtaccttttataataaaaaaaagaagttgagtaaaaaaaaaaaacacacaaacctgttagtttcaaaaatgacattgcttgcttaaaggttctgaagtaaaggcttgttaagtttctcttagttttgatttgaggcatcccgtaaagttgtagttgcagaatcccaaactaggctacatttcaaaattcagggctgtttaagatttaaaatcacaaacattaacggcagtaggcaccaccatgtaaaagtgagctcagacgtctctaaaaaatgtttcctttataaaagcacatggcggttgaatcttaaggttaaattttaatatgaaagatcctcatgaattaaatagttgatgcaatttttaacgttaattgatataaaaaaaaaaacaacaaaattaggcttgtaaaactgactttttcattacgtgggttttgaaatctagccccagacatactgtgttgagagatacttagagggagggagtaggttttgaagaggttgatggtggtggggagggaaggcctcctgaattgagtttgatgcagagctttttagccatgaagaatctttcagtcatagtactaataattaaattttcagtatttaaaaagacaaagtattttgtccatttgagattctgcactccatgaaaagttcacttggacgctggggccaaaagctgttgattttcttaagttgacggttgtcaatatatcgaactgttcccaagttagtcaagtatgtctcaacactagcatgatataaaaagggacactgcagctgaatgaaaaaggaatcaaaatccactttgtacataagttaaagtcctaattggatttgtaccgtcctcccattttgttctcggaagattaaatgctacatgtgtaagtctgcctaaataggtagcttaaacttatgtcaaaatgtctgcagcagtttgtcaataaagtttagtccttttttaatcaacaacacaaaagaccgaacaacgaaaccagcactcaccaaataggaggaccagccgaacaagataaaacacgatacacgtcgtcgaaaggtccatgacccaaaacaagcgtggccaaacaaacatcgtcaaccactgatgggcacaaacatggacgcggccggcgtcacacaaatacatcacgacaggggaccaaagaggaccacccatactaaagaaacgaagccaaaactaggtgaaaaaaaaagagaaccg

SEQ ID NO: 316009 - DNA, 2624 bp, Homo sapiens
cgcacgcgcgccgcctcatttccggtgctctctctcgctgggtcgctcgggtcggcttcggtcgctaccgctcccgctctgccacccccgccaaccgccgctcgggcctccgtcgctgccgcgtcgctttctcgctccttggatcgcacatcctcccagatgcagcgccgggacgaccccgccgcgcgcatgagccggtcttcgggccgtagcggctccatggacccctccggtgcccacccctcggtgcgtcagacgccgtctcggcagccgccgctgcctcaccggtcccggggaggcggagggggatcccgcgggggcgcccgggcctcgcccgccacgcagccgccaccgctgctgccgccctcggccacgggtcccgacgcgacagtgggcgggccagcgccgaccccgctgctgcccccctcggccacagcctcggtcaagatggagccagagaacaagtacctgcccgaactcatggccgagaaggactcgctcgacccgtccttcactcacgccatgcagctgctgacggcagaaattgagaagattcagaaaggagactcaaaaaaggatgatgaggagaattacttggatttattttctcataagaacatgaaactgaaagagcgagtgctgatacctgtcaagcagtatcccaaggaggaagagctgcgcaaaggtggagaccccaaatatgcccacttgaatatggatctgcatgtcttcattgaagtctttggacccccatgtgaggcttatgctcttatggcccatgccatggaggaagtcaagaaatttctagtaccggatatgatggatgatatctgtcaggagcaatttctagagctgtcctacttgaatggagtacctgaaccctctcgtggacgtggggtgccagtgagaggccggggagctgcacctcctccaccacctgttcccaggggccgtggtgttggaccacctcggggggctttggtacgtggtacaccagtaaggggagccatcaccagaggtgccactgtgactcgaggcgtgccacccccacctactgtgaggggtgctccagcaccaagagcacggacagcgggcatccagaggatacctttgcctccacctcctgcaccagaaacatatgaagaatatggatatgatgatacatacgcagaacaaagttacgaaggctacgaaggctattacagccagagtcaaggggactcagaatattatgactatggacatggggaggttcaagattcttatgaagcttatggccaggacgactggaatgggaccaggccgtcgctgaaggcccctcctgctaggccagtgaagggagcatacagagagcacccatatggacgttattaaaaacaaacatgaggggaaaatatcagttatgagcaaagttgttactgatttcttgtatctcccaggattcctgttgctttacccacaacagacaagtaattgtctaagtgtttttcttcgtggtccccttcttctccccaccttattccattcttaactctgcattctggcttctgtatgtagtattttaaaatgagttaaaatagatttaggaatattgaattaattttttaagtgtgtagatgcttttttctttgttgtttaaatataaacagaagtgtaccttttataataaaaaaaagaagttgagtaaaaaaaaaaaacacacaaacctgttagtttcaaaaatgacattgcttgcttaaaggttctgaagtaaaggcttgttaagtttctcttagttttgatttgaggcatcccgtaaagttgtagttgcagaatcccaaactaggctacatttcaaaattcagggctgtttaagatttaaaatcacaaacattaacggcagtaggcaccaccatgtaaaagtgagctcagacgtctctaaaaaatgtttcctttataaaagcacatggcggttgaatcttaaggttaaattttaatatgaaagatcctcatgaattaaatagttgatgcaatttttaacgttaattgatataaaaaaaaaaacaacaaaattaggcttgtaaaactgactttttcattacgtgggttttgaaatctagccccagacatactgtgttgagagatacttagagggagggagtaggttttgaagaggttgatggtggtggggagggaaggcctcctgaattgagtttgatgcagagctttttagccatgaagaatctttcagtcatagtactaataattaaattttcagtatttaaaaagacaaagtattttgtccatttgagattctgcactccatgaaaagttcacttggacgctggggccaaaagctgttgattttcttaagttgacggttgtcaatatatcgaactgttcccaagttagtcaagtatgtctcaacactagcatgatataaaaagggacactgcagctgaatgaaaaaggaatcaaaatccactttgtacataagttaaagtcctaattggatttgtaccgtcctcccattttgttctcggaagattaaatgctacatgtgtaagtctgcctaaataggtagcttaaacttatgtcaaaatgtctgcagcagtttgtcaataaagtttagtccttttttaatc

SEQ ID NO: 316010 - DNA, 2278 bp, Homo sapiens
cgcacgcgcgccgcctcatttccggtgctctctctcgctgggtcgctcgggtcggcttcggtcgctaccgctcccgctctgccacccccgccaaccgccgctcgggcctccgtcgctgccgcgtcgctttctcgctccttggatcgcacatcctcccagatgcagcgccgggacgaccccgccgcgcgcatgagccggtcttcgggccgtagcggctccatggacccctccggtgcccacccctcggtgcgtcagacgccgtctcggcagccgccgctgcctcaccggtcccggggaggcggagggggatcccgcgggggcgcccgggcctcgcccgccacgcagccgccaccgctgctgccgccctcggccacgggtcccgacgcgacagtgggcgggccagcgccgaccccgctgctgcccccctcggccacagcctcggtcaagatggagccagagaacaagtacctgcccgaactcatggccgagaaggactcgctcgacccgtccttcactcacgccatgcagctgctgacggcagaaattgagaagattcagaaaggagactcaaaaaaggatgatgaggagaattacttggatttattttctcataagaacatgaaactgaaagagcgagtgctgatacctgtcaagcagtatcccaagttcaattttgtggggaagattcttggaccacaagggaatacaatcaaaagactgcaggaagagactggtgcaaagatctctgtattgggaaagggctcaatgagagacaaagccaaggaggaagagctgcgcaaaggtggagaccccaaatatgcccacttgaatatggatctgcatgtcttcattgaagtctttggacccccatgtgaggcttatgctcttatggcccatgccatggaggaagtcaagaaatttctagtaccggccaggacgactggaatgggaccaggccgtcgctgaaggcccctcctgctaggccagtgaagggagcatacagagagcacccatatggacgttattaaaaacaaacatgaggggaaaatatcagttatgagcaaagttgttactgatttcttgtatctcccaggattcctgttgctttacccacaacagacaagtaattgtctaagtgtttttcttcgtggtccccttcttctccccaccttattccattcttaactctgcattctggcttctgtatgtagtattttaaaatgagttaaaatagatttaggaatattgaattaattttttaagtgtgtagatgcttttttctttgttgtttaaatataaacagaagtgtaccttttataataaaaaaaagaagttgagtaaaaaaaaaaaacacacaaacctgttagtttcaaaaatgacattgcttgcttaaaggttctgaagtaaaggcttgttaagtttctcttagttttgatttgaggcatcccgtaaagttgtagttgcagaatcccaaactaggctacatttcaaaattcagggctgtttaagatttaaaatcacaaacattaacggcagtaggcaccaccatgtaaaagtgagctcagacgtctctaaaaaatgtttcctttataaaagcacatggcggttgaatcttaaggttaaattttaatatgaaagatcctcatgaattaaatagttgatgcaatttttaacgttaattgatataaaaaaaaaaacaacaaaattaggcttgtaaaactgactttttcattacgtgggttttgaaatctagccccagacatactgtgttgagagatacttagagggagggagtaggttttgaagaggttgatggtggtggggagggaaggcctcctgaattgagtttgatgcagagctttttagccatgaagaatctttcagtcatagtactaataattaaattttcagtatttaaaaagacaaagtattttgtccatttgagattctgcactccatgaaaagttcacttggacgctggggccaaaagctgttgattttcttaagttgacggttgtcaatatatcgaactgttcccaagttagtcaagtatgtctcaacactagcatgatataaaaagggacactgcagctgaatgaaaaaggaatcaaaatccactttgtacataagttaaagtcctaattggatttgtaccgtcctcccattttgttctcggaagattaaatgctacatgtgtaagtctgcctaaataggtagcttaaacttatgtcaaaatgtctgcagcagtttgtcaataaagtttagtccttttttaatc

SEQ ID NO: 316011 - DNA, 2671 bp, Homo sapiens
cgcacgcgcgccgcctcatttccggtgctctctctcgctgggtcgctcgggtcggcttcggtcgctaccgctcccgctctgccacccccgccaaccgccgctcgggcctccgtcgctgccgcgtcgctttctcgctccttggatcgcacatcctcccagatgcagcgccgggacgaccccgccgcgcgcatgagccggtcttcgggccgtagcggctccatggacccctccggtgcccacccctcggtgcgtcagacgccgtctcggcagccgccgctgcctcaccggtcccggggaggcggagggggatcccgcgggggcgcccgggcctcgcccgccacgcagccgccaccgctgctgccgccctcggccacgggtcccgacgcgacagtgggcgggccagcgccgaccccgctgctgcccccctcggccacagcctcggtcaagatggagccagagaacaagtacctgcccgaactcatggccgagaaggactcgctcgacccgtccttcactcacgccatgcagctgctgacggcagaaattgagaagattcagaaaggagactcaaaaaaggatgatgaggagaattacttggatttattttctcataagaacatgaaactgaaagagcgagtgctgatacctgtcaagcagtatcccaagttcaattttgtggggaagattcttggaccacaagggaatacaatcaaaagactgcaggaagagactggtgcaaagatctctgtattgggaaagggctcaatgagagacaaagccaaggaggaagagctgcgcaaaggtggagaccccaaatatgcccacttgaatatggatctgcatgtcttcattgaagtctttggacccccatgtgaggcttatgctcttatggcccatgccatggaggaagtcaagaaatttctagtaccggatatgatggatgatatctgtcaggagcaatttctagagctgtcctacttgaatggagtacctgaaccctctcgtggacgtggggtgccagtgagaggccggggagctgcacctcctccaccacctgttcccaggggccgtggtgttggaccacctcggggggctttggtacgtggtacaccagtaaggggagccatcaccagaggtgccactgtgactcgaggcgtgccacccccacctactgtgaggggtgctccagcaccaagagcacggacagcgggcatccagaggatacctttgcctccacctcctgcaccagaaacatatgaagaatatggatatgatgatacatacgcagaacaaagttacgaaggctacgaaggctattacagccagagtcaaggggactcagaatattatgactatggacatggggaggttcaagattcttatgaagcttatggccaggacgactggaatgggaccaggccgtcgctgaaggcccctcctgctaggccagtgaagggagcatacagagagcacccatatggacgttattaaaaacaaacatgaggggaaaatatcagttatgagcaaagttgttactgatttcttgtatctcccaggattcctgttgctttacccacaacagacaagtaattgtctaagtgtttttcttcgtggtccccttcttctccccaccttattccattcttaactctgcattctggcttctgtatgtagtattttaaaatgagttaaaatagatttaggaatattgaattaattttttaagtgtgtagatgcttttttctttgttgtttaaatataaacagaagtgtaccttttataataaaaaaaagaagttgagtaaaaaaaaaaaacacacaaacctgttagtttcaaaaatgacattgcttgcttaaaggttctgaagtaaaggcttgttaagtttctcttagttttgatttgaggcatcccgtaaagttgtagttgcagaatcccaaactaggctacatttcaaaattcagggctgtttaagatttaaaatcacaaacattaacggcagtaggcaccaccatgtaaaagtgagctcagacgtctctaaaaaatgtttcctttataaaagcacatggcggttgaatcttaaggttaaattttaatatgaaagatcctcatgaattaaatagttgatgcaatttttaacgttaattgatataaaaaaaaaaacaacgagagatacttagagggagggagtaggttttgaagaggttgatggtggtggggagggaaggcctcctgaattgagtttgatgcagagctttttagccatgaagaatctttcagtcatagtactaataattaaattttcagtatttaaaaagacaaagtattttgtccatttgagattctgcactccatgaaaagttcacttggacgctggggccaaaagctgttgattttcttaagttgacggttgtcaatatatcgaactgttcccaagttagtcaagtatgtctcaacactagcatgatataaaaagggacactgcagctgaatgaaaaaggaatcaaaatccactttgtacataagttaaagtcctaattggatttgtaccgtcctcccattttgttctcggaagattaaatgctacatgtgtaagtctgcctaaataggtagcttaaacttatgtcaaaatgtctgcagcagtttgtcaataaagtttagtccttttttaatc

SEQ ID NO: 316012 - DNA, 2224 bp, Homo sapiens
cgcacgcgcgccgcctcatttccggtgctctctctcgctgggtcgctcgggtcggcttcggtcgctaccgctcccgctctgccacccccgccaaccgccgctcgggcctccgtcgctgccgcgtcgctttctcgctccttggatcgcacatcctcccagatgcagcgccgggacgaccccgccgcgcgcatgagccggtcttcgggccgtagcggctccatggacccctccggtgcccacccctcggtgcgtcagacgccgtctcggcagccgccgctgcctcaccggtcccggggaggcggagggggatcccgcgggggcgcccgggcctcgcccgccacgcagccgccaccgctgctgccgccctcggccacgggtcccgacgcgacagtgggcgggccagcgccgaccccgctgctgcccccctcggccacagcctcggtcaagatggagccagagaacaagtacctgcccgaactcatggccgagaaggactcgctcgacccgtccttcactcacgccatgcagctgctgacggcagaaattgagaagattcagaaaggagactcaaaaaaggatgatgaggagaattacttggatttattttctcataagaacatgaaactgaaagagcgagtgctgatacctgtcaagcagtatcccaagttcaattttgtggggaagattcttggaccacaagggaatacaatcaaaagactgcaggaagagactggtgcaaagatctctgtattgggaaagggctcaatgagagacaaagccaaggaggaagagctgcgcaaaggtggagaccccaaatatgcccacttgaatatggatctgcatgtcttcattgaagtctttggacccccatgtgaggcttatgctcttatggcccatgccatggaggaagtcaagaaatttctagtaccggatatgatggatgatatctgtcaggagcaatttctagagctgtcctacttgaatggagtacctgaaccctctcgtggacgtggggtgccagtgagaggccggggagctgcacctcctccaccacctgttcccaggggccgtggtgttggaccacctcggggggctttggtacgtggtacaccagtaaggggagccatcaccagaggtgccactgtgactcgaggcgtgccacccccacctactgtgaggggtgctccagcaccaagagcacggacagcgggcatccagaggatacctttgcctccacctcctgcaccagaaacatatgaagaatatggatatgatgatacatacgcagaacaaagttacgaaggctacgaaggctattacagccagagtcaaggggactcagaatattatgactatggacatggggaggttcaagattcttatgaagcttatggccaggacgactggaatgggaccaggccgtcgctgaaggcccctcctgctaggccagtgaagggagcatacagagagcacccatatggacgttattaaaaacaaacatgaggggaaaatatcagttatgagcaaagttgttactgatttcttgtatctcccaggattcctgttgctttacccacaacagacaagtaattgtctaagtgtttttcttcgtggtccccttcttctccccaccttattccattcttaactctgcattctggcttctgtatgtagtattttaaaatgagttaaaatagatttaggaatattgaattaattttttaagtgtgtagatgcttttttctttgttgtttaaatataaacagaagtgtaccttttataataaaaaaaagaagttgagtaaaaaaaaaaaacacacaaacctgttagtttcaaaaatgacattgcttgcttaaaggttctgaagtaaaggcttgttaagtttctcttagttttgatttgaggcatcccgtaaagttgtagttgcagaatcccaaactaggctacatttcaaaattcagggctgtttaagatttaaaatcacaaacattaacggcagtaggcaccaccatgtaaaagtgagctcagacgtctctaaaaaatgtttcctttataaaagcacatggcggttgaatcttaaggttaaattttaatatgaaagatcctcatgaattaaatagttgatgcaatttttaacgttaattgatataaaaaaaaaaacaacctagcccagacttcggggttgagagatacttcggagggataggttggggtgtgttgtggg

SEQ ID NO: 316013 - DNA, 1802 bp, Homo sapiens
cgcacgcgcgccgcctcatttccggtgctctctctcgctgggtcgctcgggtcggcttcggtcgctaccgctcccgctctgccacccccgccaaccgccgctcgggcctccgtcgctgccgcgtcgctttctcgctccttggatcgcacatcctcccagatgcagcgccgggacgaccccgccgcgcgcatgagccggtcttcgggccgtagcggctccatggacccctccggtgcccacccctcggtgcgtcagacgccgtctcggcagccgccgctgcctcaccggtcccggggaggcggagggggatcccgcgggggcgcccgggcctcgcccgccacgcagccgccaccgctgctgccgccctcggccacgggtcccgacgcgacagtgggcgggccagcgccgaccccgctgctgcccccctcggccacagcctcggtcaagatggagccagagaacaagtacctgcccgaactcatggccgagaaggactcgctcgacccgtccttcactcacgccatgcagctgctgacggcagaaattgagaagattcagaaaggagactcaaaaaaggatgatgaggagaattacttggatttattttctcataagaacatgaaactgaaagagcgagtgctgatacctgtcaagcagtatcccaagttcaattttgtggggaagattcttggaccacaagggaatacaatcaaaagactgcaggaagagactggtgcaaagatctctgtattgggaaagggctcaatgagagacaaagccaaggaggaagagctgcgcaaaggtggagaccccaaatatgcccacttgaatatggatctgcatgtcttcattgaagtctttggacccccatgtgaggcttatgctcttatggcccatgccatggaggaagtcaagaaatttctagtaccggatatgatggatgatatctgtcaggagcaatttctagagctgtcctacttgaatggagtacctgaaccctctcgtggacgtggggtgccagtgagaggccggggagctgcacctcctccaccacctgttcccaggggccgtggtgttggaccacctcggggggctttggtacgtggtacaccagtaaggggagccatcaccagaggtgccactgtgactcgaggcgtgccacccccacctactgtgaggggtgctccagcaccaagagcacggacagcgggcatccagaggatacctttgcctccacctcctgcaccagaaacatatgaagaatatggatatgatgatacatacgcagaacaaagttacgaaggctacgaaggctattacagccagagtcaaggggactcagaatattatgactatggacatggggaggttcaagattcttatgaagcttatggccaggacgactggaatgggaccaggccgtcgctgaaggcccctcctgctaggccagtgaagggagcatacagagagcacccatatggacgttattaaaaacaaacatgaggggaaaatatcagttatgagcaaagttgttactgatttcttgtatctcccaggattcctgttgctttacccacaacagacaagtaattgtctaagtgtttttcttcgtggtccccttcttctccccaccttattccattcttaactctgcattctggcttctgtatgtagtattttaaaatgagttaaaatagatttaggaatattgaattaattttttaagtgtgtagatgcttttttctttgttgtttaaatataaacagaagtgtaccttttataataaaaaaaagaagttgagt

SEQ ID NO: 316014 - DNA, 2147 bp, Homo sapiens
cgcacgcgcgccgcctcatttccggtgctctctctcgctgggtcgctcgggtcggcttcggtcgctaccgctcccgctctgccacccccgccaaccgccgctcgggcctccgtcgctgccgcgtcgctttctcgctccttggatcgcacatcctcccagatgcagcgccgggacgaccccgccgcgcgcatgagccggtcttcgggccgtagcggctccatggacccctccggtgcccacccctcggtgcgtcagacgccgtctcggcagccgccgctgcctcaccggtcccggggaggcggagggggatcccgcgggggcgcccgggcctcgcccgccacgcagccgccaccgctgctgccgccctcggccacgggtcccgacgcgacagtgggcgggccagcgccgaccccgctgctgcccccctcggccacagcctcggtcaagatggagccagagaacaagtacctgcccgaactcatggccgagaaggactcgctcgacccgtccttcactcacgccatgcagctgctgacggcagaaattgagaagattcagaaaggagactcaaaaaaggatgatgaggagaattacttggatttattttctcataagaacatgaaactgaaagagcgagtgctgatacctgtcaagcagtatcccaagttcaattttgtggggaagattcttggaccacaagggaatacaatcaaaagactgcaggaagagactggtgcaaagatctctgtattgggaaagggctcaatgagagacaaagccaaggaggaagagctgcgcaaaggtggagaccccaaatatgcccacttgaatatggatctgcatgtcttcattgaagtctttggacccccatgtgaggcttatgctcttatggcccatgccatggaggaagtcaagaaatttctagtaccggatatgatggatgatatctgtcaggagcaatttctagagctgtcctacttgaatggagtacctgaaccctctcgtggacgtggggtgccagtgagaggccggggagctgcacctcctccaccacctgttcccaggggccgtggtgttggaccacctcggggggctttggtacgtggtacaccagtaaggggagccatcaccagaggtgccactgtgactcgaggcgtgccacccccacctactgtgaggggtgctccagcaccaagagcacggacagcgggcatccagaggatacctttgcctccacctcctgcaccagaaacatatgaagaatatggatatgatgatacatacgcagaacaaagttacgaaggctacgaaggctattacagccagagtcaaggggactcagaatattatgactatggacatggggaggttcaagattcttatgaagcttatggccaggacgactggaatgggaccaggccgtcgctgaaggcccctcctgctaggccagtgaagggagcatacagagagcacccatatggacgttattaaaaacaaacatgaggggaaaatatcagttatgagcaaagttgttactgatttcttgtatctcccaggattcctgttgctttacccacaacagacaagtaattgtctaagtgtttttcttcgtggtccccttcttctccccaccttattccattcttaactctgcattctggcttctgtatgtagtattttaaaatgagttaaaatagatttaggaatattgaattaattttttaagtgtgtagatgcttttttctttgttgtttaaatataaacagaagtgtaccttttataataaaaaaaagaagttgagtaaaaaaaaaaaacacacaaacctgttagtttcaaaaatgacattgcttgcttaaaggttctgaagtaaaggcttgttaagtttctcttagttttgatttgaggcatcccgtaaagttgtagttgcagaatcccaaactaggctacatttcaaaattcagggctgtttaagatttaaaatcacaaacattaacggcagtaggcaccaccatgtaaaagtgagctcagacgtctctaaaaaatgtttcctttataaaagcacatggcggttgaatcttaaggttaaattttaatatgaaagatcctcatgaattaaatagttgatcagcctcgtgccgaattcttgg

SEQ ID NO: 316015 - DNA, 2389 bp, Homo sapiens
cgcacgcgcgccgcctcatttccggtgctctctctcgctgggtcgctcgggtcggcttcggtcgctaccgctcccgctctgccacccccgccaaccgccgctcgggcctccgtcgctgccgcgtcgctttctcgctccttggatcgcacatcctcccagatgcagcgccgggacgaccccgccgcgcgcatgagccggtcttcgggccgtagcggctccatggacccctccggtgcccacccctcggtgcgtcagacgccgtctcggcagccgccgctgcctcaccggtcccggggaggcggagggggatcccgcgggggcgcccgggcctcgcccgccacgcagccgccaccgctgctgccgccctcggccacgggtcccgacgcgacagtgggcgggccagcgccgaccccgctgctgcccccctcggccacagcctcggtcaagatggagccagagaacaagtacctgcccgaactcatggccgagaaggactcgctcgacccgtccttcactcacgccatgcagctgctgacggcagaaattgagaagattcagaaaggagactcaaaaaaggatgatgaggagaattacttggatttattttctcataagaacatgaaactgaaagagcgagtgctgatacctgtcaagcagtatcccaagttcaattttgtggggaagattcttggaccacaagggaatacaatcaaaagactgcaggaagagactggtgcaaagatctctgtattgggaaagggctcaatgagagacaaagccaaggaggaagagctgcgcaaaggtggagaccccaaatatgcccacttgaatatggatctgcatgtcttcattgaagtctttggacccccatgtgaggcttatgctcttatggcccatgccatggaggaagtcaagaaatttctagtaccggatatgatggatgatatctgtcaggagcaatttctagagctgtcctacttgaatggagtacctgaaccctctcgtggacgtggggtgccagtgagaggccggggagctgcacctcctccaccacctgttcccaggggccgtggtgttggaccacctcggggggctttggtacgtggtacaccagtaaggggagccatcaccagaggtgccactgtgactcgaggcgtgccacccccacctactgtgaggggtgctccagcaccaagagcacggacagcgggcatccagaggatacctttgcctccacctcctgcaccagaaacatatgaagaatatggatatgatgatacatacgcagaacaaagttacgaaggctacgaaggctattacagccagagtcaaggggactcagaatattatgactatggacatggggaggttcaagattcttatgaagcttatggccaggacgactggaatgggaccaggccgtcgctgaaggcccctcctgctaggccagtgaagggagcatacagagagcacccatatggacgttattaaaaacaaacatgaggggaaaatatcagttatgagcaaagttgttactgatttcttgtatctcccaggattcctgttgctttacccacaacagacaagtaattgtctaagtgtttttcttcgtggtccccttcttctccccaccttattccattcttaactctgcattctggcttctgtatgtagtattttaaaatgagttaaaatagatttaggaatattgaattaattttttaagtgtgtagatgcttttttctttgttgtttaaatataaacagaagtgtaccttttataataaaaaaaagaagttgagtaaaaaaaaaaaacacacaaacctgttagtttcaaaaatgacattgcttgcttaaaggttctgaagtaaaggcttgttaagtttctcttagttttgatttgaggcatcccgtaaagttgtagttgcagaatcccaaactaggctacatttcaaaattcagggctgtttaagatttaaaatcacaaacattaacggcagtaggcaccaccatgtaaaagtgagctcagacgtctctaaaaaatgtttcctttataaaagcacatggcggttgaatcttaaggttaaattttaatatgaaagatcctcatgaattaaatagttgtgtaatagtttatgacagcataaattattccagtctgtcattgatgggcattggggctgatgccatgttttggctgttgtgaatagtgctgcatggaacatatgtgcgcaagtatctttataatagaataatttataatccttggggtatatacccagtaatgggatcgctgggtcaaatggtacaaatggtatctctgcctctaggtccttgaggaattgcacactattttcacatggttgaatatttacccccataacaggtaa

SEQ ID NO: 316016 - DNA, 788 bp, Homo sapiens
tgtgtgggtgatctagaggatcccgtatctcaaacattaacggcagtaggcaccaccatgtaaaagtgagctcagacgtctctaaaaaatgtttcctttataaaagcacatggcggttgaatcttaaggttaaattttaatatgaaagatcctcatgaattaaatagttgatgcaatttttaacgttaattgatataaaaaaaaaaacaacaaaattaggcttgtaaaactgactttttcattacgtgggttttgaaatctagccccagacatactgtgttgagagatacttagagggagggagtaggttttgaagaggttgatggtggtggggagggaaggcctcctgaattgagtttgatgcagagctttttagccatgaagaatctttcagtcatagtactaataattaaattttcagtatttaaaaagacaaagtattttgtccatttgagattctgcactccatgaaaagttcacttggacgctggggccaaaagctgttgattttcttaagttgacggttgtcaatatatcgaactgttcccaagttagtcaagtatgtctcaacactagcatgatataaaaagggacactgcagctgaatgaaaaaggaatcaaaatccactttgtacataagttaaagtcctaattggatttgtaccgtcctcccattttgttctcggaagattaaatgctacatgtgtaagtctgcctaaataggtagcttaaacttatgtcaaaatgtctgcagcagtttgtcaataaagtttagtccttttttaatc

SEQ ID NO: 316017 - DNA, 2839 bp, Homo sapiens
cgcacgcgcgccgcctcatttccggtgctctctctcgctgggtcgctcgggtcggcttcggtcgctaccgctcccgctctgccacccccgccaaccgccgctcgggcctccgtcgctgccgcgtcgctttctcgctccttggatcgcacatcctcccagatgcagcgccgggacgaccccgccgcgcgcatgagccggtcttcgggccgtagcggctccatggacccctccggtgcccacccctcggtgcgtcagacgccgtctcggcagccgccgctgcctcaccggtcccggggaggcggagggggatcccgcgggggcgcccgggcctcgcccgccacgcagccgccaccgctgctgccgccctcggccacgggtcccgacgcgacagtgggcgggccagcgccgaccccgctgctgcccccctcggccacagcctcggtcaagatggagccagagaacaagtacctgcccgaactcatggccgagaaggactcgctcgacccgtccttcactcacgccatgcagctgctgacggcagaaattgagaagattcagaaaggagactcaaaaaaggatgatgaggagaattacttggatttattttctcataagaacatgaaactgaaagagcgagtgctgatacctgtcaagcagtatcccaagttcaattttgtggggaagattcttggaccacaagggaatacaatcaaaagactgcaggaagagactggtgcaaagatctctgtattgggaaagggctcaatgagagacaaagccaaggaggaagagctgcgcaaaggtggagaccccaaatatgcccacttgaatatggatctgcatgtcttcattgaagtctttggacccccatgtgaggcttatgctcttatggcccatgccatggaggaagtcaagaaatttctagtaccggatatgatggatgatatctgtcaggagcaatttctagagctgtcctacttgaatggagtacctgaaccctctcgtggacgtggggtgccagtgagaggccggggagctgcacctcctccaccacctgttcccaggggccgtggtgttggaccacctcggggggctttggtacgtggtacaccagtaaggggagccatcaccagaggtgccactgtgactcgaggcgtgccacccccacctactgtgaggggtgctccagcaccaagagcacggacagcgggcatccagaggatacctttgcctccacctcctgcaccagaaacatatgaagaatatggatatgatgatacatacgcagaacaaagttacgaaggctacgaaggctattacagccagagtcaaggggactcagaatattatgactatggacatggggaggttcaagattcttatgaagcttatggccaggacgactggaatgggaccaggccgtcgctgaaggcccctcctgctaggccagtgaagggagcatacagagagcacccatatggacgttattaaaaacaaacatgaggggaaaatatcagttatgagcaaagttgttactgatttcttgtatctcccaggattcctgttgctttacccacaacgtgactgaaaactcctgaggcatttcctggactagaatgggtagtgaagacccatgtcagctatcagaggactcctgaaacctggagagctacctgctgtataaaggctggcctgagggcatttgctgaacacagagaaacccaggagaggagatcagcagttttctttcactctacttgatctgtcagatttacccacagaaagccagtcaggatcccttaagagtctttaggcccagaatggagtcctcagggctgcaggggactgtggtgctaacaattaaactgttcaagactttaaagagttgaaggggactaatgggtatccctagcatggcctcctagatgggaattaactggcaactcctactgtgccattcccagtatgtgtgcttccctttagcctcccatagaattggctgaaacaccctaccaccgttttctgtttccccactaccacacctgtgttatgggtgtcagcctgtgagtccttgaacccttccagagggctcccaagggagggtgatcactgcccttccataaaaggctgaggaaagccaagtgagaagattcaattaatttgggcaagttatttaacatctgaacctgtttttctcttcattgtttattacttaccttgtccaaaaaggtcataaagggtagggctttttctgttccacctctgtactatatttctccccaacaaatatctgcccctgaggacctcaataaaggtttggtcaagtgaaaaaaaaaaaaaaaaaaaaaaaaaaaaaaaaaaaaaaaaaaaaaaaaagacaaaaacgaccaaaaacaacaggggcgggcggcgcgcccgcgcagaaaaaattcatccgccgagggaggggcccccaacgttagcggcagcagccagccagcgttcttttgttgagaaacgagggggcccccaaatgaagggagcgcgccgttataataaaaaagcgagcgtagcgcgcgcggcggcggctttataaaaaacacagctgtctgatcgggagagaaacacgcgctagatcacgcgaggggcactcatgggggaggaaaagagcccacaactatctgcggggcggggaccaaaactggcggcacaaccacccccgccgagagagtaacacgccgccccgcggggagccaatacaaaacggccggggtagtagagccgggtcaaccacgcgcgcgttagcggcgcgcgcgaggaaagcgcgcccgggggagtagtgctgtcaacagttatcccg

SEQ ID NO: 316018 - DNA, 1885 bp, Homo sapiens
cgcacgcgcgccgcctcatttccggtgctctctctcgctgggtcgctcgggtcggcttcggtcgctaccgctcccgctctgccacccccgccaaccgccgctcgggcctccgtcgctgccgcgtcgctttctcgctccttggatcgcacatcctcccagatgcagcgccgggacgaccccgccgcgcgcatgagccggtcttcgggccgtagcggctccatggacccctccggtgcccacccctcggtgcgtcagacgccgtctcggcagccgccgctgcctcaccggtcccggggaggcggagggggatcccgcgggggcgcccgggcctcgcccgccacgcagccgccaccgctgctgccgccctcggccacgggtcccgacgcgacagtgggcgggccagcgccgaccccgctgctgcccccctcggccacagcctcggtcaagatggagccagagaacaagtacctgcccgaactcatggccgagaaggactcgctcgacccgtccttcactcacgccatgcagctgctgacggcagaaattgagaagattcagaaaggagactcaaaaaaggatgatgaggagaattacttggatttattttctcataagaacatgaaactgaaagagcgagtgctgatacctgtcaagcagtatcccaagttcaattttgtggggaagattcttggaccacaagggaatacaatcaaaagactgcaggaagagactggtgcaaagatctctgtattgggaaagggctcaatgagagacaaagccaaggaggaagagctgcgcaaaggtggagaccccaaatatgcccacttgaatatggatctgcatgtcttcattgaagtctttggacccccatgtgaggcttatgctcttatggcccatgccatggaggaagtcaagaaatttctagtaccggatatgatggatgatatctgtcaggagcaatttctagagctgtcctacttgaatggagtacctgaaccctctcgtggacgtggggtgccagtgagaggccggggagctgcacctcctccaccacctgttcccaggggccgtggtgttggaccacctcggggggctttggtacgtggtacaccagtaaggggagccatcaccagaggtgccactgtgactcgaggcgtgccacccccacctactgtgaggggtgctccagcaccaagagcacggacagcgggcatccagaggatacctttgcctccacctcctgcaccagaaacatatgaagaatatgtaagaaatttgaacaatgtgccatttcccagtacctagaaggctgctaaaggaagttgaatgacagggcctcggtcctttatggatatgatgatacatacgcagaacaaagttacgaaggctacgaaggctattacagccagagtcaaggggactcagaatattatgactatggacatggggaggttcaagattcttatgaagcttatggccaggacgactggaatgggaccaggccgtcgctgaaggcccctcctgctaggccagtgaagggagcatacagagagcacccatatggacgttattaaaaacaaacatgaggggaaaatatcagttatgagcaaagttgttactgatttcttgtatctcccaggattcctgttgctttacccacaacagacaagtaattgtctaagtgtttttcttcgtggtccccttcttctccccaccttattccattcttaactctgcattctggcttctgtatgtagtattttaaaatgagttaaaatagatttaggaatattgaattaattttttaagtgtgtagatgcttttttctttgttgtttaaatataaacagaagtgtaccttttataataaaaaaaagaagttgagt

SEQ ID NO: 316019 - DNA, 1781 bp, Homo sapiens
cgcacgcgcgccgcctcatttccggtgctctctctcgctgggtcgctcgggtcggcttcggtcgctaccgctcccgctctgccacccccgccaaccgccgctcgggcctccgtcgctgccgcgtcgctttctcgctccttggatcgcacatcctcccagatgcagcgccgggacgaccccgccgcgcgcatgagccggtcttcgggccgtagcggctccatggacccctccggtgcccacccctcggtgcgtcagacgccgtctcggcagccgccgctgcctcaccggtcccggggaggcggagggggatcccgcgggggcgcccgggcctcgcccgccacgcagccgccaccgctgctgccgccctcggccacgggtcccgacgcgacagtgggcgggccagcgccgaccccgctgctgcccccctcggccacagcctcggtcaagatggagccagagaacaagtacctgcccgaactcatggccgagaaggactcgctcgacccgtccttcactcacgccatgcagctgctgacggcagaaattgagaagattcagaaaggagactcaaaaaaggatgatgaggagaattacttggatttattttctcataagaacatgaaactgaaagagcgagtgctgatacctgtcaagcagtatcccaagttcaattttgtggggaagattcttggaccacaagggaatacaatcaaaagactgcaggaagagactggtgcaaagatctctgtattgggaaagggctcaatgagagacaaagccaaggaggaagagctgcgcaaaggtggagaccccaaatatgcccacttgaatatggatctgcatgtcttcattgaagtctttggacccccatgtgaggcttatgctcttatggcccatgccatggaggaagtcaagaaatttctagtaccggatatgatggatgatatctgtcaggagcaatttctagagctgtcctacttgaatggagtacctgaaccctctcgtggacgtggggtgccagtgagaggccggggagctgcacctcctccaccacctgttcccaggggccgtggtgttggaccacctcggggggctttggtacgtggtacaccagtaaggggagccatcaccagaggtgccactgtgactcgaggcgtgccacccccacctactgtgaggggtgctccagcaccaagagcacggacagcgggcatccagaggatacctttgcctccacctcctgcaccagaaacatatgaagaatatggatatgatgatacatacgcagaacaaagttacgaaggctacgaaggctattacagccagagtcaaggggactcagaatattatgactatggacatggggaggttcaagattcttatgaagcttatggccaggacgactggaatgggaccaggccgtcgccagtgaagggagcatacagagagcacccatatggacgttattaaaaacaaacatgaggggaaaatatcagttatgagcaaagttgttactgatttcttgtatctcccaggattcctgttgctttacccacaacagacaagtaattgtctaagtgtttttcttcgtggtccccttcttctccccaccttattccattcttaactctgcattctggcttctgtatgtagtattttaaaatgagttaaaatagatttaggaatattgaattaattttttaagtgtgtagatgcttttttctttgttgtttaaatataaacagaagtgtaccttttataataaaaaaaagaagttgagt

SEQ ID NO: 316020 - DNA, 467 bp, Homo sapiens
  misc_feature (18)..(18): n is a, c, g, or t
  misc_feature (31)..(32): n is a, c, g, or t
ggtcgactcccaggattncctcttcgctgtnntgagcttgatgttagctttttagccatgaagaatctttcagtcatagtactaataattaaattttcagtatttaaaaagacaaagtattttgtccatttgagattctgcactccatgaaaagttcacttggacgctggggccaaaagctgttgattttcttaagttgacggttgtcaatatatcgaactgttcccaagttagtcaagtatgtctcaacactagcatgatataaaaagggacactgcagctgaatgaaaaaggaatcaaaatccactttgtacataagttaaagtcctaattggatttgtaccgtcctcccattttgttctcggaagattaaatgctacatgtgtaagtctgcctaaataggtagcttaaacttatgtcaaaatgtctgcagcagtttgtcaataaagtttagtccttttttaatc

SEQ ID NO: 316021 - DNA, 480 bp, Homo sapiens
tcgaactgttcccaagtgagtcaagtatgtctcaacactagcatgatataaaaagggacactgcagctgaatgaaaaatctttcagtcatagtactaataattaaattttcagtatttaaaaagacaaagtattttgtccatttgagattctgcactccatgaaaagttcacttggacgctggggccaaaagctgttgattttcttaagttgacggttgtcaatatatcgaactgttcccaagttagtcaagtatgtctcaacactagcatgatataaaaagggacactgcagctgaatgaaaaaggaatcaaaatccactttgtacataagttaaagtcctaattggatttgtaccgtcctcccattttgttctcggaagattaaatgctacatgtgtaagtctgcctaaataggtagcttaaacttatgtcaaaatgtctgcagcagtttgtcaataaagtttagtccttttttaatc

SEQ ID NO: 316022 - DNA, 653 bp, Homo sapiens
aattacttggatttattttctcataagaacatgaaactgaaagagcgagtgctgatacctgtcaagcagtatcccaaggtaaggcaaaaagtgctttggatctttgagttatctttatagttatgagagagtcatgggctataataaagactcctggggattgtgatgctttagaaacttaagcctgtgaagcttctctttcatgcttgtagtacctgttactgagagttgaaatatctaagttcttaactaataacatagctatagccaggaaggaaatataatcatctttttattatcaaaaagtttctttctcaaatgattgctcaggctacaagttcaaagaaaaaaaaattaaaacctgaagagttgctctttgtcaaaagactaacctgaaatctaaataaaaggaaatataatatgaatcctcaattggttgaagttaattttattttcttactaaaagtttacttttaagtaaatgctttttttcttcctttttttttttttaggaaagcatttagttacatttagtttatccagcgtgttatcaaagggtgctatatagtctcttctgttctgaggtcactgccttaaaaatgttgatgtatgttaagtgctgggccaggcacagtggctcatgcctgtaatgc

SEQ ID NO: 316023 - DNA, 527 bp, Homo sapiens
cgcgggggcgcccgggcctcgcccgccacgcagccgccaccgctgctgccgccctcggccacgggtcccgacgcgacagtgggcgggccagcgccgaccccgctgctgcccccctcggccacagcctcggtcaagatggagccagagaacaagtacctgcccgaactcatggccgagaaggactcgctcgacccgtccttcactcacgccatgcagctgctgacggcaggtaagggggcctcccgtgtccctctgggtcgcccggccatcccgggcatgagtggccctggctttgttcctctcgcttcccgccccctcgggaccgaggcagtcgggagttccggtctcatcctcatttttgggagcctggattccacattcccacctcagcccggagtgcgtgggagaatttctaggctgcagtggaggcccgaaggcgactttgcgatcccctagcgctaatgtcttgatggatagtgctgagctccccgcccctttcccgactcttccctcctccctcctcttgc

SEQ ID NO: 316024 - DNA, 665 bp, Homo sapiens
gggagggaaggcctcctgaattgagtttgatgcagagctttttagccatgaagaatctttcagtcatagtactaataattaaattttcagtatttaaaaagacaaagtattttgtccatttgagattctgcactccatgaaaagttcacttggacgctggggccaaaagctgttgattttcttaagttgacggttgtcaatatatcgaactgttcccaagttagtcaagtatgtctcaacactagcatgatataaaaagggacactgcagctgaatgaaaaaggaatcaaaatccactttgtacataagttaaagtcctaattggatttgtaccgtcctcccattttgttctcggaagattaaatgctacatgtgtaagtctgcctaaataggtagcttaaacttatgtcaaaatgtctgcagcagtttgtcaataaagtttagtccttttttaatctaaatgtgatgaattgtcatttttttgggtggaccataaaatagttttctctttcaaataaacttaaattaactctaaagttaatgggcttgttaaaagttggaaacattcttaaaagtggtgggggggattttattttaagtttaccaaaaaaaagttgatggagttgttaagttttagtttaaaaataaccaaagctttttcaccc

SEQ ID NO: 316025 - DNA, 741 bp, Homo sapiens
cgcggtggctcatgcctgtaatcctagcactttgggaggctgaggcgggcagatcacttgaggttaggggttcaaaaccagcctgaccaacatagtaaaaccccgtccctacaaaaataaaaaaataaaaaaaataagccaggtgtggtggtgggcacctgtgatctcagctacgtgggaggctgaggcaggagaatctcttgaacctaggaggcagaggttgcagtgagccaagattgtgccagcctgggcgacagggtgaggctcttgtctcaaaaaaaaaagtccacatcttcatgaaccctcagactctggagttgggtgtcggcttttttagccagcttttgtgggaattgcctttgacctattaaagaaggaaagtgggtaatggagtcccagccactcaagagactggatatcccccgagaatggcttgggttaccagctatggacccttggaagatgaatctaatccttctcactggtttttctttgcaaattcatttgcttttatttttctaataacaataaactctattttccatgttctcagggcccctgggtagacagacacagcttgatttcagagcagacataggcgaagaaaacatggcattgagtgtgctgagtccagacaaatgttatttatatacacatccaaatttgaagagaaaatgtatttctttaggtttcaaacactgtaatagatataaagcaaaaataaaaacctgttgcaaagtt

SEQ ID NO: 316026 - DNA, 1161 bp, Homo sapiens
cgcggtggctcatgcctgtaatcctagcactttgggaggctgaggcgggcagatcacttgaggttaggggttcaaaaccagcctgaccaacatagtaaaaccccgtccctacaaaaataaaaaaataaaaaaaataagccaggtgtggtggtgggcacctgtgatctcagctacgtgggaggctgaggcaggagaatctcttgaacctaggaggcagaggttgcagtgagccaagattgtgccagcctgggcgacagggtgaggctcttgtctcaaaaaaaaaagtccacatcttcatgaaccctcagactctggagttgggtgtcggcttttttagccagcttttgtgggaattgcctttgacctattaaagaaggaaagtgggtaatggagtcccagccactcaagagactggatatcccccgagaatggcttgggttaccagctatggacccttggaagatgaatctaatccttctcactggtttttctttgcaaattcatttgcttttatttttctaataacaataaactctattttccatgttctcagggcccctgggtagacagacacagcttgatttcagagcagacataggcgaagaaaacatggcattgagtgtgctgagtccagacaaatgttatttatatacacatccaaatttgaagagaaaatgtatttctttaggtttcaaacactgtaatagatataaagcaaaaataaaaacctgttgcaaagttaaaaaaaaaaaaaaaaaaaaaaaagaaaaaaaaaaaaaaaaaaagggggggggggaaaaaaatttcccgggggggggccaaatatgaggatcttacaccgagcttttttttgtgttacaagagtggggccccaatatggaggagtgttaatatatacgacagggggcttgcgacccgtgttttaaacaaggtttgtgtatgtgggaacaaatgtggtaccggggggacacttgtgggaaagagaaccccaatatttgtggtgggggaaaccatatgtggcgaaaaattcactgaagaaattttaagggatctgaggggtatcatattaaatttaagagggtttaatgggtgtaaacacaggtcattaattgatgggggggagagagtttcgtacggggaatatatgttggagatatttgc

SEQ ID NO: 316027 - DNA, 6832 bp, Homo sapiens
  misc_feature (6740)..(6740): n is a, c, g, or t
cagatccgccatattgtctactgaaagctgccgctgaagctgccgccgttgcctccgccgccaagagtgagcgagcggacccgcgatggagaccatggcgagcccagggaaagacaattatcgaatgaagagctataagaacaatgctctaaaccctgaagaaatgagacgaagaagagaggaagagggcattcagctccggaagcagaagcgagagcaacaactttttaaacggagaaatgtggagctgattaatgaagaagctgccatgttcgatagtcttctcatggactcttatgtgagctctaccactggggagagtgtgatcacaagagagatggtggagatgctcttttctgatgattctgacctgcagttagcaaccacacagaaattccggaaactgctctccaaagagcctagtcctccaatagatgaagttatcaacactccaagagtggtggatcggttcgtggagtttctgaagaggaatgagaattgtacattacagtttgaagctgcctgggctctaacgaatattgcctctggaacctctcagcagaccaaaattgtcattgaagcaggggctgtccccatttttatagagctgcttaattcagactttgaggatgttcaggaacaggcagtctgggcactgggaaacatagctggagatagctctgtttgccgagattacgtcttgaactgttccatccttaatcctttgttaacactccttaccaagtccacacgactgacgatgacacggaatgcagtctgggccctgtcaaatctctgccgagggaaaaacccacccccagagtttgcaaaggtctctccttgtttgcctgtactgtctcgcctactcttcagcagcgactcggacttgctggcagatgcttgctgggccctttcttatctgtctgatggccccaatgagaagatccaggcagtcatagactccggagtctgccggagattggtagagctgctgatgcacaatgattacaaagtggcttctcctgccctgagagccgtgggtaacatcgtcactggggatgacatccagacccaggtcattcttaactgttcagccctaccttgccttctccacttgttgagcagtcccaaggagtcaatccggaaggaagcttgctggactatttcaaatattactgctggcaacagggctcaaatacaggctgttatagatgcaaatatcttccctgtgttgatcgaaatccttcagaaagcagagtttcgtacaaggaaagaggcagcctgggccatcaccaatgccacatcaggaggaacccctgagcagatcaggtacctggtctcactgggctgcatcaaacccctatgtgacttgctgactgtaatggattcgaagattgtgcaagtggccctcaatggactggagaacatcctgcggcttggagagcaagagggcaagcgcagtggctcaggggtcaatccttattgtggcctcatagaggaagcctatggcttggataaaattgagtttctccagagccacgagaaccaggagatctaccagaaggccttcgacctcattgagcactactttggtgtagaagacgatgatagcagcctggctccccaagtcgatgaaacgcaacagcagttcatcttccagcagcctgaggcccccatggagggcttccagctataatatctgcctccagggaggggaggggatgggaagcaccaccagccagcggaagagcagccctctggtgggcgggaaaccagtgtccccaccatcagccaccacacacctctgctgccctggagactgtgctcttgacctgctccgcccccttccctggagggagcaccctctggacagacagaaccatctgaggctcacctttgggttttgtgacaagaaggggacgtgttgggtttttcttccttacactatattttggctgcacacatgtctttaacccaggagcccaggggtagacaaaggaggactaaggtaatcaatttgcacctttttttatttttattttttttctttttttcttcagtggtgacttccttccctttatcttttttcattcttcccggtcctctgccctgatctgtgtaactcttatcttgggtacttgagcagacggtatattccagaggtgggaggtgggaggggaagggagaaatccaaaacaaagtgttcttgctctgacagaatattaatcttgtacgcttggattgagttatttaatttttttttcttttgcacatttttcttgtattaagattgctcttcccaagagccacaagttcctggttttagtaaacccagctgcctgcattgcctgggactagaggctggggaggctaccatgaaacaaaggtccctccctccctctgactctttgcccagacctctttagtttgggggatcctcctcactctcctgaagtgtctcaagtataccagtgggagtgcaggggaggagcacaggccttcagatggggcttcccacgtgtagctactgatcccatatttcctactcaccttccaaatggtgcgacccaacttcatttgtttacttgaaaattccccctcgaggttgagagaacctctgaggtggctgtattttctcctaagcttgagatagggggctgtggtccttcctttctcctgaggagaaagtccttgctctggtgacctgtaagttgcagaggagggtggagtgagagtgtcatgtattgggatagtcagggatccctgcctttggcctttcttcttcttcttcttcctcttccatagttggatcatgtatattttacttctaaaggagagaatgtcaaaaagttctgtatttttttatattctatatattaggtaggtcaatcttaattggtctcaagaggaagaactgtctgtcatttcggtaagtaggatactgtgaggaagaccaaaaagagatatggatgcttcctcgctcaggaggcctgagcttggtccttttcctctctgcttggattctggaccaccacctgggaccaaccttcagctctggaaccttcataaagcaggtcagcgtggcctgattgtcccaggacctgaagggagcaaggatggcctcagggcctggtgaagtctgctactctgtccttactgctgaacatcctgcttgtatcaggaaactcagaagcagtttgccttgtcaaattcaatctcaatggccattgtccacataactgatcacccatggctgcctctcctattatctattatcactgaaacttagtagcctgctttttttttttttttttagagctattgcgtatcttccctgtttgggatccttgtacctggtttgggttttcccttccttgtgacaattataatccagatgcctcttctttctgtttgaattacggtagtgcattgccttagtggcttgcctgtgcctctgggtggattacatatgatagtaaagcccacctgtttggatgggagtagaggaagttggtgtagaccagctgtggagctgaaggcacagtctgccccacccccacctccccactgtggttagtcagaggcatcctgctccaagctctgcttttccttcctctgaaacaatgccattcttgcttctattgctacacatctccttctggctcaggtgaaatccatgcccttctgcttatagacctaaagttcaggtacttattattggccattgatcttgaatttgccctctcctagtgctgcagtcccacttcaaagccattttctgaggaggatggtttaggtctggcaattgtccttgaaaaatcccacccatgttgtaccaccttggtgagtcatatgccactcatcagcttgggaatgatggctgccaactcccaatctcccaggaaggcagggggcagaatctttttttcacttggcctgctacctccattaaaaaaccattctcttacagtttaaaaaaaaaaaaaaaaaaaaagccttcccctacccaacctccgcccattgttctcttccaaagggcaatttagtaggatctactttgtacatctcaagtaagagttaagtccctgatacagggaccagtttcttagtgtaagacatacacatcctgcttgtccagctgttcctccaaaatctactttggcttcagctccgggtcctgtaccagatggaaaatgtttttggtgatctggctgctgcttaaagccagttttccctaagaactccaaaggctaaagtctactaggggcagagtgtgaggatagatttctaatcagagaaaagtggcctccaggagctttcatttatgtcttctccagaccaggttttcctgttatcttcctttaatcccctttcaaccaacaggtgaagttcttccagcccacagaggtagtaatatcatcttttctatctcctcctctcctttggccatgtaatgaagcaaaatattatttatttagcccaggcttgagagccactgtttgtggacagtcttcatctagattccataccctggcctaggcgaggtaaggctctctggttattgccaggatggagcccctctaccccagtctgctgtagggaataccctaattagttgaggcatgcttttggaatcctggcatgttggcatatggctggtctatcctttttaagatctctggttgggggtatctggatatggattaggagggacaaggagcctttttcttggctaatgttttccaatacttttttgaatggtgccagcccctccaggcatcccacccccaaatcatcatctttagtactaacagggtgtctggtcttagaagcctcccttcagatcccagctgaccctggtgactgcctggccttgatgttggctgcagccttctgatagaaccacatggattccacccacagctggccaggcttgttacatgggtcagggaatacaaatggcccccccccagggagcaggtgttggcctcagttttcagggacccttggtgttgctccttacctagagcccattaatctaccccatcaactctctgccatgaaagccatcttccaggagccctgttttttggagctgaactgcacagattatagctgctattgtacttaaataagggagaggaaaagaaggttctcaggcacagactttctatttttctcaagccaaaccagtttaaaatgtctagcagaatgaactgtatttccatttcttcatgtctacctgccttccccccacaccctaaagttgtacttgtttctagcaaactagaaggaaaagataggaaagcctggcactactaacctcacctctcatacacctctttgaaggccccagctcttttgttcaggcctctcttctcccctagactcactcagcttggtatccatcatcttgagcattcttcagtagattcatctagggttcagattccagactctcagctgaagacagggagccaatttcccccaggtccctgcaggtaatccagggaccccatagggagaacaggctgactggggcattaggaatgtttgtacctctctgcttccctggcagcctggggaagggtgcagggctcagtgcgctaaaccatggtaaacatcttcaatagaactaccctagaatttagtgagtgtgagactgagatattgctcagaataaatttattccatagccatttaggattgcatgttctggaccaaccttgtccagtatgttttctgtttgagctttttcattcttttgttaagccaacaagttgagaatttggccctgctgggatccatgtagtgggcactagctgctctttggccaaggccttcataaatgattcagtctctcattatctgtcctctagccccacaccctgatttagaccgtggcaaaggaagaacttgaggtcaagaccaaccaaatctgtgaattaaagctgttatttttttctctgcaagggcgctttgcttcaggtctgggctatgtgcagaacctaagcaggctgtgagagttagaagaggcagtattacatgttaggcccagaacaccatgggaaaaggtttatgtagtgtatcttagtggcctgcctagctgcctctgggccaggctgacttctgatgtccacattagctcgtacctgaaccctgttgctgaatgccagccctgttctcctgtaactattatatacgccatggcctggggggcattgaaggaagtaagctctcagagatcctaacactggctgggaacctctgactcagagcatgtctttaaagagtccacatctggccaggcgcggtggcacatgcctgtaatcccagcactttgggaggccgaggcgggtggatcacgaggtcaggagtttgagaccagcctggcaacatagtgaaaccccatctctaataaaaatacaaaaaattagctgggcgtggtggcaggcgcctgtaatcccagctacttgggaggctgagacaggagaatcacttgaacccaggaggcggaggttgcagtgagccaagatcatgccactgcactccagcttgggtgacagtgcgagactccatctcaaaaaaaaaaaaaaaaaaaaaaaaaccccgggggcctcttattgcgggggcgcgggaaaaaggggtttgacattggaccttggtccattagcgctgtttcccgggccccaggttttcttgttcccaggggggtaaattcgggcgggctcccctatagnggaggggcgaataaattacgacaacccaggtaactgtaatcgtctggatcacacaacaccaaataaccccacataacatagaaaaacaacgt

SEQ ID NO: 316028 - DNA, 6953 bp, Homo sapiens
  misc_feature (3513)..(3513): n is a, c, g, or t
  misc_feature (3562)..(3562): n is a, c, g, or t
  misc_feature (3625)..(3625): n is a, c, g, or t
  misc_feature (6861)..(6861): n is a, c, g, or t
cagatccgccatattgtctactgaaagctgccgctgaagctgccgccgttgcctccgccgccaagagtgagcgagcggacccgcgatggagaccatggcgagcccagggaaagacaattatcgaatgaagagctataagaacaatgctctaaaccctgaagaaatgagacgaagaagagaggaagagggcattcagctccggaagcagaagcgagagcaacaactttttaaacggagaaatgtggagctgattaatgaagaagctgccatgttcgatagtcttctcatggactcttatgtgagctctaccactggggagagtgtgatcacaagagagatggtggagatgctcttttctgatgattctgacctgcagttagcaaccacacagaaattccggaaactgctctccaaagagcctagtcctccaatagatgaagttatcaacactccaagagtggtggatcggttcgtggagtttctgaagaggaatgagaattgtacattacagtttgaagctgcctgggctctaacgaatattgcctctggaacctctcagcagaccaaaattgtcattgaagcaggggctgtccccatttttatagagctgcttaattcagactttgaggatgttcaggaacaggcagtctgggcactgggaaacatagctggagatagctctgtttgccgagattacgtcttgaactgttccatccttaatcctttgttaacactccttaccaagtccacacgactgacgatgacacggaatgcagtctgggccctgtcaaatctctgccgagggaaaaacccacccccagagtttgcaaaggtctctccttgtttgcctgtactgtctcgcctactcttcagcagcgactcggacttgctggcagatgcttgctgggccctttcttatctgtctgatggccccaatgagaagatccaggcagtcatagactccggagtctgccggagattggtagagctgctgatgcacaatgattacaaagtggcttctcctgccctgagagccgtgggtaacatcgtcactggggatgacatccagacccaggtcattcttaactgttcagccctaccttgccttctccacttgttgagcagtcccaaggagtcaatccggaaggaagcttgctggactatttcaaatattactgctggcaacagggctcaaatacaggctgttatagatgcaaatatcttccctgtgttgatcgaaatccttcagaaagcagagtttcgtacaaggaaagaggcagcctgggccatcaccaatgccacatcaggaggaacccctgagcagatcaggtacctggtctcactgggctgcatcaaacccctatgtgacttgctgactgtaatggattcgaagattgtgcaagtggccctcaatggactggagaacatcctgcggcttggagagcaagagggcaagcgcagtggctcaggggtcaatccttattgtggcctcatagaggaagcctatggcttggataaaattgagtttctccagagccacgagaaccaggagatctaccagaaggccttcgacctcattgagcactactttggtgtagaagacgatgatagcagcctggctccccaagtcgatgaaacgcaacagcagttcatcttccagcagcctgaggcccccatggagggcttccagctataatatctgcctccagggaggggaggggatgggaagcaccaccagccagcggaagagcagccctctggtgggcgggaaaccagtgtccccaccatcagccaccacacacctctgctgccctggagactgtgctcttgacctgctccgcccccttccctggagggagcaccctctggacagacagaaccatctgaggctcacctttgggttttgtgacaagaaggggacgtgttgggtttttcttccttacactatattttggctgcacacatgtctttaacccaggagcccaggggtagacaaaggaggactaaggtaatcaatttgcacctttttttatttttattttttttctttttttcttcagtggtgacttccttccctttatcttttttcattcttcccggtcctctgccctgatctgtgtaactcttatcttgggtacttgagcagacggtatattccagaggtgggaggtgggaggggaagggagaaatccaaaacaaagtgttcttgctctgacagaatattaatcttgtacgcttggattgagttatttaatttttttttcttttgcacatttttcttgtattaagattgctcttcccaagagccacaagttcctggttttagtaaacccagctgcctgcattgcctgggactagaggctggggaggctaccatgaaacaaaggtccctccctccctctgactctttgcccagacctctttagtttgggggatcctcctcactctcctgaagtgtctcaagtataccagtgggagtgcaggggaggagcacaggccttcagatggggcttcccacgtgtagctactgatcccatatttcctactcaccttccaaatggtgcgacccaacttcatttgtttacttgaaaattccccctcgaggttgagagaacctctgaggtggctgtattttctcctaagcttgagatagggggctgtggtccttcctttctcctgaggagaaagtccttgctctggtgacctgtaagttgcagaggagggtggagtgagagtgtcatgtattgggatagtcagggatccctgcctttggcctttcttcttcttcttcttcctcttccatagttggatcatgtatattttacttctaaaggagagaatgtcaaaaagttctgtatttttttatattctatatattaggtaggtcaatcttaattggtctcaagaggaagaactgtctgtcatttcggtaagtaggatactgtgaggaagaccaaaaagagatatggatgcttcctcgctcaggaggcctgagcttggtccttttcctctctgcttggattctggaccaccacctgggaccaaccttcagctctggaaccttcataaagcaggtcagcgtggcctgattgtcccaggacctgaagggagcaaggatggcctcagggcctggtgaagtctgctactctgtccttactgctgaacatcctgcttgtatcaggaaactcagaagcagtttgccttgtcaaattcaatctcaatggccattgtccacataactgatcacccatggctgcctctcctattatctattatcactgaaacttagtagcctgctttttttttttttttttagagctattgcgtatcttccctgtttgggatccttgtacctggtttgggttttcccttccttgtgacaattataatccagatgcctcttctttctgtttgaattacggtagtgcattgccttagtggcttgcctgtgcctctgggtggattacatatgatagtaaagcccacctgtttggatgggagtagaaggagganaaaaaaaggagtttttttggggggggttttggggttttttaaaaggaanaaaaacccccccccccaaaaggggggggcccctttttttgggggttttttggggggggggagnaaaaaaaaggggacccccccctttttttggggaagcacagtctgccccacccccacctccccactgtggttagtcagaggcatcctgctccaagctctgcttttccttcctctgaaacaatgccattcttgcttctattgctacacatctccttctggctcaggtgaaatccatgcccttctgcttatagacctaaagttcaggtacttattattggccattgatcttgaatttgccctctcctagtgctgcagtcccacttcaaagccattttctgaggaggatggtttaggtctggcaattgtccttgaaaaatcccacccatgttgtaccaccttggtgagtcatatgccactcatcagcttgggaatgatggctgccaactcccaatctcccaggaaggcagggggcagaatctttttttcacttggcctgctacctccattaaaaaaccattctcttacagtttaaaaaaaaaaaaaaaaaaaaagccttcccctacccaacctccgcccattgttctcttccaaagggcaatttagtaggatctactttgtacatctcaagtaagagttaagtccctgatacagggaccagtttcttagtgtaagacatacacatcctgcttgtccagctgttcctccaaaatctactttggcttcagctccgggtcctgtaccagatggaaaatgtttttggtgatctggctgctgcttaaagccagttttccctaagaactccaaaggctaaagtctactaggggcagagtgtgaggatagatttctaatcagagaaaagtggcctccaggagctttcatttatgtcttctccagaccaggttttcctgttatcttcctttaatcccctttcaaccaacaggtgaagttcttccagcccacagaggtagtaatatcatcttttctatctcctcctctcctttggccatgtaatgaagcaaaatattatttatttagcccaggcttgagagccactgtttgtggacagtcttcatctagattccataccctggcctaggcgaggtaaggctctctggttattgccaggatggagcccctctaccccagtctgctgtagggaataccctaattagttgaggcatgcttttggaatcctggcatgttggcatatggctggtctatcctttttaagatctctggttgggggtatctggatatggattaggagggacaaggagcctttttcttggctaatgttttccaatacttttttgaatggtgccagcccctccaggcatcccacccccaaatcatcatctttagtactaacagggtgtctggtcttagaagcctcccttcagatcccagctgaccctggtgactgcctggccttgatgttggctgcagccttctgatagaaccacatggattccacccacagctggccaggcttgttacatgggtcagggaatacaaatggcccccccccagggagcaggtgttggcctcagttttcagggacccttggtgttgctccttacctagagcccattaatctaccccatcaactctctgccatgaaagccatcttccaggagccctgttttttggagctgaactgcacagattatagctgctattgtacttaaataagggagaggaaaagaaggttctcaggcacagactttctatttttctcaagccaaaccagtttaaaatgtctagcagaatgaactgtatttccatttcttcatgtctacctgccttccccccacaccctaaagttgtacttgtttctagcaaactagaaggaaaagataggaaagcctggcactactaacctcacctctcatacacctctttgaaggccccagctcttttgttcaggcctctcttctcccctagactcactcagcttggtatccatcatcttgagcattcttcagtagattcatctagggttcagattccagactctcagctgaagacagggagccaatttcccccaggtccctgcaggtaatccagggaccccatagggagaacaggctgactggggcattaggaatgtttgtacctctctgcttccctggcagcctggggaagggtgcagggctcagtgcgctaaaccatggtaaacatcttcaatagaactaccctagaatttagtgagtgtgagactgagatattgctcagaataaatttattccatagccatttaggattgcatgttctggaccaaccttgtccagtatgttttctgtttgagctttttcattcttttgttaagccaacaagttgagaatttggccctgctgggatccatgtagtgggcactagctgctctttggccaaggccttcataaatgattcagtctctcattatctgtcctctagccccacaccctgatttagaccgtggcaaaggaagaacttgaggtcaagaccaaccaaatctgtgaattaaagctgttatttttttctctgcaagggcgctttgcttcaggtctgggctatgtgcagaacctaagcaggctgtgagagttagaagaggcagtattacatgttaggcccagaacaccatgggaaaaggtttatgtagtgtatcttagtggcctgcctagctgcctctgggccaggctgacttctgatgtccacattagctcgtacctgaaccctgttgctgaatgccagccctgttctcctgtaactattatatacgccatggcctggggggcattgaaggaagtaagctctcagagatcctaacactggctgggaacctctgactcagagcatgtctttaaagagtccacatctggccaggcgcggtggcacatgcctgtaatcccagcactttgggaggccgaggcgggtggatcacgaggtcaggagtttgagaccagcctggcaacatagtgaaaccccatctctaataaaaatacaaaaaattagctgggcgtggtggcaggcgcctgtaatcccagctacttgggaggctgagacaggagaatcacttgaacccaggaggcggaggttgcagtgagccaagatcatgccactgcactccagcttgggtgacagtgcgagactccatctcaaaaaaaaaaaaaaaaaaaaaaaaaccccgggggcctcttattgcgggggcgcgggaaaaaggggtttgacattggaccttggtccattagcgctgtttcccgggccccaggttttcttgttcccaggggggtaaattcgggcgggctcccctatagnggaggggcgaataaattacgacaacccaggtaactgtaatcgtctggatcacacaacaccaaataaccccacataacatagaaaaacaacgt

SEQ ID NO: 316029 - DNA, 5960 bp, Homo sapiens
  misc_feature (5868)..(5868): n is a, c, g, or t
cagatccgccatattgtctactgaaagctgccgctgaagctgccgccgttgcctccgccgccaagagtgagcgagcggacccgcgatggagaccatggcgagcccagggaaagacaattatcgaatgaagagctataagaacaatgctctaaaccctgaagaaatgagacgaagaagagaggaagagggcattcagctccggaagcagaagcgagagcaacaactttttaaacggagaaatgtggagctgattaatgaagaagctgccatgttcgatagtcttctcatggactcttatgtgagctctaccactggggagagtgtgatcacaagagagatggtggagatgctcttttctgatgattctgacctgcagttagcaaccacacagaaattccggaaactgctctccaaagagcctagtcctccaatagatgaagttatcaacactccaagagtggtggatcggttcgtggagtttctgaagaggaatgagaattgtacattacagtttgaagctgcctgggctctaacgaatattgcctctggaacctctcagcagaccaaaattgtcattgaagcaggggctgtccccatttttatagagctgcttaattcagactttgaggatgttcaggaacaggcagtctgggcactgggaaacatagctggagatagctctgtttgccgagattacgtcttgaactgttccatccttaatcctttgttaacactccttaccaagtccacacgactgacgatgacacggaatgcagtctgggccctgtcaaatctctgccgagggaaaaacccacccccagagtttgcaaaggtctctccttgtttgcctgtactgtctcgcctactcttcagcagcgactcggacttgctggcagatgcttgctgggccctttcttatctgtctgatggccccaatgagaagatccaggcagtcatagactccggagtctgccggagattggtagagctgctgatgcacaatgattacaaagtggcttctcctgccctgagagccgtgggtaacatcgtcactggggatgacatccagacccaggtcattcttaactgttcagccctaccttgccttctccacttgttgagcagtcccaaggagtcaatccggaaggaagcttgctggactatttcaaatattactgctggcaacagggctcaaatacaggctgttatagatgcaaatatcttccctgtgttgatcgaaatccttcagaaagcagagtttcgtacaaggaaagaggcagcctgggccatcaccaatgccacatcaggaggaacccctgagcagatcaggtacctggtctcactgggctgcatcaaacccctatgtgacttgctgactgtaatggattcgaagattgtgcaagtggccctcaatggactggagaacatcctgcggcttggagagcaagagggcaagcgcagtggctcaggggtcaatccttattgtggcctcatagaggaagcctatggcttggataaaattgagtttctccagagccacgagaaccaggagatctaccagaaggccttcgacctcattgagcactactttggtgtagaagacgatgatagcagcctggctccccaagtcgatgaaacgcaacagcagttcatcttccagcagcctgaggcccccatggagggcttccagctataatatctgcctccagggaggggaggggatgggaagcaccaccagccagcggaagagcagccctctggtgggcgggaaaccagtgtccccaccatcagccaccacacacctctgctgccctggagactgtgctcttgacctgctccgcccccttccctggagggagcaccctctggacagacagaaccatctgaggctcacctttgggttttgtgacaagaaggggacgtgttgggtttttcttccttacactatattttggctgcacacatgtctttaacccaggagcccaggggtagacaaaggaggactaaggtaggtcaatcttaattggtctcaagaggaagaactgtctgtcatttcggtaagtaggatactgtgaggaagaccaaaaagagatatggatgcttcctcgctcaggaggcctgagcttggtccttttcctctctgcttggattctggaccaccacctgggaccaaccttcagctctggaaccttcataaagcaggtcagcgtggcctgattgtcccaggacctgaagggagcaaggatggcctcagggcctggtgaagtctgctactctgtccttactgctgaacatcctgcttgtatcaggaaactcagaagcagtttgccttgtcaaattcaatctcaatggccattgtccacataactgatcacccatggctgcctctcctattatctattatcactgaaacttagtagcctgctttttttttttttttttagagctattgcgtatcttccctgtttgggatccttgtacctggtttgggttttcccttccttgtgacaattataatccagatgcctcttctttctgtttgaattacggtagtgcattgccttagtggcttgcctgtgcctctgggtggattacatatgatagtaaagcccacctgtttggatgggagtagaggaagttggtgtagaccagctgtggagctgaaggcacagtctgccccacccccacctccccactgtggttagtcagaggcatcctgctccaagctctgcttttccttcctctgaaacaatgccattcttgcttctattgctacacatctccttctggctcaggtgaaatccatgcccttctgcttatagacctaaagttcaggtacttattattggccattgatcttgaatttgccctctcctagtgctgcagtcccacttcaaagccattttctgaggaggatggtttaggtctggcaattgtccttgaaaaatcccacccatgttgtaccaccttggtgagtcatatgccactcatcagcttgggaatgatggctgccaactcccaatctcccaggaaggcagggggcagaatctttttttcacttggcctgctacctccattaaaaaaccattctcttacagtttaaaaaaaaaaaaaaaaaaaaagccttcccctacccaacctccgcccattgttctcttccaaagggcaatttagtaggatctactttgtacatctcaagtaagagttaagtccctgatacagggaccagtttcttagtgtaagacatacacatcctgcttgtccagctgttcctccaaaatctactttggcttcagctccgggtcctgtaccagatggaaaatgtttttggtgatctggctgctgcttaaagccagttttccctaagaactccaaaggctaaagtctactaggggcagagtgtgaggatagatttctaatcagagaaaagtggcctccaggagctttcatttatgtcttctccagaccaggttttcctgttatcttcctttaatcccctttcaaccaacaggtgaagttcttccagcccacagaggtagtaatatcatcttttctatctcctcctctcctttggccatgtaatgaagcaaaatattatttatttagcccaggcttgagagccactgtttgtggacagtcttcatctagattccataccctggcctaggcgaggtaaggctctctggttattgccaggatggagcccctctaccccagtctgctgtagggaataccctaattagttgaggcatgcttttggaatcctggcatgttggcatatggctggtctatcctttttaagatctctggttgggggtatctggatatggattaggagggacaaggagcctttttcttggctaatgttttccaatacttttttgaatggtgccagcccctccaggcatcccacccccaaatcatcatctttagtactaacagggtgtctggtcttagaagcctcccttcagatcccagctgaccctggtgactgcctggccttgatgttggctgcagccttctgatagaaccacatggattccacccacagctggccaggcttgttacatgggtcagggaatacaaatggcccccccccagggagcaggtgttggcctcagttttcagggacccttggtgttgctccttacctagagcccattaatctaccccatcaactctctgccatgaaagccatcttccaggagccctgttttttggagctgaactgcacagattatagctgctattgtacttaaataagggagaggaaaagaaggttctcaggcacagactttctatttttctcaagccaaaccagtttaaaatgtctagcagaatgaactgtatttccatttcttcatgtctacctgccttccccccacaccctaaagttgtacttgtttctagcaaactagaaggaaaagataggaaagcctggcactactaacctcacctctcatacacctctttgaaggccccagctcttttgttcaggcctctcttctcccctagactcactcagcttggtatccatcatcttgagcattcttcagtagattcatctagggttcagattccagactctcagctgaagacagggagccaatttcccccaggtccctgcaggtaatccagggaccccatagggagaacaggctgactggggcattaggaatgtttgtacctctctgcttccctggcagcctggggaagggtgcagggctcagtgcgctaaaccatggtaaacatcttcaatagaactaccctagaatttagtgagtgtgagactgagatattgctcagaataaatttattccatagccatttaggattgcatgttctggaccaaccttgtccagtatgttttctgtttgagctttttcattcttttgttaagccaacaagttgagaatttggccctgctgggatccatgtagtgggcactagctgctctttggccaaggccttcataaatgattcagtctctcattatctgtcctctagccccacaccctgatttagaccgtggcaaaggaagaacttgaggtcaagaccaaccaaatctgtgaattaaagctgttatttttttctctgcaagggcgctttgcttcaggtctgggctatgtgcagaacctaagcaggctgtgagagttagaagaggcagtattacatgttaggcccagaacaccatgggaaaaggtttatgtagtgtatcttagtggcctgcctagctgcctctgggccaggctgacttctgatgtccacattagctcgtacctgaaccctgttgctgaatgccagccctgttctcctgtaactattatatacgccatggcctggggggcattgaaggaagtaagctctcagagatcctaacactggctgggaacctctgactcagagcatgtctttaaagagtccacatctggccaggcgcggtggcacatgcctgtaatcccagcactttgggaggccgaggcgggtggatcacgaggtcaggagtttgagaccagcctggcaacatagtgaaaccccatctctaataaaaatacaaaaaattagctgggcgtggtggcaggcgcctgtaatcccagctacttgggaggctgagacaggagaatcacttgaacccaggaggcggaggttgcagtgagccaagatcatgccactgcactccagcttgggtgacagtgcgagactccatctcaaaaaaaaaaaaaaaaaaaaaaaaaccccgggggcctcttattgcgggggcgcgggaaaaaggggtttgacattggaccttggtccattagcgctgtttcccgggccccaggttttcttgttcccaggggggtaaattcgggcgggctcccctatagnggaggggcgaataaattacgacaacccaggtaactgtaatcgtctggatcacacaacaccaaataaccccacataacatagaaaaacaacgt

SEQ ID NO: 316030 - DNA, 6778 bp, Homo sapiens
  misc_feature (6686)..(6686): n is a, c, g, or t
cagatccgccatattgtctactgaaagctgccgctgaagctgccgccgttgcctccgccgccaagagtgagcgagcggacccgcgatggagaccatggcgagcccagggaaagacaattatcgaatgaagagctataagaacaatgctctaaaccctgaagaaatgagacgaagaagagaggaagagggcattcagctccggaagcagaagcgagagcaacaactttttaaacggagaaatgtggagctgattaatgaagaagctgccatgttcgatagtcttctcatggactcttatgtgagctctaccactggggagagtgtgatcacaagagagatggtggagatgctcttttctgatgattctgacctgcagttagcaaccacacagaaattccggaaactgctctccaaagagcctagtcctccaatagatgaagttatcaacactccaagagtggtggatcggttcgtggagtttctgaagaggaatgagaattgtacattacagtttgaagctgcctgggctctaacgaatattgcctctggaacctctcagcagaccaaaattgtcattgaagcaggggctgtccccatttttatagagctgcttaattcagactttgaggatgttcaggaacaggcagtctgggcactgggaaacatagctggagatagctctgtttgccgagattacgtcttgaactgttccatccttaatcctttgttaacactccttaccaagtccacacgactgacgatgacacggaatgcagtctgggccctgtcaaatctctgccgagggaaaaacccacccccagagtttgcaaaggtctctccttgtttgcctgtactgtctcgcctactcttcagcagcgactcggacttgctggcagatgcttgctgggccctttcttatctgtctgatggccccaatgagaagatccaggcagtcatagactccggagtctgccggagattggtagagctgctgatgcacaatgattacaaagtggcttctcctgccctgagagccgtgggtaacatcgtcactggggatgacatccagacccaggtcattcttaactgttcagccctaccttgccttctccacttgttgagcagtcccaaggagtcaatccggaaggaagcttgctggactatttcaaatattactgctggcaacagggctcaaatacaggctgttatagatgcaaatatcttccctgtgttgatcgaaatccttcagaaagcagagtttcgtacaaggaaagaggcagcctgggccatcaccaatgccacatcaggaggaacccctgagcagatcaggtacctggtctcactgggctgcatcaaacccctatgtgacttgctgactgtaatggattcgaagattgtgcaagtggccctcaatggactggagaacatcctgcggcttggagagcaagagggcaagcgcagtggctcaggggtcaatccttattgtggcctcatagaggaagcctatggcttggataaaattgagtttctccagagccacgagaaccaggagatctaccagaaggccttcgacctcattgagcactactttggtgtagaagacgatgatagcagcctggctccccaagtcgatgaaacgcaacagcagttcatcttccagcagcctgaggcccccatggagggcttccagctataatatctgcctccagggaggggaggggatgggaagcaccaccagccagcggaagagcagccctctggtgggcgggaaaccagtgtccccaccatcagccaccacacacctctgctgccctggagactgtgctcttgacctgctccgcccccttccctggagggagcaccctctggacagacagaaccatctgaggctcacctttgggttttgtgacaagaaggggacgtgttgggtttttcttccttacactatattttggctgcacacatgtctttaacccaggagcccaggggtagacaaaggaggactaaggtaatcaatttgcacctttttttatttttattttttttctttttttcttcagtggtgacttccttccctttatcttttttcattcttcccggtcctctgccctgatctgtgtaactcttatcttgggtacttgagcagacggtatattccagaggtgggaggtgggaggggaagggagaaatccaaaacaaagtgttcttgctctgacagaatattaatcttgtacgcttggattgagttatttaatttttttttcttttgcacatttttcttgtattaagattgctcttcccaagagccacaagttcctggttttagtaaacccagctgcctgcattgcctgggactagaggctggggaggctaccatgaaacaaaggtccctccctccctctgactctttgcccagacctctttagtttgggggatcctcctcactctcctgaagtgtctcaagtataccagtgggagtgcaggggaggagcacaggccttcagatggggcttcccacgtgtagctactgatcccatatttcctactcaccttccaaatggtgcgacccaacttcatttgtttacttgaaaattccccctcgaggttgagagaacctctgaggtggctgtattttctcctaagcttgagatagggggctgtggtccttcctttctcctgaggagaaagtccttgctctggtgacctgtaagttgcagaggagggtggagtgagagtgtcatgtattgggatagtcagggatccctgcctttggcctttcttcttcttcttcttcctcttccatagttggatcatgtatattttacttctaaaggagagaatgtcaaaaagttctgtatttttttatattctatatattaggtaggtcaatcttaattggtctcaagaggaagaactgtctgtcatttcggtaagtaggatactgtgaggaagaccaaaaagagatatggatgcttcctcgctcaggaggcctgagcttggtccttttcctctctgcttggattctggaccaccacctgggaccaaccttcagctctggaaccttcataaagcaggtcagcgtggcctgattgtcccaggacctgaagggagcaaggatggcctcagggcctggtgaagtctgctactctgtccttactgctgaacatcctgcttgtatcaggaaactcagaagcagtttgccttgtcaaattcaatctcaatggccattgtccacataactgatcacccatggctgcctctcctattatctattatcactgaaacttagtagcctgctttttttttttttttttagagctattgcgtatcttccctgtttgggatccttgtacctggtttgggttttcccttccttgtgacaattataatccagatgcctcttctttctgtttgaattacggtagtgcattgccttagtggcttgcctgtgcctctgggtggattacatatgatagtaaagcccacctgtttggatgggagtagaggaagttggtgtagaccagctgtggagctgaaggcacagtctgccccacccccacctccccactgtggttagtcagaggcatcctgctccaagctctgcttttccttcctctgaaacaatgccattcttgcttctattgctacacatctccttctggctcaggtgaaatccatgcccttctgcttatagacctaaagttcaggtacttattattggccattgatcttgaatttgccctctcctagtgctgcagtcccacttcaaagccattttctgaggaggatggtttaggtctggcaattgtccttgaaaaatcccacccatgttgtaccaccttggtgagtcatatgccactcatcagcttgggaatgatggctgccaactcccaatctcccaggaaggcagggggcagaatctttttttcacttggcctgctacctccattaaaaaaccattctcttacagtttaaaaaaaaaaaaaaaaaaaaagccttcccctacccaacctccgcccattgttctcttccaaagggcaatttagtaggatctactttgtacatctcaagtaagagttaagtccctgatacagggaccagtttcttagtgtaagacatacacatcctgcttgtccagctgttcctccaaaatctactttggcttcagctccgggtcctgtaccagatggaaaatgtttttggtgatctggctgctgcttaaagccagttttccctaagaactccaaaggctaaagtctactaggggcagagtgtgaggatagatttctaatcagagaaaagtggcctccaggagctttcatttatgtcttctccagaccaggttttcctgttatcttcctttaatcccctttcaaccaacaggtgaagttcttccagcccacagaggtagtaatatcatcttttctatctcctcctctcctttggccatgtaatgaagcaaaatattatttatttagcccaggcttgagagccactgtttgtggacagtcttcatctagattccataccctggcctaggcgaggtaaggctctctggttattgccaggatggagcccctctaccccagtctgctgtagggaataccctaattagttgaggcatgcttttggaatcctggcatgttggcatatggctggtctatcctttttaagatctctggttgggggtatctggatatggattaggagggacaaggagcctttttcttggctaatgttttccaatacttttttgaatggtgccagcccctccaggcatcccacccccaaatcatcatctttagtactaacagggtgtctggtcttagaagcctcccttcagatcccagctgaccctggtgactgcctggccttgatgttggctgcagccttctgatagaaccacatggattccacccacagctggccaggcttgttacatgggtcagggaatacaaatggcccccccccagggagcaggtgttggcctcagttttcagggacccttggtgttgctccttacctagagcccattaatctaccccatcaactctctgccatgaaagccatcttccaggagccctgttttttggagctgaactgcacagattatagctgctattgtacttaaataagggagaggaaaagaaggttctcaggcacagactttctatttttctcaagccaaaccagtttaaaatgtctagcagaatgaactgtatttccatttcttcatgtctacctgccttccccccacaccctaaagttgtacttgtttctagcaaactagaaggaaaagataggaaagcctggcactactaacctcacctctcatacacctctttgaaggccccagctcttttgttcaggcctctcttctcccctagactcactcagcttggtatccatcatcttgagcattcttcagtagattcatctagggttcagattccagactctcagctgaagacagggagccaatttcccccaggtccctgcaggtaatccagggaccccatagggagaacaggctgactggggcattaggaatgtttgtacctctctgcttccctggcagcctggggaagggtgcagggctcagtgcgctaaaccatggtaaacatcttcaatagaactaccctagaatttagtgagtgtgagactgagatattgctcagaataaatttattccatagccatttaggattgcatgttctggaccaaccttgtccagtatgttttctgtttgagctttttcattcttttgttaagccaacaagttgagaatttggccctgctgggatccatgtagtgggcactagctgctctttggccaaggccttcataaatgattcagtctctcattatctgtcctctagccccacaccctgatttagaccgtggcaaaggaagaacttgaggtcaagaccaaccaaatctgtgaattaaagctgttatttttttctctgcaagggcgctttgcttcaggtctgggctatgtgcagaacctaagcaggctgtgagagttagaagaggcagtattacatgttaggcccagaacaccatgggtgacttctgatgtccacattagctcgtacctgaaccctgttgctgaatgccagccctgttctcctgtaactattatatacgccatggcctggggggcattgaaggaagtaagctctcagagatcctaacactggctgggaacctctgactcagagcatgtctttaaagagtccacatctggccaggcgcggtggcacatgcctgtaatcccagcactttgggaggccgaggcgggtggatcacgaggtcaggagtttgagaccagcctggcaacatagtgaaaccccatctctaataaaaatacaaaaaattagctgggcgtggtggcaggcgcctgtaatcccagctacttgggaggctgagacaggagaatcacttgaacccaggaggcggaggttgcagtgagccaagatcatgccactgcactccagcttgggtgacagtgcgagactccatctcaaaaaaaaaaaaaaaaaaaaaaaaaccccgggggcctcttattgcgggggcgcgggaaaaaggggtttgacattggaccttggtccattagcgctgtttcccgggccccaggttttcttgttcccaggggggtaaattcgggcgggctcccctatagnggaggggcgaataaattacgacaacccaggtaactgtaatcgtctggatcacacaacaccaaataaccccacataacatagaaaaacaacgt

SEQ ID NO: 316031 - DNA, 6776 bp, Homo sapiens
  misc_feature (6684)..(6684): n is a, c, g, or t
cagatccgccatattgtctactgaaagctgccgctgaagctgccgccgttgcctccgccgccaagagtgagcgagcggacccgcgatggagaccatggcgagcccagggaaagacaattatcgaatgaagagctataagaacaatgctctaaaccctgaagaaatgagacgaagaagagaggaagagggcattcagctccggaagcagaagcgagagcaacaactttttaaacggagaaatgtggagctgattaatgaagaagctgccatgttcgatagtcttctcatggactcttatgtgagctctaccactggggagagtgtgatcacaagagagatggtggagatgctcttttctgatgattctgacctgcagttagcaaccacacagaaattccggaaactgctctccaaagagcctagtcctccaatagatgaagttatcaacactccaagagtggtggatcggttcgtggagtttctgaagaggaatgagaattgtacattacagtttgaagctgcctgggctctaacgaatattgcctctggaacctctcagcagaccaaaattgtcattgaagcaggggctgtccccatttttatagagctgcttaattcagactttgaggatgttcaggaacaggcagtctgggcactgggaaacatagctggagatagctctgtttgccgagattacgtcttgaactgttccatccttaatcctttgttaacactccttaccaagtccacacgactgacgatgacacggaatgcagtctgggccctgtcaaatctctgccgagggaaaaacccacccccagagtttgcaaaggtctctccttgtttgcctgtactgtctcgcctactcttcagcagcgactcggacttgctggcagatgcttgctgggccctttcttatctgtctgatggccccaatgagaagatccaggcagtcatagactccggagtctgccggagattggtagagctgctgatgcacaatgattacaaagtggcttctcctgccctgagagccgtgggtaacatcgtcactggggatgacatccagacccaggtcattcttaactgttcagccctaccttgccttctccacttgttgagcagtcccaaggagtcaatccggaaggaagcttgctggactatttcaaatattactgctggcaacagggctcaaatacaggctgttatagatgcaaatatcttccctgtgttgatcgaaatccttcagaaagcagagtttcgtacaaggaaagaggcagcctgggccatcaccaatgccacatcaggaggaacccctgagcagatcaggtacctggtctcactgggctgcatcaaacccctatgtgacttgctgactgtaatggattcgaagattgtgcaagtggccctcaatggactggagaacatcctgcggcttggagagcaagagggcaagcgcagtggctcaggggtcaatccttattgtggcctcatagaggaagcctatggccttcgacctcattgagcactactttggtgtagaagacgatgatagcagcctggctccccaagtcgatgaaacgcaacagcagttcatcttccagcagcctgaggcccccatggagggcttccagctataatatctgcctccagggaggggaggggatgggaagcaccaccagccagcggaagagcagccctctggtgggcgggaaaccagtgtccccaccatcagccaccacacacctctgctgccctggagactgtgctcttgacctgctccgcccccttccctggagggagcaccctctggacagacagaaccatctgaggctcacctttgggttttgtgacaagaaggggacgtgttgggtttttcttccttacactatattttggctgcacacatgtctttaacccaggagcccaggggtagacaaaggaggactaaggtaatcaatttgcacctttttttatttttattttttttctttttttcttcagtggtgacttccttccctttatcttttttcattcttcccggtcctctgccctgatctgtgtaactcttatcttgggtacttgagcagacggtatattccagaggtgggaggtgggaggggaagggagaaatccaaaacaaagtgttcttgctctgacagaatattaatcttgtacgcttggattgagttatttaatttttttttcttttgcacatttttcttgtattaagattgctcttcccaagagccacaagttcctggttttagtaaacccagctgcctgcattgcctgggactagaggctggggaggctaccatgaaacaaaggtccctccctccctctgactctttgcccagacctctttagtttgggggatcctcctcactctcctgaagtgtctcaagtataccagtgggagtgcaggggaggagcacaggccttcagatggggcttcccacgtgtagctactgatcccatatttcctactcaccttccaaatggtgcgacccaacttcatttgtttacttgaaaattccccctcgaggttgagagaacctctgaggtggctgtattttctcctaagcttgagatagggggctgtggtccttcctttctcctgaggagaaagtccttgctctggtgacctgtaagttgcagaggagggtggagtgagagtgtcatgtattgggatagtcagggatccctgcctttggcctttcttcttcttcttcttcctcttccatagttggatcatgtatattttacttctaaaggagagaatgtcaaaaagttctgtatttttttatattctatatattaggtaggtcaatcttaattggtctcaagaggaagaactgtctgtcatttcggtaagtaggatactgtgaggaagaccaaaaagagatatggatgcttcctcgctcaggaggcctgagcttggtccttttcctctctgcttggattctggaccaccacctgggaccaaccttcagctctggaaccttcataaagcaggtcagcgtggcctgattgtcccaggacctgaagggagcaaggatggcctcagggcctggtgaagtctgctactctgtccttactgctgaacatcctgcttgtatcaggaaactcagaagcagtttgccttgtcaaattcaatctcaatggccattgtccacataactgatcacccatggctgcctctcctattatctattatcactgaaacttagtagcctgctttttttttttttttttagagctattgcgtatcttccctgtttgggatccttgtacctggtttgggttttcccttccttgtgacaattataatccagatgcctcttctttctgtttgaattacggtagtgcattgccttagtggcttgcctgtgcctctgggtggattacatatgatagtaaagcccacctgtttggatgggagtagaggaagttggtgtagaccagctgtggagctgaaggcacagtctgccccacccccacctccccactgtggttagtcagaggcatcctgctccaagctctgcttttccttcctctgaaacaatgccattcttgcttctattgctacacatctccttctggctcaggtgaaatccatgcccttctgcttatagacctaaagttcaggtacttattattggccattgatcttgaatttgccctctcctagtgctgcagtcccacttcaaagccattttctgaggaggatggtttaggtctggcaattgtccttgaaaaatcccacccatgttgtaccaccttggtgagtcatatgccactcatcagcttgggaatgatggctgccaactcccaatctcccaggaaggcagggggcagaatctttttttcacttggcctgctacctccattaaaaaaccattctcttacagtttaaaaaaaaaaaaaaaaaaaaagccttcccctacccaacctccgcccattgttctcttccaaagggcaatttagtaggatctactttgtacatctcaagtaagagttaagtccctgatacagggaccagtttcttagtgtaagacatacacatcctgcttgtccagctgttcctccaaaatctactttggcttcagctccgggtcctgtaccagatggaaaatgtttttggtgatctggctgctgcttaaagccagttttccctaagaactccaaaggctaaagtctactaggggcagagtgtgaggatagatttctaatcagagaaaagtggcctccaggagctttcatttatgtcttctccagaccaggttttcctgttatcttcctttaatcccctttcaaccaacaggtgaagttcttccagcccacagaggtagtaatatcatcttttctatctcctcctctcctttggccatgtaatgaagcaaaatattatttatttagcccaggcttgagagccactgtttgtggacagtcttcatctagattccataccctggcctaggcgaggtaaggctctctggttattgccaggatggagcccctctaccccagtctgctgtagggaataccctaattagttgaggcatgcttttggaatcctggcatgttggcatatggctggtctatcctttttaagatctctggttgggggtatctggatatggattaggagggacaaggagcctttttcttggctaatgttttccaatacttttttgaatggtgccagcccctccaggcatcccacccccaaatcatcatctttagtactaacagggtgtctggtcttagaagcctcccttcagatcccagctgaccctggtgactgcctggccttgatgttggctgcagccttctgatagaaccacatggattccacccacagctggccaggcttgttacatgggtcagggaatacaaatggcccccccccagggagcaggtgttggcctcagttttcagggacccttggtgttgctccttacctagagcccattaatctaccccatcaactctctgccatgaaagccatcttccaggagccctgttttttggagctgaactgcacagattatagctgctattgtacttaaataagggagaggaaaagaaggttctcaggcacagactttctatttttctcaagccaaaccagtttaaaatgtctagcagaatgaactgtatttccatttcttcatgtctacctgccttccccccacaccctaaagttgtacttgtttctagcaaactagaaggaaaagataggaaagcctggcactactaacctcacctctcatacacctctttgaaggccccagctcttttgttcaggcctctcttctcccctagactcactcagcttggtatccatcatcttgagcattcttcagtagattcatctagggttcagattccagactctcagctgaagacagggagccaatttcccccaggtccctgcaggtaatccagggaccccatagggagaacaggctgactggggcattaggaatgtttgtacctctctgcttccctggcagcctggggaagggtgcagggctcagtgcgctaaaccatggtaaacatcttcaatagaactaccctagaatttagtgagtgtgagactgagatattgctcagaataaatttattccatagccatttaggattgcatgttctggaccaaccttgtccagtatgttttctgtttgagctttttcattcttttgttaagccaacaagttgagaatttggccctgctgggatccatgtagtgggcactagctgctctttggccaaggccttcataaatgattcagtctctcattatctgtcctctagccccacaccctgatttagaccgtggcaaaggaagaacttgaggtcaagaccaaccaaatctgtgaattaaagctgttatttttttctctgcaagggcgctttgcttcaggtctgggctatgtgcagaacctaagcaggctgtgagagttagaagaggcagtattacatgttaggcccagaacaccatgggaaaaggtttatgtagtgtatcttagtggcctgcctagctgcctctgggccaggctgacttctgatgtccacattagctcgtacctgaaccctgttgctgaatgccagccctgttctcctgtaactattatatacgccatggcctggggggcattgaaggaagtaagctctcagagatcctaacactggctgggaacctctgactcagagcatgtctttaaagagtccacatctggccaggcgcggtggcacatgcctgtaatcccagcactttgggaggccgaggcgggtggatcacgaggtcaggagtttgagaccagcctggcaacatagtgaaaccccatctctaataaaaatacaaaaaattagctgggcgtggtggcaggcgcctgtaatcccagctacttgggaggctgagacaggagaatcacttgaacccaggaggcggaggttgcagtgagccaagatcatgccactgcactccagcttgggtgacagtgcgagactccatctcaaaaaaaaaaaaaaaaaaaaaaaaaccccgggggcctcttattgcgggggcgcgggaaaaaggggtttgacattggaccttggtccattagcgctgtttcccgggccccaggttttcttgttcccaggggggtaaattcgggcgggctcccctatagnggaggggcgaataaattacgacaacccaggtaactgtaatcgtctggatcacacaacaccaaataaccccacataacatagaaaaacaacgt

SEQ ID NO: 316032 - DNA, 6845 bp, Homo sapiens
  misc_feature (6753)..(6753): n is a, c, g, or t
agctcagcatggctctcctcccagcttcactgtcagctgtgcttgaaggagaggctagcgtccaggacagcccaggctcagtcatgaaaagctatgtgtcagagaccatggcgagcccagggaaagacaattatcgaatgaagagctataagaacaatgctctaaaccctgaagaaatgagacgaagaagagaggaagagggcattcagctccggaagcagaagcgagagcaacaactttttaaacggagaaatgtggagctgattaatgaagaagctgccatgttcgatagtcttctcatggactcttatgtgagctctaccactggggagagtgtgatcacaagagagatggtggagatgctcttttctgatgattctgacctgcagttagcaaccacacagaaattccggaaactgctctccaaagagcctagtcctccaatagatgaagttatcaacactccaagagtggtggatcggttcgtggagtttctgaagaggaatgagaattgtacattacagtttgaagctgcctgggctctaacgaatattgcctctggaacctctcagcagaccaaaattgtcattgaagcaggggctgtccccatttttatagagctgcttaattcagactttgaggatgttcaggaacaggcagtctgggcactgggaaacatagctggagatagctctgtttgccgagattacgtcttgaactgttccatccttaatcctttgttaacactccttaccaagtccacacgactgacgatgacacggaatgcagtctgggccctgtcaaatctctgccgagggaaaaacccacccccagagtttgcaaaggtctctccttgtttgcctgtactgtctcgcctactcttcagcagcgactcggacttgctggcagatgcttgctgggccctttcttatctgtctgatggccccaatgagaagatccaggcagtcatagactccggagtctgccggagattggtagagctgctgatgcacaatgattacaaagtggcttctcctgccctgagagccgtgggtaacatcgtcactggggatgacatccagacccaggtcattcttaactgttcagccctaccttgccttctccacttgttgagcagtcccaaggagtcaatccggaaggaagcttgctggactatttcaaatattactgctggcaacagggctcaaatacaggctgttatagatgcaaatatcttccctgtgttgatcgaaatccttcagaaagcagagtttcgtacaaggaaagaggcagcctgggccatcaccaatgccacatcaggaggaacccctgagcagatcaggtacctggtctcactgggctgcatcaaacccctatgtgacttgctgactgtaatggattcgaagattgtgcaagtggccctcaatggactggagaacatcctgcggcttggagagcaagagggcaagcgcagtggctcaggggtcaatccttattgtggcctcatagaggaagcctatggcttggataaaattgagtttctccagagccacgagaaccaggagatctaccagaaggccttcgacctcattgagcactactttggtgtagaagacgatgatagcagcctggctccccaagtcgatgaaacgcaacagcagttcatcttccagcagcctgaggcccccatggagggcttccagctataatatctgcctccagggaggggaggggatgggaagcaccaccagccagcggaagagcagccctctggtgggcgggaaaccagtgtccccaccatcagccaccacacacctctgctgccctggagactgtgctcttgacctgctccgcccccttccctggagggagcaccctctggacagacagaaccatctgaggctcacctttgggttttgtgacaagaaggggacgtgttgggtttttcttccttacactatattttggctgcacacatgtctttaacccaggagcccaggggtagacaaaggaggactaaggtaatcaatttgcacctttttttatttttattttttttctttttttcttcagtggtgacttccttccctttatcttttttcattcttcccggtcctctgccctgatctgtgtaactcttatcttgggtacttgagcagacggtatattccagaggtgggaggtgggaggggaagggagaaatccaaaacaaagtgttcttgctctgacagaatattaatcttgtacgcttggattgagttatttaatttttttttcttttgcacatttttcttgtattaagattgctcttcccaagagccacaagttcctggttttagtaaacccagctgcctgcattgcctgggactagaggctggggaggctaccatgaaacaaaggtccctccctccctctgactctttgcccagacctctttagtttgggggatcctcctcactctcctgaagtgtctcaagtataccagtgggagtgcaggggaggagcacaggccttcagatggggcttcccacgtgtagctactgatcccatatttcctactcaccttccaaatggtgcgacccaacttcatttgtttacttgaaaattccccctcgaggttgagagaacctctgaggtggctgtattttctcctaagcttgagatagggggctgtggtccttcctttctcctgaggagaaagtccttgctctggtgacctgtaagttgcagaggagggtggagtgagagtgtcatgtattgggatagtcagggatccctgcctttggcctttcttcttcttcttcttcctcttccatagttggatcatgtatattttacttctaaaggagagaatgtcaaaaagttctgtatttttttatattctatatattaggtaggtcaatcttaattggtctcaagaggaagaactgtctgtcatttcggtaagtaggatactgtgaggaagaccaaaaagagatatggatgcttcctcgctcaggaggcctgagcttggtccttttcctctctgcttggattctggaccaccacctgggaccaaccttcagctctggaaccttcataaagcaggtcagcgtggcctgattgtcccaggacctgaagggagcaaggatggcctcagggcctggtgaagtctgctactctgtccttactgctgaacatcctgcttgtatcaggaaactcagaagcagtttgccttgtcaaattcaatctcaatggccattgtccacataactgatcacccatggctgcctctcctattatctattatcactgaaacttagtagcctgctttttttttttttttttagagctattgcgtatcttccctgtttgggatccttgtacctggtttgggttttcccttccttgtgacaattataatccagatgcctcttctttctgtttgaattacggtagtgcattgccttagtggcttgcctgtgcctctgggtggattacatatgatagtaaagcccacctgtttggatgggagtagaggaagttggtgtagaccagctgtggagctgaaggcacagtctgccccacccccacctccccactgtggttagtcagaggcatcctgctccaagctctgcttttccttcctctgaaacaatgccattcttgcttctattgctacacatctccttctggctcaggtgaaatccatgcccttctgcttatagacctaaagttcaggtacttattattggccattgatcttgaatttgccctctcctagtgctgcagtcccacttcaaagccattttctgaggaggatggtttaggtctggcaattgtccttgaaaaatcccacccatgttgtaccaccttggtgagtcatatgccactcatcagcttgggaatgatggctgccaactcccaatctcccaggaaggcagggggcagaatctttttttcacttggcctgctacctccattaaaaaaccattctcttacagtttaaaaaaaaaaaaaaaaaaaaagccttcccctacccaacctccgcccattgttctcttccaaagggcaatttagtaggatctactttgtacatctcaagtaagagttaagtccctgatacagggaccagtttcttagtgtaagacatacacatcctgcttgtccagctgttcctccaaaatctactttggcttcagctccgggtcctgtaccagatggaaaatgtttttggtgatctggctgctgcttaaagccagttttccctaagaactccaaaggctaaagtctactaggggcagagtgtgaggatagatttctaatcagagaaaagtggcctccaggagctttcatttatgtcttctccagaccaggttttcctgttatcttcctttaatcccctttcaaccaacaggtgaagttcttccagcccacagaggtagtaatatcatcttttctatctcctcctctcctttggccatgtaatgaagcaaaatattatttatttagcccaggcttgagagccactgtttgtggacagtcttcatctagattccataccctggcctaggcgaggtaaggctctctggttattgccaggatggagcccctctaccccagtctgctgtagggaataccctaattagttgaggcatgcttttggaatcctggcatgttggcatatggctggtctatcctttttaagatctctggttgggggtatctggatatggattaggagggacaaggagcctttttcttggctaatgttttccaatacttttttgaatggtgccagcccctccaggcatcccacccccaaatcatcatctttagtactaacagggtgtctggtcttagaagcctcccttcagatcccagctgaccctggtgactgcctggccttgatgttggctgcagccttctgatagaaccacatggattccacccacagctggccaggcttgttacatgggtcagggaatacaaatggcccccccccagggagcaggtgttggcctcagttttcagggacccttggtgttgctccttacctagagcccattaatctaccccatcaactctctgccatgaaagccatcttccaggagccctgttttttggagctgaactgcacagattatagctgctattgtacttaaataagggagaggaaaagaaggttctcaggcacagactttctatttttctcaagccaaaccagtttaaaatgtctagcagaatgaactgtatttccatttcttcatgtctacctgccttccccccacaccctaaagttgtacttgtttctagcaaactagaaggaaaagataggaaagcctggcactactaacctcacctctcatacacctctttgaaggccccagctcttttgttcaggcctctcttctcccctagactcactcagcttggtatccatcatcttgagcattcttcagtagattcatctagggttcagattccagactctcagctgaagacagggagccaatttcccccaggtccctgcaggtaatccagggaccccatagggagaacaggctgactggggcattaggaatgtttgtacctctctgcttccctggcagcctggggaagggtgcagggctcagtgcgctaaaccatggtaaacatcttcaatagaactaccctagaatttagtgagtgtgagactgagatattgctcagaataaatttattccatagccatttaggattgcatgttctggaccaaccttgtccagtatgttttctgtttgagctttttcattcttttgttaagccaacaagttgagaatttggccctgctgggatccatgtagtgggcactagctgctctttggccaaggccttcataaatgattcagtctctcattatctgtcctctagccccacaccctgatttagaccgtggcaaaggaagaacttgaggtcaagaccaaccaaatctgtgaattaaagctgttatttttttctctgcaagggcgctttgcttcaggtctgggctatgtgcagaacctaagcaggctgtgagagttagaagaggcagtattacatgttaggcccagaacaccatgggaaaaggtttatgtagtgtatcttagtggcctgcctagctgcctctgggccaggctgacttctgatgtccacattagctcgtacctgaaccctgttgctgaatgccagccctgttctcctgtaactattatatacgccatggcctggggggcattgaaggaagtaagctctcagagatcctaacactggctgggaacctctgactcagagcatgtctttaaagagtccacatctggccaggcgcggtggcacatgcctgtaatcccagcactttgggaggccgaggcgggtggatcacgaggtcaggagtttgagaccagcctggcaacatagtgaaaccccatctctaataaaaatacaaaaaattagctgggcgtggtggcaggcgcctgtaatcccagctacttgggaggctgagacaggagaatcacttgaacccaggaggcggaggttgcagtgagccaagatcatgccactgcactccagcttgggtgacagtgcgagactccatctcaaaaaaaaaaaaaaaaaaaaaaaaaccccgggggcctcttattgcgggggcgcgggaaaaaggggtttgacattggaccttggtccattagcgctgtttcccgggccccaggttttcttgttcccaggggggtaaattcgggcgggctcccctatagnggaggggcgaataaattacgacaacccaggtaactgtaatcgtctggatcacacaacaccaaataaccccacataacatagaaaaacaacgt

SEQ ID NO: 316033 - DNA, 6977 bp, Homo sapiens
  misc_feature (6885)..(6885): n is a, c, g, or t
cagatccgccatattgtctactgaaagctgccgctgaagctgccgccgttgcctccgccgccaagagtgagcgagcggacccgcgatggagattgggtcttgcttagttgcctaggctggttgcaaactcctggcctcaagcaatcctcctgcctcggcctcctaaagtgctagaattataggtatgagccatcgtgcctggccctgagagcccctttgatttcagaattccagagaccatggcgagcccagggaaagacaattatcgaatgaagagctataagaacaatgctctaaaccctgaagaaatgagacgaagaagagaggaagagggcattcagctccggaagcagaagcgagagcaacaactttttaaacggagaaatgtggagctgattaatgaagaagctgccatgttcgatagtcttctcatggactcttatgtgagctctaccactggggagagtgtgatcacaagagagatggtggagatgctcttttctgatgattctgacctgcagttagcaaccacacagaaattccggaaactgctctccaaagagcctagtcctccaatagatgaagttatcaacactccaagagtggtggatcggttcgtggagtttctgaagaggaatgagaattgtacattacagtttgaagctgcctgggctctaacgaatattgcctctggaacctctcagcagaccaaaattgtcattgaagcaggggctgtccccatttttatagagctgcttaattcagactttgaggatgttcaggaacaggcagtctgggcactgggaaacatagctggagatagctctgtttgccgagattacgtcttgaactgttccatccttaatcctttgttaacactccttaccaagtccacacgactgacgatgacacggaatgcagtctgggccctgtcaaatctctgccgagggaaaaacccacccccagagtttgcaaaggtctctccttgtttgcctgtactgtctcgcctactcttcagcagcgactcggacttgctggcagatgcttgctgggccctttcttatctgtctgatggccccaatgagaagatccaggcagtcatagactccggagtctgccggagattggtagagctgctgatgcacaatgattacaaagtggcttctcctgccctgagagccgtgggtaacatcgtcactggggatgacatccagacccaggtcattcttaactgttcagccctaccttgccttctccacttgttgagcagtcccaaggagtcaatccggaaggaagcttgctggactatttcaaatattactgctggcaacagggctcaaatacaggctgttatagatgcaaatatcttccctgtgttgatcgaaatccttcagaaagcagagtttcgtacaaggaaagaggcagcctgggccatcaccaatgccacatcaggaggaacccctgagcagatcaggtacctggtctcactgggctgcatcaaacccctatgtgacttgctgactgtaatggattcgaagattgtgcaagtggccctcaatggactggagaacatcctgcggcttggagagcaagagggcaagcgcagtggctcaggggtcaatccttattgtggcctcatagaggaagcctatggcttggataaaattgagtttctccagagccacgagaaccaggagatctaccagaaggccttcgacctcattgagcactactttggtgtagaagacgatgatagcagcctggctccccaagtcgatgaaacgcaacagcagttcatcttccagcagcctgaggcccccatggagggcttccagctataatatctgcctccagggaggggaggggatgggaagcaccaccagccagcggaagagcagccctctggtgggcgggaaaccagtgtccccaccatcagccaccacacacctctgctgccctggagactgtgctcttgacctgctccgcccccttccctggagggagcaccctctggacagacagaaccatctgaggctcacctttgggttttgtgacaagaaggggacgtgttgggtttttcttccttacactatattttggctgcacacatgtctttaacccaggagcccaggggtagacaaaggaggactaaggtaatcaatttgcacctttttttatttttattttttttctttttttcttcagtggtgacttccttccctttatcttttttcattcttcccggtcctctgccctgatctgtgtaactcttatcttgggtacttgagcagacggtatattccagaggtgggaggtgggaggggaagggagaaatccaaaacaaagtgttcttgctctgacagaatattaatcttgtacgcttggattgagttatttaatttttttttcttttgcacatttttcttgtattaagattgctcttcccaagagccacaagttcctggttttagtaaacccagctgcctgcattgcctgggactagaggctggggaggctaccatgaaacaaaggtccctccctccctctgactctttgcccagacctctttagtttgggggatcctcctcactctcctgaagtgtctcaagtataccagtgggagtgcaggggaggagcacaggccttcagatggggcttcccacgtgtagctactgatcccatatttcctactcaccttccaaatggtgcgacccaacttcatttgtttacttgaaaattccccctcgaggttgagagaacctctgaggtggctgtattttctcctaagcttgagatagggggctgtggtccttcctttctcctgaggagaaagtccttgctctggtgacctgtaagttgcagaggagggtggagtgagagtgtcatgtattgggatagtcagggatccctgcctttggcctttcttcttcttcttcttcctcttccatagttggatcatgtatattttacttctaaaggagagaatgtcaaaaagttctgtatttttttatattctatatattaggtaggtcaatcttaattggtctcaagaggaagaactgtctgtcatttcggtaagtaggatactgtgaggaagaccaaaaagagatatggatgcttcctcgctcaggaggcctgagcttggtccttttcctctctgcttggattctggaccaccacctgggaccaaccttcagctctggaaccttcataaagcaggtcagcgtggcctgattgtcccaggacctgaagggagcaaggatggcctcagggcctggtgaagtctgctactctgtccttactgctgaacatcctgcttgtatcaggaaactcagaagcagtttgccttgtcaaattcaatctcaatggccattgtccacataactgatcacccatggctgcctctcctattatctattatcactgaaacttagtagcctgctttttttttttttttttagagctattgcgtatcttccctgtttgggatccttgtacctggtttgggttttcccttccttgtgacaattataatccagatgcctcttctttctgtttgaattacggtagtgcattgccttagtggcttgcctgtgcctctgggtggattacatatgatagtaaagcccacctgtttggatgggagtagaggaagttggtgtagaccagctgtggagctgaaggcacagtctgccccacccccacctccccactgtggttagtcagaggcatcctgctccaagctctgcttttccttcctctgaaacaatgccattcttgcttctattgctacacatctccttctggctcaggtgaaatccatgcccttctgcttatagacctaaagttcaggtacttattattggccattgatcttgaatttgccctctcctagtgctgcagtcccacttcaaagccattttctgaggaggatggtttaggtctggcaattgtccttgaaaaatcccacccatgttgtaccaccttggtgagtcatatgccactcatcagcttgggaatgatggctgccaactcccaatctcccaggaaggcagggggcagaatctttttttcacttggcctgctacctccattaaaaaaccattctcttacagtttaaaaaaaaaaaaaaaaaaaaagccttcccctacccaacctccgcccattgttctcttccaaagggcaatttagtaggatctactttgtacatctcaagtaagagttaagtccctgatacagggaccagtttcttagtgtaagacatacacatcctgcttgtccagctgttcctccaaaatctactttggcttcagctccgggtcctgtaccagatggaaaatgtttttggtgatctggctgctgcttaaagccagttttccctaagaactccaaaggctaaagtctactaggggcagagtgtgaggatagatttctaatcagagaaaagtggcctccaggagctttcatttatgtcttctccagaccaggttttcctgttatcttcctttaatcccctttcaaccaacaggtgaagttcttccagcccacagaggtagtaatatcatcttttctatctcctcctctcctttggccatgtaatgaagcaaaatattatttatttagcccaggcttgagagccactgtttgtggacagtcttcatctagattccataccctggcctaggcgaggtaaggctctctggttattgccaggatggagcccctctaccccagtctgctgtagggaataccctaattagttgaggcatgcttttggaatcctggcatgttggcatatggctggtctatcctttttaagatctctggttgggggtatctggatatggattaggagggacaaggagcctttttcttggctaatgttttccaatacttttttgaatggtgccagcccctccaggcatcccacccccaaatcatcatctttagtactaacagggtgtctggtcttagaagcctcccttcagatcccagctgaccctggtgactgcctggccttgatgttggctgcagccttctgatagaaccacatggattccacccacagctggccaggcttgttacatgggtcagggaatacaaatggcccccccccagggagcaggtgttggcctcagttttcagggacccttggtgttgctccttacctagagcccattaatctaccccatcaactctctgccatgaaagccatcttccaggagccctgttttttggagctgaactgcacagattatagctgctattgtacttaaataagggagaggaaaagaaggttctcaggcacagactttctatttttctcaagccaaaccagtttaaaatgtctagcagaatgaactgtatttccatttcttcatgtctacctgccttccccccacaccctaaagttgtacttgtttctagcaaactagaaggaaaagataggaaagcctggcactactaacctcacctctcatacacctctttgaaggccccagctcttttgttcaggcctctcttctcccctagactcactcagcttggtatccatcatcttgagcattcttcagtagattcatctagggttcagattccagactctcagctgaagacagggagccaatttcccccaggtccctgcaggtaatccagggaccccatagggagaacaggctgactggggcattaggaatgtttgtacctctctgcttccctggcagcctggggaagggtgcagggctcagtgcgctaaaccatggtaaacatcttcaatagaactaccctagaatttagtgagtgtgagactgagatattgctcagaataaatttattccatagccatttaggattgcatgttctggaccaaccttgtccagtatgttttctgtttgagctttttcattcttttgttaagccaacaagttgagaatttggccctgctgggatccatgtagtgggcactagctgctctttggccaaggccttcataaatgattcagtctctcattatctgtcctctagccccacaccctgatttagaccgtggcaaaggaagaacttgaggtcaagaccaaccaaatctgtgaattaaagctgttatttttttctctgcaagggcgctttgcttcaggtctgggctatgtgcagaacctaagcaggctgtgagagttagaagaggcagtattacatgttaggcccagaacaccatgggaaaaggtttatgtagtgtatcttagtggcctgcctagctgcctctgggccaggctgacttctgatgtccacattagctcgtacctgaaccctgttgctgaatgccagccctgttctcctgtaactattatatacgccatggcctggggggcattgaaggaagtaagctctcagagatcctaacactggctgggaacctctgactcagagcatgtctttaaagagtccacatctggccaggcgcggtggcacatgcctgtaatcccagcactttgggaggccgaggcgggtggatcacgaggtcaggagtttgagaccagcctggcaacatagtgaaaccccatctctaataaaaatacaaaaaattagctgggcgtggtggcaggcgcctgtaatcccagctacttgggaggctgagacaggagaatcacttgaacccaggaggcggaggttgcagtgagccaagatcatgccactgcactccagcttgggtgacagtgcgagactccatctcaaaaaaaaaaaaaaaaaaaaaaaaaccccgggggcctcttattgcgggggcgcgggaaaaaggggtttgacattggaccttggtccattagcgctgtttcccgggccccaggttttcttgttcccaggggggtaaattcgggcgggctcccctatagnggaggggcgaataaattacgacaacccaggtaactgtaatcgtctggatcacacaacaccaaataaccccacataacatagaaaaacaacgt

SEQ ID NO: 316034 - DNA, 5469 bp, Homo sapiens
cagatccgccatattgtctactgaaagctgccgctgaagctgccgccgttgcctccgccgccaagagtgagcgagcggacccgcgatggagaccatggcgagcccagggaaagacaattatcgaatgaagagctataagaacaatgctctaaaccctgaagaaatgagacgaagaagagaggaagagggcattcagctccggaagcagaagcgagagcaacaactttttaaacggagaaatgtggagctgattaatgaagaagctgccatgttcgatagtcttctcatggactcttatgtgagctctaccactggggagagtgtgatcacaagagagatggtggagatgctcttttctgatgattctgacctgcagttagcaaccacacagaaattccggaaactgctctccaaagagcctagtcctccaatagatgaagttatcaacactccaagagtggtggatcggttcgtggagtttctgaagaggaatgagaattgtacattacagtttgaagctgcctgggctctaacgaatattgcctctggaacctctcagcagaccaaaattgtcattgaagcaggggctgtccccatttttatagagctgcttaattcagactttgaggatgttcaggaacaggcagtctgggcactgggaaacatagctggagatagctctgtttgccgagattacgtcttgaactgttccatccttaatcctttgttaacactccttaccaagtccacacgactgacgatgacacggaatgcagtctgggccctgtcaaatctctgccgagggaaaaacccacccccagagtttgcaaaggtctctccttgtttgcctgtactgtctcgcctactcttcagcagcgactcggacttgctggcagatgcttgctgggccctttcttatctgtctgatggccccaatgagaagatccaggcagtcatagactccggagtctgccggagattggtagagctgctgatgcacaatgattacaaagtggcttctcctgccctgagagccgtgggtaacatcgtcactggggatgacatccagacccaggtcattcttaactgttcagccctaccttgccttctccacttgttgagcagtcccaaggagtcaatccggaaggaagcttgctggactatttcaaatattactgctggcaacagggctcaaatacaggctgttatagatgcaaatatcttccctgtgttgatcgaaatccttcagaaagcagagtttcgtacaaggaaagaggcagcctgggccatcaccaatgccacatcaggaggaacccctgagcagatcaggtacctggtctcactgggctgcatcaaacccctatgtgacttgctgactgtaatggattcgaagattgtgcaagtggccctcaatggactggagaacatcctgcggcttggagagcaagagggcaagcgcagtggctcaggggtcaatccttattgtggcctcatagaggaagcctatggcttggataaaattgagtttctccagagccacgagaaccaggagatctaccagaaggccttcgacctcattgagcactactttggtgtagaagacgatgatagcagcctggctccccaagtcgatgaaacgcaacagcagttcatcttccagcagcctgaggcccccatggagggcttccagctataatatctgcctccagggaggggaggggatgggaagcaccaccagccagcggaagagcagccctctggtgggcgggaaaccagtgtccccaccatcagccaccacacacctctgctgccctggagactgtgctcttgacctgctccgcccccttccctggagggagcaccctctggacagacagaaccatctgaggctcacctttgggttttgtgacaagaaggggacgtgttgggtttttcttccttacactatattttggctgcacacatgtctttaacccaggagcccaggggtagacaaaggaggactaaggtaatcaatttgcacctttttttatttttattttttttctttttttcttcagtggtgacttccttccctttatcttttttcattcttcccggtcctctgccctgatctgtgtaactcttatcttgggtacttgagcagacggtatattccagaggtgggaggtgggaggggaagggagaaatccaaaacaaagtgttcttgctctgacagaatattaatcttgtacgcttggattgagttatttaatttttttttcttttgcacatttttcttgtattaagattgctcttcccaagagccacaagttcctggttttagtaaacccagctgcctgcattgcctgggactagaggctggggaggctaccatgaaacaaaggtccctccctccctctgactctttgcccagacctctttagtttgggggatcctcctcactctcctgaagtgtctcaagtataccagtgggagtgcaggggaggagcacaggccttcagatggggcttcccacgtgtagctactgatcccatatttcctactcaccttccaaatggtgcgacccaacttcatttgtttacttgaaaattccccctcgaggttgagagaacctctgaggtggctgtattttctcctaagcttgagatagggggctgtggtccttcctttctcctgaggagaaagtccttgctctggtgacctgtaagttgcagaggagggtggagtgagagtgtcatgtattgggatagtcagggatccctgcctttggcctttcttcttcttcttcttcctcttccatagttggatcatgtatattttacttctaaaggagagaatgtcaaaaagttctgtatttttttatattctatatattaggtaggtcaatcttaattggtctcaagaggaagaactgtctgtcatttcggtaagtaggatactgtgaggaagaccaaaaagagatatggatgcttcctcgctcaggaggcctgagcttggtccttttcctctctgcttggattctggaccaccacctgggaccaaccttcagctctggaaccttcataaagcaggtcagcgtggcctgattgtcccaggacctgaagggagcaaggatggcctcagggcctggtgaagtctgctactctgtccttactgctgaacatcctgcttgtatcaggaaactcagaagcagtttgccttgtcaaattcaatctcaatggccattgtccacataactgatcacccatggctgcctctcctattatctattatcactgaaacttagtagcctgctttttttttttttttttagagctattgcgtatcttccctgtttgggatccttgtacctggtttgggttttcccttccttgtgacaattataatccagatgcctcttctttctgtttgaattacggtagtgcattgccttagtggcttgcctgtgcctctgggtggattacatatgatagtaaagcccacctgtttggatgggagtagaggaagttggtgtagaccagctgtggagctgaaggcacagtctgccccacccccacctccccactgtggttagtcagaggcatcctgctccaagctctgcttttccttcctctgaaacaatgccattcttgcttctattgctacacatctccttctggctcaggtgaaatccatgcccttctgcttatagacctaaagttcaggtacttattattggccattgatcttgaatttgccctctcctagtgctgcagtcccacttcaaagccattttctgaggaggatggtttaggtctggcaattgtccttgaaaaatcccacccatgttgtaccaccttggtgagtcatatgccactcatcagcttgggaatgatggctgccaactcccaatctcccaggaaggcagggggcagaatctttttttcacttggcctgctacctccattaaaaaaccattctcttacagtttaaaaaaaaaaaaaaaaaaaaagccttcccctacccaacctccgcccattgttctcttccaaagggcaatttagtaggatctactttgtacatctcaagtaagagttaagtccctgatacagggaccagtttcttagtgtaagacatacacatcctgcttgtccagctgttcctccaaaatctactttggcttcagctccgggtcctgtaccagatggaaaatgtttttggtgatctggctgctgcttaaagccagttttccctaagaactccaaaggctaaagtctactaggggcagagtgtgaggatagatttctaatcagagaaaagtggcctccaggagctttcatttatgtcttctccagaccaggttttcctgttatcttcctttaatcccctttcaaccaacaggtgaagttcttccagcccacagaggtagtaatatcatcttttctatctcctcctctcctttggccatgtaatgaagcaaaatattatttatttagcccaggcttgagagccactgtttgtggacagtcttcatctagattccataccctggcctaggcgaggtaaggctctctggttattgccaggatggagcccctctaccccagtctgctgtagggaataccctaattagttgaggcatgcttttggaatcctggcatgttggcatatggctggtctatcctttttaagatctctggttgggggtatctggatatggattaggagggacaaggagcctttttcttggctaatgttttccaatacttttttgaatggtgccagcccctccaggcatcccacccccaaatcatcatctttagtactaacagggtgtctggtcttagaagcctcccttcagatcccagctgaccctggtgactgcctggccttgatgttggctgcagccttctgatagaaccacatggattccacccacagctggccaggcttgttacatgggtcagggaatacaaatggcccccccccagggagcaggtgttggcctcagttttcagggacccttggtgttgctccttacctagagcccattaatctaccccatcaactctctgccatgaaagccatcttccaggagccctgttttttggagctgaactgcacagattatagctgctattgtacttaaataagggagaggaaaagaaggttctcaggcacagactttctatttttctcaagccaaaccagtttaaaatgtctagcagaatgaactgtatttccatttcttcatgtctacctgccttccccccacaccctaaagttgtacttgtttctagcaaactagaaggaaaagataggaaagcctggcactactaacctcacctctcatacacctctttgaaggccccagctcttttgttcaggcctcctggaagatggctttcatggcagagagttgatggggtagattaatgggctctaggtaaggagcaacaccaagggtccctctgcaatgaacccacg

SEQ ID NO: 316035 - DNA, 4934 bp, Homo sapiens
cagatccgccatattgtctactgaaagctgccgctgaagctgccgccgttgcctccgccgccaagagtgagcgagcggacccgcgatggagaccatggcgagcccagggaaagacaattatcgaatgaagagctataagaacaatgctctaaaccctgaagaaatgagacgaagaagagaggaagagggcattcagctccggaagcagaagcgagagcaacaactttttaaacggagaaatgtggagctgattaatgaagaagctgccatgttcgatagtcttctcatggactcttatgtgagctctaccactggggagagtgtgatcacaagagagatggtggagatgctcttttctgatgattctgacctgcagttagcaaccacacagaaattccggaaactgctctccaaagagcctagtcctccaatagatgaagttatcaacactccaagagtggtggatcggttcgtggagtttctgaagaggaatgagaattgtacattacagtttgaagctgcctgggctctaacgaatattgcctctggaacctctcagcagaccaaaattgtcattgaagcaggggctgtccccatttttatagagctgcttaattcagactttgaggatgttcaggaacaggcagtctgggcactgggaaacatagctggagatagctctgtttgccgagattacgtcttgaactgttccatccttaatcctttgttaacactccttaccaagtccacacgactgacgatgacacggaatgcagtctgggccctgtcaaatctctgccgagggaaaaacccacccccagagtttgcaaaggtctctccttgtttgcctgtactgtctcgcctactcttcagcagcgactcggacttgctggcagatgcttgctgggccctttcttatctgtctgatggccccaatgagaagatccaggcagtcatagactccggagtctgccggagattggtagagctgctgatgcacaatgattacaaagtggcttctcctgccctgagagccgtgggtaacatcgtcactggggatgacatccagacccaggtcattcttaactgttcagccctaccttgccttctccacttgttgagcagtcccaaggagtcaatccggaaggaagcttgctggactatttcaaatattactgctggcaacagggctcaaatacaggctgttatagatgcaaatatcttccctgtgttgatcgaaatccttcagaaagcagagtttcgtacaaggaaagaggcagcctgggccatcaccaatgccacatcaggaggaacccctgagcagatcaggtacctggtctcactgggctgcatcaaacccctatgtgacttgctgactgtaatggattcgaagattgtgcaagtggccctcaatggactggagaacatcctgcggcttggagagcaagagggcaagcgcagtggctcaggggtcaatccttattgtggcctcatagaggaagcctatggcttggataaaattgagtttctccagagccacgagaaccaggagatctaccagaaggccttcgacctcattgagcactactttggtgtagaagacgatgatagcagcctggctccccaagtcgatgaaacgcaacagcagttcatcttccagcagcctgaggcccccatggagggcttccagctataatatctgcctccagggaggggaggggatgggaagcaccaccagccagcggaagagcagccctctggtgggcgggaaaccagtgtccccaccatcagccaccacacacctctgctgccctggagactgtgctcttgacctgctccgcccccttccctggagggagcaccctctggacagacagaaccatctgaggctcacctttgggttttgtgacaagaaggggacgtgttgggtttttcttccttacactatattttggctgcacacatgtctttaacccaggagcccaggggtagacaaaggaggactaaggtaatcaatttgcacctttttttatttttattttttttctttttttcttcagtggtgacttccttccctttatcttttttcattcttcccggtcctctgccctgatctgtgtaactcttatcttgggtacttgagcagacggtatattccagaggtgggaggtgggaggggaagggagaaatccaaaacaaagtgttcttgctctgacagaatattaatcttgtacgcttggattgagttatttaatttttttttcttttgcacatttttcttgtattaagattgctcttcccaagagccacaagttcctggttttagtaaacccagctgcctgcattgcctgggactagaggctggggaggctaccatgaaacaaaggtccctccctccctctgactctttgcccagacctctttagtttgggggatcctcctcactctcctgaagtgtctcaagtataccagtgggagtgcaggggaggagcacaggccttcagatggggcttcccacgtgtagctactgatcccatatttcctactcaccttccaaatggtgcgacccaacttcatttgtttacttgaaaattccccctcgaggttgagagaacctctgaggtggctgtattttctcctaagcttgagatagggggctgtggtccttcctttctcctgaggagaaagtccttgctctggtgacctgtaagttgcagaggagggtggagtgagagtgtcatgtattgggatagtcagggatccctgcctttggcctttcttcttcttcttcttcctcttccatagttggatcatgtatattttacttctaaaggagagaatgtcaaaaagttctgtatttttttatattctatatattaggtaggtcaatcttaattggtctcaagaggaagaactgtctgtcatttcggtaagtaggatactgtgaggaagaccaaaaagagatatggatgcttcctcgctcaggaggcctgagcttggtccttttcctctctgcttggattctggaccaccacctgggaccaaccttcagctctggaaccttcataaagcaggtcagcgtggcctgattgtcccaggacctgaagggagcaaggatggcctcagggcctggtgaagtctgctactctgtccttactgctgaacatcctgcttgtatcaggaaactcagaagcagtttgccttgtcaaattcaatctcaatggccattgtccacataactgatcacccatggctgcctctcctattatctattatcactgaaacttagtagcctgctttttttttttttttttagagctattgcgtatcttccctgtttgggatccttgtacctggtttgggttttcccttccttgtgacaattataatccagatgcctcttctttctgtttgaattacggtagtgcattgccttagtggcttgcctgtgcctctgggtggattacatatgatagtaaagcccacctgtttggatgggagtagaggaagttggtgtagaccagctgtggagctgaaggcacagtctgccccacccccacctccccactgtggttagtcagaggcatcctgctccaagctctgcttttccttcctctgaaacaatgccattcttgcttctattgctacacatctccttctggctcaggtgaaatccatgcccttctgcttatagacctaaagttcaggtacttattattggccattgatcttgaatttgccctctcctagtgctgcagtcccacttcaaagccattttctgaggaggatggtttaggtctggcaattgtccttgaaaaatcccacccatgttgtaccaccttggtgagtcatatgccactcatcagcttgggaatgatggctgccaactcccaatctcccaggaaggcagggggcagaatctttttttcacttggcctgctacctccattaaaaaaccattctcttacagtttaaaaaaaaaaaaaaaaaaaaagccttcccctacccaacctccgcccattgttctcttccaaagggcaatttagtaggatctactttgtacatctcaagtaagagttaagtccctgatacagggaccagtttcttagtgtaagacatacacatcctgcttgtccagctgttcctccaaaatctactttggcttcagctccgggtcctgtaccagatggaaaatgtttttggtgatctggctgctgcttaaagccagttttccctaagaactccaaaggctaaagtctactaggggcagagtgtgaggatagatttctaatcagagaaaagtggcctccaggagctttcatttatgtcttctccagaccaggttttcctgttatcttcctttaatcccctttcaaccaacaggtgaagttcttccagcccacagaggtagtaatatcatcttttctatctcctcctctcctttggccatgtaatgaagcaaaatattatttatttagcccaggcttgagagccactgtttgtggacagtcttcatctagattccataccctggcctaggcgaggtaaggctctctggttattgccaggatggagcccctctaccccagtctgctgtagggaataccctaattagttgaggcatgcttttggaatcctggcatgttggcatatggctggtctatcctttttaagatctctggttgggggtatctggatatggattaggagggacaaggagcctttttcttggctaatgttttccaatacttttttgaatggtgccagcccctccaggcatcccacccccaaatcatcatctttagtactaacagggtgtctggtcttagaagcctcccttcagatcccagctgaccctggtgactgcctggccagctgtgggtggaatccatgtggttctatcagaaggctgcagccaacatcaaggccaggca

SEQ ID NO: 316036 - DNA, 3974 bp, Homo sapiens
cagatccgccatattgtctactgaaagctgccgctgaagctgccgccgttgcctccgccgccaagagtgagcgagcggacccgcgatggagaccatggcgagcccagggaaagacaattatcgaatgaagagctataagaacaatgctctaaaccctgaagaaatgagacgaagaagagaggaagagggcattcagctccggaagcagaagcgagagcaacaactttttaaacggagaaatgtggagctgattaatgaagaagctgccatgttcgatagtcttctcatggactcttatgtgagctctaccactggggagagtgtgatcacaagagagatggtggagatgctcttttctgatgattctgacctgcagttagcaaccacacagaaattccggaaactgctctccaaagagcctagtcctccaatagatgaagttatcaacactccaagagtggtggatcggttcgtggagtttctgaagaggaatgagaattgtacattacagtttgaagctgcctgggctctaacgaatattgcctctggaacctctcagcagaccaaaattgtcattgaagcaggggctgtccccatttttatagagctgcttaattcagactttgaggatgttcaggaacaggcagtctgggcactgggaaacatagctggagatagctctgtttgccgagattacgtcttgaactgttccatccttaatcctttgttaacactccttaccaagtccacacgactgacgatgacacggaatgcagtctgggccctgtcaaatctctgccgagggaaaaacccacccccagagtttgcaaaggtctctccttgtttgcctgtactgtctcgcctactcttcagcagcgactcggacttgctggcagatgcttgctgggccctttcttatctgtctgatggccccaatgagaagatccaggcagtcatagactccggagtctgccggagattggtagagctgctgatgcacaatgattacaaagtggcttctcctgccctgagagccgtgggtaacatcgtcactggggatgacatccagacccaggtcattcttaactgttcagccctaccttgccttctccacttgttgagcagtcccaaggagtcaatccggaaggaagcttgctggactatttcaaatattactgctggcaacagggctcaaatacaggctgttatagatgcaaatatcttccctgtgttgatcgaaatccttcagaaagcagagtttcgtacaaggaaagaggcagcctgggccatcaccaatgccacatcaggaggaacccctgagcagatcaggtacctggtctcactgggctgcatcaaacccctatgtgacttgctgactgtaatggattcgaagattgtgcaagtggccctcaatggactggagaacatcctgcggcttggagagcaagagggcaagcgcagtggctcaggggtcaatccttattgtggcctcatagaggaagcctatggcttggataaaattgagtttctccagagccacgagaaccaggagatctaccagaaggccttcgacctcattgagcactactttggtgtagaagacgatgatagcagcctggctccccaagtcgatgaaacgcaacagcagttcatcttccagcagcctgaggcccccatggagggcttccagctataatatctgcctccagggaggggaggggatgggaagcaccaccagccagcggaagagcagccctctggtgggcgggaaaccagtgtccccaccatcagccaccacacacctctgctgccctggagactgtgctcttgacctgctccgcccccttccctggagggagcaccctctggacagacagaaccatctgaggctcacctttgggttttgtgacaagaaggggacgtgttgggtttttcttccttacactatattttggctgcacacatgtctttaacccaggagcccaggggtagacaaaggaggactaaggtaatcaatttgcacctttttttatttttattttttttctttttttcttcagtggtgacttccttccctttatcttttttcattcttcccggtcctctgccctgatctgtgtaactcttatcttgggtacttgagcagacggtatattccagaggtgggaggtgggaggggaagggagaaatccaaaacaaagtgttcttgctctgacagaatattaatcttgtacgcttggattgagttatttaatttttttttcttttgcacatttttcttgtattaagattgctcttcccaagagccacaagttcctggttttagtaaacccagctgcctgcattgcctgggactagaggctggggaggctaccatgaaacaaaggtccctccctccctctgactctttgcccagacctctttagtttgggggatcctcctcactctcctgaagtgtctcaagtataccagtgggagtgcaggggaggagcacaggccttcagatggggcttcccacgtgtagctactgatcccatatttcctactcaccttccaaatggtgcgacccaacttcatttgtttacttgaaaattccccctcgaggttgagagaacctctgaggtggctgtattttctcctaagcttgagatagggggctgtggtccttcctttctcctgaggagaaagtccttgctctggtgacctgtaagttgcagaggagggtggagtgagagtgtcatgtattgggatagtcagggatccctgcctttggcctttcttcttcttcttcttcctcttccatagttggatcatgtatattttacttctaaaggagagaatgtcaaaaagttctgtatttttttatattctatatattaggtaggtcaatcttaattggtctcaagaggaagaactgtctgtcatttcggtaagtaggatactgtgaggaagaccaaaaagagatatggatgcttcctcgctcaggaggcctgagcttggtccttttcctctctgcttggattctggaccaccacctgggaccaaccttcagctctggaaccttcataaagcaggtcagcgtggcctgattgtcccaggacctgaagggagcaaggatggcctcagggcctggtgaagtctgctactctgtccttactgctgaacatcctgcttgtatcaggaaactcagaagcagtttgccttgtcaaattcaatctcaatggccattgtccacataactgatcacccatggctgcctctcctattatctattatcactgaaacttagtagcctgctttttttttttttttttagagctattgcgtatcttccctgtttgggatccttgtacctggtttgggttttcccttccttgtgacaattataatccagatgcctcttctttctgtttgaattacggtagtgcattgccttagtggcttgcctgtgcctctgggtggattacatatgatagtaaagcccacctgtttggatgggagtagaggaagttggtgtagaccagctgtggagctgaaggcacagtctgccccacccccacctccccactgtggttagtcagaggcatcctgctccaagctctgcttttccttcctctgaaacaatgccattcttgcttctattgctacacatctccttctggctcaggtgaaatccatgcccttctgcttatagacctaaagttcaggtacttattattggccattgatcttgaatttgccctctcctagtgctgcagtcccacttcaaagccattttctgaggaggatggtttaggtctggcaattgtccttgaaaaatcccacccatgttgtaccaccttggtgagtcatatgccactcatcagcttgggaatgatggctgccaactcccaatctcccaggaaggcagggggcagaatctttttttcacttggcctgctacctccattaaaaaaccattctcttacagttta

SEQ ID NO: 316037 - DNA, 2196 bp, Homo sapiens
cagatccgccatattgtctactgaaagctgccgctgaagctgccgccgttgcctccgccgccaagagtgagcgagcggacccgcgatggagaccatggcgagcccagggaaagacaattatcgaatgaagagctataagaacaatgctctaaaccctgaagaaatgagacgaagaagagaggaagagggcattcagctccggaagcagaagcgagagcaacaactttttaaacggagaaatgtggagctgattaatgaagaagctgccatgttcgatagtcttctcatggactcttatgtgagctctaccactggggagagtgtgatcacaagagagatggtggagatgctcttttctgatgattctgacctgcagttagcaaccacacagaaattccggaaactgctctccaaagagcctagtcctccaatagatgaagttatcaacactccaagagtggtggatcggttcgtggagtttctgaagaggaatgagaattgtacattacagtttgaagctgcctgggctctaacgaatattgcctctggaacctctcagcagaccaaaattgtcattgaagcaggggctgtccccatttttatagagctgcttaattcagactttgaggatgttcaggaacaggcagtctgggcactgggaaacatagctggagatagctctgtttgccgagattacgtcttgaactgttccatccttaatcctttgttaacactccttaccaagtccacacgactgacgatgacacggaatgcagtctgggccctgtcaaatctctgccgagggaaaaacccacccccagagtttgcaaaggtctctccttgtttgcctgtactgtctcgcctactcttcagcagcgactcggacttgctggcagatgcttgctgggccctttcttatctgtctgatggccccaatgagaagatccaggcagtcatagactccggagtctgccggagattggtagagctgctgatgcacaatgattacaaagtggcttctcctgccctgagagccgtgggtaacatcgtcactggggatgacatccagacccaggtcattcttaactgttcagccctaccttgccttctccacttgttgagcagtcccaaggagtcaatccggaaggaagcttgctggactatttcaaatattactgctggcaacagggctcaaatacaggctgttatagatgcaaatatcttccctgtgttgatcgaaatccttcagaaagcagagtttcgtacaaggaaagaggcagcctgggccatcaccaatgccacatcaggaggaacccctgagcagatcaggtacctggtctcactgggctgcatcaaacccctatgtgacttgctgactgtaatggattcgaagattgtgcaagtggccctcaatggactggagaacatcctgcggcttggagagcaagagggcaagcgcagtggctcaggggtcaatccttattgtggcctcatagaggaagcctatggcttggataaaattgagtttctccagagccacgagaaccaggagatctaccagaaggccttcgacctcattgagcactactttggtgtagaagacgatgatagcagcctggctccccaagtcgatgaaacgcaacagcagttcatcttccagcagcctgaggcccccatggagggcttccagctataatatctgcctccagggaggggaggggatgggaagcaccaccagccagcggaagagcagccctctggtgggcgggaaaccagtgtccccaccatcagccaccacacacctctgctgccctggagactgtgctcttgacctgctccgcccccttccctggagggagcaccctctggacagacagaaccatctgaggctcacctttgggttttgtgacaagaaggggacgtgttgggtttttcttccttacactatattttggctgcacacatgtctttaacccaggagcccaggggtagacaaaggaggactaagggcccctgggtagacagacacagcttgatttcagagcagacataggcgaagaaaacatggcattgagtgtgctgagtccagacaaatgttatttatatacacatccaaatttgaagagaaaatgtatttctttaggtttcaaacactgtaatagatataaagcaaaaataaaaacctgttgcaaagtt

SEQ ID NO: 316038 - DNA, 1442 bp, Homo sapiens
  misc_feature (1350)..(1350): n is a, c, g, or t
tagctgtctgctaccccctgggttaatgcatatcgtcgatccacgcgctcgggttcagattccagactctcagctgaagacagggagccaatttcccccaggtccctgcaggtaatccagggaccccatagggagaacaggctgactggggcattaggaatgtttgtacctctctgcttccctggcagcctggggaagggtgcagggctcagtgcgctaaaccatggtaaacatcttcaatagaactaccctagaatttagtgagtgtgagactgagatattgctcagaataaatttattccatagccatttaggattgcatgttctggaccaaccttgtccagtatgttttctgtttgagctttttcattcttttgttaagccaacaagttgagaatttggccctgctgggatccatgtagtgggcactagctgctctttggccaaggccttcataaatgattcagtctctcattatctgtcctctagccccacaccctgatttagaccgtggcaaaggaagaacttgaggtcaagaccaaccaaatctgtgaattaaagctgttatttttttctctgcaagggcgctttgcttcaggtctgggctatgtgcagaacctaagcaggctgtgagagttagaagaggcagtattacatgttaggcccagaacaccatgggaaaaggtttatgtagtgtatcttagtggcctgcctagctgcctctgggccaggctgacttctgatgtccacattagctcgtacctgaaccctgttgctgaatgccagccctgttctcctgtaactattatatacgccatggcctggggggcattgaaggaagtaagctctcagagatcctaacactggctgggaacctctgactcagagcatgtctttaaagagtccacatctggccaggcgcggtggcacatgcctgtaatcccagcactttgggaggccgaggcgggtggatcacgaggtcaggagtttgagaccagcctggcaacatagtgaaaccccatctctaataaaaatacaaaaaattagctgggcgtggtggcaggcgcctgtaatcccagctacttgggaggctgagacaggagaatcacttgaacccaggaggcggaggttgcagtgagccaagatcatgccactgcactccagcttgggtgacagtgcgagactccatctcaaaaaaaaaaaaaaaaaaaaaaaaaccccgggggcctcttattgcgggggcgcgggaaaaaggggtttgacattggaccttggtccattagcgctgtttcccgggccccaggttttcttgttcccaggggggtaaattcgggcgggctcccctatagnggaggggcgaataaattacgacaacccaggtaactgtaatcgtctggatcacacaacaccaaataaccccacataacatagaaaaacaacgt

SEQ ID NO: 316039 - DNA, 410 bp, Homo sapiens
gtgagtgaggaaaccacgcagtagggttcttgggctcagggagtgtcggggcctgggatttggcgagagcctgtctccggtctgcggaagatgtctgcatcccctctagctaggtctgaggggaaaagtcaggccgggagtgcccctcttgccagttttgggccgagctagggcccgtgctggaagcagtcctttggtgctggtttcggggacaccttggcacgcctggagccccccacatggtggcctcgggcaggagcccacgtgttcctgggaggtagaaaggggcctactctctgtcctgcgcccagactggggctgggggacgggctcccggcggcaggcctgggcggcgctaaggtagctttctcctgggttgtgtttggccaacgcgtgtcttgactagattc

SEQ ID NO: 316040 - DNA, 3759 bp, Homo sapiens
  misc_feature (16)..(16): n is a, c, g, or t
caggaactgggccagntccggtcccttccttttggggctctcactctggaggatggggtggatgggagaaaaaaccgggaagatcctgacggagttcctccagttctatgaagaccagtatggcgtggctctcttcaacagcatgcgccatgagattgagggcacggggctgccgcaggcccagctgctctggcgcaaggtgccactggacgagcgcatcgtcttctcggggaacctcttccagcaccaggaggacagcaagaagtggagaaaccgcttcagcctcgtgccccacaactacgggctggtgctctacgaaaacaaagcggcctatgagcggcaggtcccaccacgagccgtcatcaacagtgcaggctacaaaatcctcacgtccgtggaccaatacctggagctcattggcaactccttaccagggaccacggcaaagtcgggcagtgcccccatcctcaagtgccccacacagttcccgctcatcctctggcatccttatgcgcgtcactactacttctgcatgatgacagaagccgagcaggacaagtggcaggctgtgctgcaggactgcatccggcactgcaacaatggaatccctgaggactccaaggtagagggccctgcgttcacagatgccatccgcatgtaccgacagtccaaggagctgtacggcacctgggagatgctgtgtgggaacgaggtgcagatcctgagcaacctggtgatggaggagctgggccctgagctgaaggcagagctcggcccgcggctgaaggggaaaccgcaggagcggcagcggcagtggatccagatctcggacgccgtgtaccacatggtgtacgagcaggccaaggcgcgcttcgaggaggtgctgtccaaggtgcagcaggtgcagccggccatgcaggccgtcatccgaactgacatggaccaaattatcacctccaaggagcaccttgccagcaagatccgagccttcatcctccccaaggcagaggtgtgcgtgcggaaccatgtccagccctacatcccatccatcctggaggccctgatggtccccaccagccagggcttcactgaggtgcgagatgtcttcttcaaggaggtcacggacatgaacctgaacgtcatcaacgagggcggcattgacaagctgggcgagtacatggagaagctgtcccggctggcgtaccaccccctgaagatgcagagctgctatgagaagatggagtcgctgcgactggacgggctgcagcagcgatttgatgtgtccagcacgtccgtgttcaagcagcgagcccagatccacatgcgggagcaaatggacaatgccgtgtatacgttcgagaccctcctgcaccaggagctggggaaggggcccaccaaggaggagctgtgcaagtccatccagcgggtcctggagcgggtgctgaagaaatacgactacgacagcagctctgtgcggaagaggttcttccgggaggcgctgctgcagatcagcatcccgttcctgctcaagaagctggcccctacctgcaagtcggagctgccccggttccaggagctgatcttcgaggactttgccaggttcatcctggtggaaaacacgtacgaggaggtggtgctgcagaccgtcatgaaggacatcctgcaggctgtgaaggaggccgcggtgcagaggaagcacaacctctaccgggacagcatggtcatgcacaacagcgaccccaacctgcacctgctggccgagggcgcccccatcgactggggcgaggagtacagcaacagcggcgggggcggcagccccagccccagcaccccggagtcagccaccctctcggaaaagcgacggcgcgccaagcaggtggtctctgtggtccaggatgaggaggtggggctgccctttgaggctagccctgagtcaccaccacctgcgtccccggacggtgtcactgagatccgaggcctgctggcccaaggtctgcggcctgagagccccccaccagccggccccctgctcaacggggcccccgctggggagagtccccagcctaaggccgcccccgaggcctcctcgccgcctgcctcacccctccagcatctcctgcctggaaaggctgtggaccttgggccccccaagcccagcgaccaggagactggagagcaggtgtccagccccagcagccaccccgccctccacaccaccaccgaggacagtgcaggggtgcagactgagttctaggccagtgggtccctgactgctgcacatggcacaggccgttcccttccggacccaggcaggctcagctctggggagggcaccctggtctgtgccttgtgggtggaggcggggcagggctgtgtggcaccgccagggagcgggcccacctgagtcactttattgggttcagtcaacactttcttgctccctgttttctcttctgtgggatgatctcagatgcaggggctggttttggggttttcctgcttgtgccaagggctggacactgctggggggctggaaagcccctcccttcctgtccttctgtggcctccatcccctcatgggtgctgccatccttcctggagagagggaggtgaaagctggtgtgagcccagtgggttcccgcccactcacccaggagctggctgggccaggaccgggagagggagcactgctgccctcctggccctgctccttccgcagttaggggtggaccgagcctcgctttccccactgttctggagggaaggggaaggagggggtcttcaggctggagccaggctgggggtgctgggtggagagatgagatttagggggtgcctcatggggtgggcaggcctggggtgaaatgagaaaggcccagaacgtgcaggtctgcggaggggaagtgtcctgagtgaaggaggggacccccatcctgggggatgctgggagtgagtgagtggagatggctgagtgagggttatggggagcctgaggttttatgggcctgtgtatccccttctcccggccccagcctgcctccctcctgcccgcctggcccacaggtctccctctggtccctgtccctctggtggttggggatggagcggcagcaaggggtgtaatggggctgggttctgtcttctacaggccaccccgaggtcctcagtggttgcctggggagccggacggggctcctgaggggtacaggttgggtgggccctccctgagggtctggggtcaggctttggcctctgctgcctctcagtcaccaagtcacctccctctgaaaatccagtcccttctttggatgtccttgtgagtcactctgggcctggctgtcgtccctcctcagcttcttgttcctgggacaagggtcaagccaggatgggcccaggcctgggatcccccaccccaggacccccaggccccctcccctgctgctttgcggggggcagggcagaaatggactccttttgggtccccgaggtggggtcccctcccagccctgcatcctccgtgccgtagacctgctccccagaggaggggccttgacccacaggacgtgtggtggcgcctggcactcagggacccccagctgccccagccctggtctctggcgcatctcttccctcttgtcccgaagatctgcgcctctagtgccttttgaggggttcccatcatccctccctgatattgtattgaaaatattatgcacactgttcatgcttctactaatcaataaacgctttatttaaaag

SEQ ID NO: 316041 - DNA, 559 bp, Homo sapiens
gccaaggcggccggctggagggacggggcccgaccgggagcggagccggagcggaagccgcagccgggcggcgggagcggcgggagcgggggaagcagggcgggccgggctccatggcgccagcggcgtccgcctgagcagcgcgggcaacagcggcggcgtcggccggatcgggccgcgacacctcctggccatgggggacgtgctgtccacgcacctggacgacgcccggcgccagcacatcgcagaaaaaaccgggaagatcctgacggagttcctccagttctatgaagaccagtatggcgtggctctcttcaacagcatgcgccatgagattgagggcacggggctgccgcaggcccagctgctctggcgcaagcactcagggacccccagctgccccagccctggtctctggcgcatctcttccctcttgtcccgaagatctgcgcctctagtgccttttgaggggttcccatcatccctccctgatattgtattgaaaatattatgcacactgttcatgcttctactaatcaataaacgctttatttaaaag

SEQ ID NO: 316042 - DNA, 458 bp, Homo sapiens
acgggaattcgtgctggtgctacgggaattcgtgctggtgctaagggacttcgtgctggtgctaagggaattcgtgctggtgctctacgaaaacaaagcggcctatgagcggcaggtcccaccacgagccgtcatcaacagtgcaggctacaaaatcctcacgtccgtggaccaatacctggagctcattggcaactccttaccaggtaaaggagcacccatcccaggccacaatgccctgcacaggcatctggagctggccaggggaggggtggccctgagcccattgctttcagccccatgtttgcggagagaccaactaggcttagagctgtggatggagacctcattgtttgcctttcgcatctccctaagtccttgagagcctcctggaagatgttcagtgaccttccctcgtaaacctgtgggtcagcactgtgttcgtcaggagttactct

SEQ ID NO: 316043 - DNA, 142 bp, Homo sapiens
tccacggttggctactagtccacggttggccactagtccacggttggctactagtccacggcctggcttgtgggaatgcagagagaaacaggccagctgagcgctctccagcccctggcctggcttgtgcctcctcaaccta

SEQ ID NO: 316044 - DNA, 3939 bp, Homo sapiens
gccaaggcggccggctggagggacggggcccgaccgggagcggagccggagcggaagccgcagccgggcggcgggagcggcgggagcgggggaagcagggcgggccgggctccatggcgccagcggcgtccgcctgagcagcgcgggcaacagcggcggcgtcggccggatcgggccgcgacacctcctggccatgggggacgtgctgtccacgcacctggacgacgcccggcgccagcacatcgcagaaaaaaccgggaagatcctgacggagttcctccagttctatgaagaccagtatggcgtggctctcttcaacagcatgcgccatgagattgagggcacggggctgccgcaggcccagctgctctggcgcaaggtgccactggacgagcgcatcgtcttctcggggaacctcttccagcaccaggaggacagcaagaagtggagaaaccgcttcagcctcgtgccccacaactacgggctggtgctctacgaaaacaaagcggcctatgagcggcaggtcccaccacgagccgtcatcaacagtgcaggctacaaaatcctcacgtccgtggaccaatacctggagctcattggcaactccttaccagggaccacggcaaagtcgggcagtgcccccatcctcaagtgccccacacagttcccgctcatcctctggcatccttatgcgcgtcactactacttctgcatgatgacagaagccgagcaggacaagtggcaggctgtgctgcaggactgcatccggcactgcaacaatggaatccctgaggactccaaggtagagggccctgcgttcacagatgccatccgcatgtaccgacagtccaaggagctgtacggcacctgggagatgctgtgtgggaacgaggtgcagatcctgagcaacctggtgatggaggagctgggccctgagctgaaggcagagctcggcccgcggctgaaggggaaaccgcaggagcggcagcggcagtggatccagatctcggacgccgtgtaccacatggtgtacgagcaggccaaggcgcgcttcgaggaggtgctgtccaaggtgcagcaggtgcagccggccatgcaggccgtcatccgaactgacatggaccaaattatcacctccaaggagcaccttgccagcaagatccgagccttcatcctccccaaggcagaggtgtgcgtgcggaaccatgtccagccctacatcccatccatcctggaggccctgatggtccccaccagccagggcttcactgaggtgcgagatgtcttcttcaaggaggtcacggacatgaacctgaacgtcatcaacgagggcggcattgacaagctgggcgagtacatggagaagctgtcccggctggcgtaccaccccctgaagatgcagagctgctatgagaagatggagtcgctgcgactggacgggctgcagcagcgatttgatgtgtccagcacgtccgtgttcaagcagcgagcccagatccacatgcgggagcaaatggacaatgccgtgtatacgttcgagaccctcctgcaccaggagctggggaaggggcccaccaaggaggagctgtgcaagtccatccagcgggtcctggagcgggtgctgaagaaatacgactacgacagcagctctgtgcggaagaggttcttccgggaggcgctgctgcagatcagcatcccgttcctgctcaagaagctggcccctacctgcaagtcggagctgccccggttccaggagctgatcttcgaggactttgccaggttcatcctggtggaaaacacgtacgaggaggtggtgctgcagaccgtcatgaaggacatcctgcaggctgtgaaggaggccgcggtgcagaggaagcacaacctctaccgggacagcatggtcatgcacaacagcgaccccaacctgcacctgctggccgagggcgcccccatcgactggggcgaggagtacagcaacagcggcgggggcggcagccccagccccagcaccccggagtcagccaccctctcggaaaagcgacggcgcgccaagcaggtggtctctgtggtccaggatgaggaggtggggctgccctttgaggctagccctgagtcaccaccacctgcgtccccggacggtgtcactgagatccgaggcctgctggcccaaggtctgcggcctgagagccccccaccagccggccccctgctcaacggggcccccgctggggagagtccccagcctaaggccgcccccgaggcctcctcgccgcctgcctcacccctccagcatctcctgcctggaaaggctgtggaccttgggccccccaagcccagcgaccaggagactggagagcaggtgtccagccccagcagccaccccgccctccacaccaccaccgaggacagtgcaggggtgcagactgagttctaggccagtgggtccctgactgctgcacatggcacaggccgttcccttccggacccaggcaggctcagctctggggagggcaccctggtctgtgccttgtgggtggaggcggggcagggctgtgtggcaccgccagggagcgggcccacctgagtcactttattgggttcagtcaacactttcttgctccctgttttctcttctgtgggatgatctcagatgcaggggctggttttggggttttcctgcttgtgccaagggctggacactgctggggggctggaaagcccctcccttcctgtccttctgtggcctccatcccctcatgggtgctgccatccttcctggagagagggaggtgaaagctggtgtgagcccagtgggttcccgcccactcacccaggagctggctgggccaggaccgggagagggagcactgctgccctcctggccctgctccttccgcagttaggggtggaccgagcctcgctttccccactgttctggagggaaggggaaggagggggtcttcaggctggagccaggctgggggtgctgggtggagagatgagatttagggggtgcctcatggggtgggcaggcctggggtgaaatgagaaaggcccagaacgtgcaggtctgcggaggggaagtgtcctgagtgaaggaggggacccccatcctgggggatgctgggagtgagtgagtggagatggctgagtgagggttatggggagcctgaggttttatgggcctgtgtatccccttctcccggccccagcctgcctccctcctgcccgcctggcccacaggtctccctctggtccctgtccctctggtggttggggatggagcggcagcaaggggtgtaatggggctgggttctgtcttctacaggccaccccgaggtcctcagtggttgcctggggagccggacggggctcctgaggggtacaggttgggtgggccctccctgagggtctggggtcaggctttggcctctgctgcctctcagtcaccaagtcacctccctctgaaaatccagtcccttctttggatgtccttgtgagtcactctgggcctggctgtcgtccctcctcagcttcttgttcctgggacaagggtcaagccaggatgggcccaggcctgggatcccccaccccaggacccccaggccccctcccctgctgctttgcggggggcagggcagaaatggactccttttgggtccccgaggtggggtcccctcccagccctgcatcctccgtgccgtagacctgctccccagaggaggggccttgacccacaggacgtgtggtggcgcctggcactcagggacccccagctgccccagccctggtctctggcgcatctcttccctcttgtcccgaagatctgcgcctctagtgccttttgaggggttcccatcatccctccctgatattgtattgaaaatattatgcacactgttcatgcttctactaatcaataaacgctttatttaaaag

SEQ ID NO: 316045 - DNA, 4375 bp, Homo sapiens
gccaaggcggccggctggagggacggggcccgaccgggagcggagccggagcggaagccgcagccgggcggcgggagcggcgggagcgggggaagcagggcgggccgggctccatggcgccagcggcgtccgcctgagcagcgcgggcaacagcggcggcgtcggccggatcgggccgcgacacctcctggccatgggggacgtgctgtccacgcacctggacgacgcccggcgccagcacatcgcagaaaaaaccgggaagatcctgacggagttcctccagttctatgaagaccagtatggcgtggctctcttcaacagcatgcgccatgagattgagggcacggggctgccgcaggcccagctgctctggcgcaaggtgccactggacgagcgcatcgtcttctcggggaacctcttccagcaccaggaggacagcaagaagtggagaaaccgcttcagcctcgtgccccacaactacgggctggtgctctacgaaaacaaagcggcctatgagcggcaggtcccaccacgagccgtcatcaacagtgcaggctacaaaatcctcacgtccgtggaccaatacctggagctcattggcaactccttaccagggaccacggcaaagtcgggcagtgcccccatcctcaagtgccccacacagttcccgctcatcctctggcatccttatgcgcgtcactactacttctgcatgatgacagaagccgagcaggacaagtggcaggctgtgctgcaggactgcatccggcactgcaacaatggaatccctgaggactccaaggtagagggccctgcgttcacagatgccatccgcatgtaccgacagtccaaggagctgtacggcacctgggagatgctgtgtgggaacgaggtgcagatcctgagcaacctggtgatggaggagctgggccctgagctgaaggcagagctcggcccgcggctgaaggggaaaccgcaggagcggcagcggcagtggatccagatctcggacgccgtgtaccacatggtgtacgagcaggccaaggcgcgcttcgaggaggtgctgtccaaggtgcagcaggtgcagccggccatgcaggccgtcatccgaactgacatggaccaaattatcacctccaaggagcaccttgccagcaagatccgagccttcatcctccccaaggcagaggtgtgcgtgcggaaccatgtccagccctacatcccatccatcctggaggccctgatggtccccaccagccagggcttcactgaggtgcgagatgtcttcttcaaggaggtcacggacatgaacctgaacgtcatcaacgagggcggcattgacaagctgggcgagtacatggagaagctgtcccggctggcgtaccaccccctgaagatgcagagctgctatgagaagatggagtcgctgcgactggacgggctgcagcagcgatttgatgtgtccagcacgtccgtgttcaagcagcgagcccagatccacatgcgggagcaaatggacaatgccgtgtatacgttcgagaccctcctgcaccaggagctggggaaggggcccaccaaggaggagctgtgcaagtccatccagcgggtcctggagcgggtgctgaagaaatacgactacgacagcagctctgtgcggaagaggttcttccgggaggcgctgctgcagatcagcatcccgttcctgctcaagaagctggcccctacctgcaagtcggagctgccccggttccaggagctgatcttcgaggactttgccaggttcatcctggtggaaaacacgtacgaggaggtggtgctgcagaccgtcatgaaggacatcctgcagggtggctccacccgacggggtggggactgttgccaggaggatgctgggggcgcagctgagaagtggtggcagctgagggggtcagctaaggctcaaagaaaagcccagacttgcacctggggtctgggtgaagcccactcttcgctgtgtggcctccggagcagccttagccttgcgtctctgtgctttagtttcttctcgcgtccttggctttgctgggagggtcagaggagtgattagatgacatgtggtcagcagcctgggcctggagatagcatcacggccttgctgctttcagcaacgaggcctggaatgagtcacatcccaaccacagacccccaaggcgggatgagacgggtcttctttgagcagagtccagcacaggggcggctgtgggatcagtgctgtgtcctgacccttcccctgtggccctgtagctgtgaaggaggccgcggtgcagaggaagcacaacctctaccgggacagcatggtcatgcacaacagcgaccccaacctgcacctgctggccgagggcgcccccatcgactggggcgaggagtacagcaacagcggcgggggcggcagccccagccccagcaccccggagtcagccaccctctcggaaaagcgacggcgcgccaagcaggtggtctctgtggtccaggatgaggaggtggggctgccctttgaggctagccctgagtcaccaccacctgcgtccccggacggtgtcactgagatccgaggcctgctggcccaaggtctgcggcctgagagccccccaccagccggccccctgctcaacggggcccccgctggggagagtccccagcctaaggccgcccccgaggcctcctcgccgcctgcctcacccctccagcatctcctgcctggaaaggctgtggaccttgggccccccaagcccagcgaccaggagactggagagcaggtgtccagccccagcagccaccccgccctccacaccaccaccgaggacagtgcaggggtgcagactgagttctaggccagtgggtccctgactgctgcacatggcacaggccgttcccttccggacccaggcaggctcagctctggggagggcaccctggtctgtgccttgtgggtggaggcggggcagggctgtgtggcaccgccagggagcgggcccacctgagtcactttattgggttcagtcaacactttcttgctccctgttttctcttctgtgggatgatctcagatgcaggggctggttttggggttttcctgcttgtgccaagggctggacactgctggggggctggaaagcccctcccttcctgtccttctgtggcctccatcccctcatgggtgctgccatccttcctggagagagggaggtgaaagctggtgtgagcccagtgggttcccgcccactcacccaggagctggctgggccaggaccgggagagggagcactgctgccctcctggccctgctccttccgcagttaggggtggaccgagcctcgctttccccactgttctggagggaaggggaaggagggggtcttcaggctggagccaggctgggggtgctgggtggagagatgagatttagggggtgcctcatggggtgggcaggcctggggtgaaatgagaaaggcccagaacgtgcaggtctgcggaggggaagtgtcctgagtgaaggaggggacccccatcctgggggatgctgggagtgagtgagtggagatggctgagtgagggttatggggagcctgaggttttatgggcctgtgtatccccttctcccggccccagcctgcctccctcctgcccgcctggcccacaggtctccctctggtccctgtccctctggtggttggggatggagcggcagcaaggggtgtaatggggctgggttctgtcttctacaggccaccccgaggtcctcagtggttgcctggggagccggacggggctcctgaggggtacaggttgggtgggccctccctgagggtctggggtcaggctttggcctctgctgcctctcagtcaccaagtcacctccctctgaaaatccagtcccttctttggatgtccttgtgagtcactctgggcctggctgtcgtccctcctcagcttcttgttcctgggacaagggtcaagccaggatgggcccaggcctgggatcccccaccccaggacccccaggccccctcccctgctgctttgcggggggcagggcagaaatggactccttttgggtccccgaggtggggtcccctcccagccctgcatcctccgtgccgtagacctgctccccagaggaggggccttgacccacaggacgtgtggtggcgcctggcactcagggacccccagctgccccagccctggtctctggcgcatctcttccctcttgtcccgaagatctgcgcctctagtgccttttgaggggttcccatcatccctccctgatattgtattgaaaatattatgcacactgttcatgcttctactaatcaataaacgctttatttaaaag

SEQ ID NO: 316046 - DNA, 2822 bp, Homo sapiens
catccctcatccagtggatgcctcatccagtggcatgccctcatccagtggcatgccctcatccagtggcatgtcctcatccagtggcatgccctcatccagtggccctcatccagttccatgccctcatccagtgtcatgccctcatccagtggcatcccctcatccagtggcaaggaggtcacggacatgaacctgaacgtcatcaacgagggcggcattgacaagctgggcgagtacatggagaagctgtcccggctggcgtaccaccccctgaagatgcagagctgctatgagaagatggagtcgctgcgactggacgggctgcagcagcgatttgatgtgtccagcacgtccgtgttcaagcagcgagcccagatccacatgcgggagcaaatggacaatgccgtgtatacgttcgagaccctcctgcaccaggagctggggaaggggcccaccaaggaggagctgtgcaagtccatccagcgggtcctggagcgggtgctgaagaaatacgactacgacagcagctctgtgcggaagaggttcttccgggaggcgctgctgcagatcagcatcccgttcctgctcaagaagctggcccctacctgcaagtcggagctgccccggttccaggagctgatcttcgaggactttgccaggttcatcctggtggaaaacacgtacgaggaggtggtgctgcagaccgtcatgaaggacatcctgcaggctgtgaaggaggccgcggtgcagaggaagcacaacctctaccgggacagcatggtcatgcacaacagcgaccccaacctgcacctgctggccgagggcgcccccatcgactggggcgaggagtacagcaacagcggcgggggcggcagccccagccccagcaccccggagtcagccaccctctcggaaaagcgacggcgcgccaagcaggtggtctctgtggtccaggatgaggaggtggggctgccctttgaggctagccctgagtcaccaccacctgcgtccccggacggtgtcactgagatccgaggcctgctggcccaaggtctgcggcctgagagccccccaccagccggccccctgctcaacggggcccccgctggggagagtccccagcctaaggccgcccccgaggcctcctcgccgcctgcctcacccctccagcatctcctgcctggaaaggctgtggaccttgggccccccaagcccagcgaccaggagactggagagcaggtgtccagccccagcagccaccccgccctccacaccaccaccgaggacagtgcaggggtgcagactgagttctaggccagtgggtccctgactgctgcacatggcacaggccgttcccttccggacccaggcaggctcagctctggggagggcaccctggtctgtgccttgtgggtggaggcggggcagggctgtgtggcaccgccagggagcgggcccacctgagtcactttattgggttcagtcaacactttcttgctccctgttttctcttctgtgggatgatctcagatgcaggggctggttttggggttttcctgcttgtgccaagggctggacactgctggggggctggaaagcccctcccttcctgtccttctgtggcctccatcccctcatgggtgctgccatccttcctggagagagggaggtgaaagctggtgtgagcccagtgggttcccgcccactcacccaggagctggctgggccaggaccgggagagggagcactgctgccctcctggccctgctccttccgcagttaggggtggaccgagcctcgctttccccactgttctggagggaaggggaaggagggggtcttcaggctggagccaggctgggggtgctgggtggagagatgagatttagggggtgcctcatggggtgggcaggcctggggtgaaatgagaaaggcccagaacgtgcaggtctgcggaggggaagtgtcctgagtgaaggaggggacccccatcctgggggatgctgggagtgagtgagtggagatggctgagtgagggttatggggagcctgaggttttatgggcctgtgtatccccttctcccggccccagcctgcctccctcctgcccgcctggcccacaggtctccctctggtccctgtccctctggtggttggggatggagcggcagcaaggggtgtaatggggctgggttctgtcttctacaggccaccccgaggtcctcagtggttgcctggggagccggacggggctcctgaggggtacaggttgggtgggccctccctgagggtctggggtcaggctttggcctctgctgcctctcagtcaccaagtcacctccctctgaaaatccagtcccttctttggatgtccttgtgagtcactctgggcctggctgtcgtccctcctcagcttcttgttcctgggacaagggtcaagccaggatgggcccaggcctgggatcccccaccccaggacccccaggccccctcccctgctgctttgcggggggcagggcagaaatggactccttttgggtccccgaggtggggtcccctcccagccctgcatcctccgtgccgtagacctgctccccagaggaggggccttgacccacaggacgtgtggtggcgcctggcactcagggacccccagctgccccagccctggtctctggcgcatctcttccctcttgtcccgaagatctgcgcctctagtgccttttgaggggttcccatcatccctccctgatattgtattgaaaatattatgcacactgttcatgcttctactaatcaataaacgctttatttaaaag

SEQ ID NO: 316047 - DNA, 2825 bp, Homo sapiens
cgaggctgcctctccacagcgctgtgccactggactgcgccctccatgccttcagagcctcatgcttctgtcctgggccctcctgggtttacctttgtggccatgagcaccaggtggccatccctggtagcaggcgccagccccagggcctggacttcgaggacccaggcaaagtgtgtggggggtgctgcctggccacagggcggccctgctcagcccccgcggccccggcccctgcagtacatggagaagctgtcccggctggcgtaccaccccctgaagatgcagagctgctatgagaagatggagtcgctgcgactggacgggctgcagcagcgatttgatgtgtccagcacgtccgtgttcaagcagcgagcccagatccacatgcgggagcaaatggacaatgccgtgtatacgttcgagaccctcctgcaccaggagctggggaaggggcccaccaaggaggagctgtgcaagtccatccagcgggtcctggagcgggtgctgaagaaatacgactacgacagcagctctgtgcggaagaggttcttccgggaggcgctgctgcagatcagcatcccgttcctgctcaagaagctggcccctacctgcaagtcggagctgccccggttccaggagctgatcttcgaggactttgccaggttcatcctggtggaaaacacgtacgaggaggtggtgctgcagaccgtcatgaaggacatcctgcaggctgtgaaggaggccgcggtgcagaggaagcacaacctctaccgggacagcatggtcatgcacaacagcgaccccaacctgcacctgctggccgagggcgcccccatcgactggggcgaggagtacagcaacagcggcgggggcggcagccccagccccagcaccccggagtcagccaccctctcggaaaagcgacggcgcgccaagcaggtggtctctgtggtccaggatgaggaggtggggctgccctttgaggctagccctgagtcaccaccacctgcgtccccggacggtgtcactgagatccgaggcctgctggcccaaggtctgcggcctgagagccccccaccagccggccccctgctcaacggggcccccgctggggagagtccccagcctaaggccgcccccgaggcctcctcgccgcctgcctcacccctccagcatctcctgcctggaaaggctgtggaccttgggccccccaagcccagcgaccaggagactggagagcaggtgtccagccccagcagccaccccgccctccacaccaccaccgaggacagtgcaggggtgcagactgagttctaggccagtgggtccctgactgctgcacatggcacaggccgttcccttccggacccaggcaggctcagctctggggagggcaccctggtctgtgccttgtgggtggaggcggggcagggctgtgtggcaccgccagggagcgggcccacctgagtcactttattgggttcagtcaacactttcttgctccctgttttctcttctgtgggatgatctcagatgcaggggctggttttggggttttcctgcttgtgccaagggctggacactgctggggggctggaaagcccctcccttcctgtccttctgtggcctccatcccctcatgggtgctgccatccttcctggagagagggaggtgaaagctggtgtgagcccagtgggttcccgcccactcacccaggagctggctgggccaggaccgggagagggagcactgctgccctcctggccctgctccttccgcagttaggggtggaccgagcctcgctttccccactgttctggagggaaggggaaggagggggtcttcaggctggagccaggctgggggtgctgggtggagagatgagatttagggggtgcctcatggggtgggcaggcctggggtgaaatgagaaaggcccagaacgtgcaggtctgcggaggggaagtgtcctgagtgaaggaggggacccccatcctgggggatgctgggagtgagtgagtggagatggctgagtgagggttatggggagcctgaggttttatgggcctgtgtatccccttctcccggccccagcctgcctccctcctgcccgcctggcccacaggtctccctctggtccctgtccctctggtggttggggatggagcggcagcaaggggtgtaatggggctgggttctgtcttctacaggccaccccgaggtcctcagtggttgcctggggagccggacggggctcctgaggggtacaggttgggtgggccctccctgagggtctggggtcaggctttggcctctgctgcctctcagtcaccaagtcacctccctctgaaaatccagtcccttctttggatgtccttgtgagtcactctgggcctggctgtcgtccctcctcagcttcttgttcctgggacaagggtcaagccaggatgggcccaggcctgggatcccccaccccaggacccccaggccccctcccctgctgctttgcggggggcagggcagaaatggactccttttgggtccccgaggtggggtcccctcccagccctgcatcctccgtgccgtagacctgctccccagaggaggggccttgacccacaggacgtgtggtggcgcctggcactcagggacccccagctgccccagccctggtctctggcgcatctcttccctcttgtcccgaagatctgcgcctctagtgccttttgaggggttcccatcatccctccctgatattgtattgaaaatattatgcacactgttcatgcttctactaatcaataaacgctttatttaaaag

SEQ ID NO: 316048 - DNA, 2491 bp, Homo sapiens
  misc_feature (39)..(39): n is a, c, g, or t
  misc_feature (41)..(41): n is a, c, g, or t
cagagttcttatggatagtcccatcacctccaaagcagngngcccagatccacatgcgggagcaaatggacaatgccgtgtatacgttcgagaccctcctgcaccaggagctggggaaggggcccaccaaggaggagctgtgcaagtccatccagcgggtcctggagcgggtgctgaagaaatacgactacgacagcagctctgtgcggaagaggttcttccgggaggcgctgctgcagatcagcatcccgttcctgctcaagaagctggcccctacctgcaagtcggagctgccccggttccaggagctgatcttcgaggactttgccaggttcatcctggtggaaaacacgtacgaggaggtggtgctgcagaccgtcatgaaggacatcctgcaggctgtgaaggaggccgcggtgcagaggaagcacaacctctaccgggacagcatggtcatgcacaacagcgaccccaacctgcacctgctggccgagggcgcccccatcgactggggcgaggagtacagcaacagcggcgggggcggcagccccagccccagcaccccggagtcagccaccctctcggaaaagcgacggcgcgccaagcaggtggtctctgtggtccaggatgaggaggtggggctgccctttgaggctagccctgagtcaccaccacctgcgtccccggacggtgtcactgagatccgaggcctgctggcccaaggtctgcggcctgagagccccccaccagccggccccctgctcaacggggcccccgctggggagagtccccagcctaaggccgcccccgaggcctcctcgccgcctgcctcacccctccagcatctcctgcctggaaaggctgtggaccttgggccccccaagcccagcgaccaggagactggagagcaggtgtccagccccagcagccaccccgccctccacaccaccaccgaggacagtgcaggggtgcagactgagttctaggccagtgggtccctgactgctgcacatggcacaggccgttcccttccggacccaggcaggctcagctctggggagggcaccctggtctgtgccttgtgggtggaggcggggcagggctgtgtggcaccgccagggagcgggcccacctgagtcactttattgggttcagtcaacactttcttgctccctgttttctcttctgtgggatgatctcagatgcaggggctggttttggggttttcctgcttgtgccaagggctggacactgctggggggctggaaagcccctcccttcctgtccttctgtggcctccatcccctcatgggtgctgccatccttcctggagagagggaggtgaaagctggtgtgagcccagtgggttcccgcccactcacccaggagctggctgggccaggaccgggagagggagcactgctgccctcctggccctgctccttccgcagttaggggtggaccgagcctcgctttccccactgttctggagggaaggggaaggagggggtcttcaggctggagccaggctgggggtgctgggtggagagatgagatttagggggtgcctcatggggtgggcaggcctggggtgaaatgagaaaggcccagaacgtgcaggtctgcggaggggaagtgtcctgagtgaaggaggggacccccatcctgggggatgctgggagtgagtgagtggagatggctgagtgagggttatggggagcctgaggttttatgggcctgtgtatccccttctcccggccccagcctgcctccctcctgcccgcctggcccacaggtctccctctggtccctgtccctctggtggttggggatggagcggcagcaaggggtgtaatggggctgggttctgtcttctacaggccaccccgaggtcctcagtggttgcctggggagccggacggggctcctgaggggtacaggttgggtgggccctccctgagggtctggggtcaggctttggcctctgctgcctctcagtcaccaagtcacctccctctgaaaatccagtcccttctttggatgtccttgtgagtcactctgggcctggctgtcgtccctcctcagcttcttgttcctgggacaagggtcaagccaggatgggcccaggcctgggatcccccaccccaggacccccaggccccctcccctgctgctttgcggggggcagggcagaaatggactccttttgggtccccgaggtggggtcccctcccagccctgcatcctccgtgccgtagacctgctccccagaggaggggccttgacccacaggacgtgtggtggcgcctggcactcagggacccccagctgccccagccctggtctctggcgcatctcttccctcttgtcccgaagatctgcgcctctagtgccttttgaggggttcccatcatccctccctgatattgtattgaaaatattatgcacactgttcatgcttctactaatcaataaacgctttatttaaaag

SEQ ID NO: 316049 - DNA, 2488 bp, Homo sapiens
gccaaggcggccggctggagggacggggcccgaccgggagcggagccggagcggaagccgcagccgggcggcgggagcggcgggagcgggggaagcagggcgggccgggctccatggcgccagcggcgtccgcctgagcagcgcgggcaacacgggtcctggagcgggtgctgaagaaatacgactacgacagcagctctgtgcggaagaggttcttccgggaggcgctgctgcagatcagcatcccgttcctgctcaagaagctggcccctacctgcaagtcggagctgccccggttccaggagctgatcttcgaggactttgccaggttcatcctggtggaaaacacgtacgaggaggtggtgctgcagaccgtcatgaaggacatcctgcaggctgtgaaggaggccgcggtgcagaggaagcacaacctctaccgggacagcatggtcatgcacaacagcgaccccaacctgcacctgctggccgagggcgcccccatcgactggggcgaggagtacagcaacagcggcgggggcggcagccccagccccagcaccccggagtcagccaccctctcggaaaagcgacggcgcgccaagcaggtggtctctgtggtccaggatgaggaggtggggctgccctttgaggctagccctgagtcaccaccacctgcgtccccggacggtgtcactgagatccgaggcctgctggcccaaggtctgcggcctgagagccccccaccagccggccccctgctcaacggggcccccgctggggagagtccccagcctaaggccgcccccgaggcctcctcgccgcctgcctcacccctccagcatctcctgcctggaaaggctgtggaccttgggccccccaagcccagcgaccaggagactggagagcaggtgtccagccccagcagccaccccgccctccacaccaccaccgaggacagtgcaggggtgcagactgagttctaggccagtgggtccctgactgctgcacatggcacaggccgttcccttccggacccaggcaggctcagctctggggagggcaccctggtctgtgccttgtgggtggaggcggggcagggctgtgtggcaccgccagggagcgggcccacctgagtcactttattgggttcagtcaacactttcttgctccctgttttctcttctgtgggatgatctcagatgcaggggctggttttggggttttcctgcttgtgccaagggctggacactgctggggggctggaaagcccctcccttcctgtccttctgtggcctccatcccctcatgggtgctgccatccttcctggagagagggaggtgaaagctggtgtgagcccagtgggttcccgcccactcacccaggagctggctgggccaggaccgggagagggagcactgctgccctcctggccctgctccttccgcagttaggggtggaccgagcctcgctttccccactgttctggagggaaggggaaggagggggtcttcaggctggagccaggctgggggtgctgggtggagagatgagatttagggggtgcctcatggggtgggcaggcctggggtgaaatgagaaaggcccagaacgtgcaggtctgcggaggggaagtgtcctgagtgaaggaggggacccccatcctgggggatgctgggagtgagtgagtggagatggctgagtgagggttatggggagcctgaggttttatgggcctgtgtatccccttctcccggccccagcctgcctccctcctgcccgcctggcccacaggtctccctctggtccctgtccctctggtggttggggatggagcggcagcaaggggtgtaatggggctgggttctgtcttctacaggccaccccgaggtcctcagtggttgcctggggagccggacggggctcctgaggggtacaggttgggtgggccctccctgagggtctggggtcaggctttggcctctgctgcctctcagtcaccaagtcacctccctctgaaaatccagtcccttctttggatgtccttgtgagtcactctgggcctggctgtcgtccctcctcagcttcttgttcctgggacaagggtcaagccaggatgggcccaggcctgggatcccccaccccaggacccccaggccccctcccctgctgctttgcggggggcagggcagaaatggactccttttgggtccccgaggtggggtcccctcccagccctgcatcctccgtgccgtagacctgctccccagaggaggggccttgacccacaggacgtgtggtggcgcctggcactcagggacccccagctgccccagccctggtctctggcgcatctcttccctcttgtcccgaagatctgcgcctctagtgccttttgaggggttcccatcatccctccctgatattgtattgaaaatattatgcacactgttcatgcttctactaatcaataaacgctttatttaaaag

SEQ ID NO: 316050 - DNA, 3911 bp, Homo sapiens
gccaaggcggccggctggagggacggggcccgaccgggagcggagccggagcggaagccgcagccgggcggcgggagcggcgggagcgggggaagcagggcgggccgggctccatggcgccagcggcgtccgcctgagcagcgcgggcaacagcggcggcgtcggccggatcgggccgcgacacctcctggccatgggggacgtgctgtccacgcacctggacgacgcccggcgccagcacatcgcagaaaaaaccgggaagatcctgacggagttcctccagttctatgaagaccagtatggcgtggctctcttcaacagcatgcgccatgagattgagggcacggggctgccgcaggcccagctgctctggcgcaaggtgccactggacgagcgcatcgtcttctcggggaacctcttccagcaccaggaggacagcaagaagtggagaaaccgcttcagcctcgtgccccacaactacgggctggtgctctacgaaaacaaagcggcctatgagcggcaggtcccaccacgagccgtcatcaacagtgcaggctacaaaatcctcacgtccgtggaccaatacctggagctcattggcaactccttaccagggaccacggcaaagtcgggcagtgcccccatcctcaagtgccccacacagttcccgctcatcctctggcatccttatgcgcgtcactactacttctgcatgatgacagaagccgagcaggacaagtggcaggctgtgctgcaggactgcatccggcactgcaacaatggaatccctgaggactccaaggtagagggccctgcgttcacagatgccatccgcatgtaccgacagtccaaggagctgtacggcacctgggagatgctgtgtgggaacgaggtgcagatcctgagcaacctggtgatggaggagctgggccctgagctgaaggcagagctcggcccgcggctgaaggggaaaccgcaggagcggcagcggcagtggatccagatctcggacgccgtgtaccacatggtgtacgagcaggccaaggcgcgcttcgaggaggtgctgtccaaggtgcagcaggtgcagccggccatgcaggccgtcatccgaactgacatggaccaaattatcacctccaaggagcaccttgccagcaagatccgagccttcatcctccccaaggcagaggtgtgcgtgcggaaccatgtccagccctacatcccatccatcctggaggccctgatggtccccaccagccagggcttcactgaggtgcgagatgtcttcttcaaggaggtcacggacatgaacctgaacgtcatcaacgagggcggcattgacaagctgggcgagtacatggagaagctgtcccggctggcgtaccaccccctgaagatgcagagctgctatgagaagatggagtcgctgcgactggacgggctgcagcagcgatttgatgtgtccagcacgtccgtgttcaagcagcgagcccagatccacatgcgggagcaaatggacaatgccgtgtatacgttcgagaccctcctgcaccaggagctggggaaggggcccaccaaggaggagctgtgcaagtccatccagcgggtcctggagcgggtgctgaagaaatacgactacgacagcagctctgtgcggaagaggttcttccgggaggcgctgctgcagatcagcatcccgttcctgctcaagaagctggcccctacctgcaagtcggagctgccccggttccaggagctgatcttcgaggactttgccaggttcatcctggtggaaaacacgtacgaggaggtggtgctgcagaccgtcatgaaggacatcctgcaggctgtgaaggaggccgcggtgcagaggaagcacaacctctaccgggacagcatggtcatgcacaacagcgaccccaacctgcacctgctggccgagggcgcccccatcgactggggcgaggagtacagcaacagcggcgggggcggcagccccagccccagcaccccggagtcagccaccctctcggaaaagcgacggcgcgccaagcaggtggtctctgtggtccaggatgaggaggtggggctgccctttgaggctagccctgagtcaccaccacctgcgtccccggacggtgtcactgagatccgaggcctgctggcccaaggtctgcggcctgagagccccccaccagccggccccctgctcaacggggcccccgctggggagagtccccagcctaaggccgcccccgaggcctcctcgccgcctgcctcacccctccagcatctcctgcctggaaaggctgtggaccttgggccccccaagcccagcgaccaggagactggagagcaggtgtccagccccagcagccaccccgccctccacaccaccaccgaggacagtgcaggggtgcagactgagttctaggccagtgggtccctgactgctgcacatggcacaggccgttcccttccggacccaggcaggctcagctctggggagggcaccctggtctgtgccttgtgggtggaggcggggcagggctgtgtggcaccgccagggagcgggcccacctgagtcactttattgggttcagtcaacactttcttgctccctgttttctcttctgtgggatgatctcagatgcaggggctggttttggggttttcctgcttgtgccaagggctggacactgctggggggctggaaagcccctcccttcctgtccttctgtggcctccatcccctcatgggtgctgccatccttcctggagagagggaggtgaaagctggtgtgagcccagtgggttcccgcccactcacccaggagctggctgggccaggaccgggagagggagcactgctgccctcctggccctgctccttccgcagttaggggtggaccgagcctcgctttccccactgttctggagggaaggggaaggagggggtcttcaggctggagccaggctgggggtgctgggtggagagatgagatttagggggtgcctcatggggtgggcaggcctggggtgaaatgagaaaggcccagaacgtgcaggtctgcggaggggaagtgtcctgagtgaaggaggggacccccatcctgggggatgctgggagtgagtgagtggagatggctgagtgagggttatggggagcctgaggttttatgggcctgtgtatccccttctcccggccccagcctgcctccctcctgcccgcctggcccacaggtctccctctggtccctgtccctctggtggttggggatggagcggcagcaaggggtgtaatggggctgggttctgtcttctacaggccaccccgaggtcctcagtggttgcctggggagccggacggggctcctgaggggtacaggttgggtgggccctccctgagggtctggggtcaggctttggcctctgctgcctctcagtcaccaagtcacctccctctgaaaatccagtcccttctttggatgtccttgtgagtcactctgggcctggctgtcgtccctcctcagcttcttgttcctgggacaagggtcaagccaggatgggcccaggcctgggatcccccaccccaggacccccaggccccctcccctgctgctttgcggggggcagggcagaaatggactccttttgggtccccgaggtggggtcccctcccagccctgcatcctccgtgccgtagacctgctccccagaggaggggccttgacccacaggacgtgtggtggcgcctggctggtctctggcgcatctcttccctcttgtcccgaagatctgcgcctctagtgccttttgaggggttcccatcatccctccctgatattgtattgaaaatattatgcacactgttcatgcttctactaatcaataaacgctttatttaaaag

SEQ ID NO: 316051 - DNA, 3903 bp, Homo sapiens
gccaaggcggccggctggagggacggggcccgaccgggagcggagccggagcggaagccgcagccgggcggcgggagcggcgggagcgggggaagcagggcgggccgggctccatggcgccagcggcgtccgcctgagcagcgcgggcaacagcggcggcgtcggccggatcgggccgcgacacctcctggccatgggggacgtgctgtccacgcacctggacgacgcccggcgccagcacatcgcagaaaaaaccgggaagatcctgacggagttcctccagttctatgaagaccagtatggcgtggctctcttcaacagcatgcgccatgagattgagggcacggggctgccgcaggcccagctgctctggcgcaaggtgccactggacgagcgcatcgtcttctcggggaacctcttccagcaccaggaggacagcaagaagtggagaaaccgcttcagcctcgtgccccacaactacgggctggtgctctacgaaaacaaagcggcctatgagcggcaggtcccaccacgagccgtcatcaacagtgcaggctacaaaatcctcacgtccgtggaccaatacctggagctcattggcaactccttaccagggaccacggcaaagtcgggcagtgcccccatcctcaagtgccccacacagttcccgctcatcctctggcatccttatgcgcgtcactactacttctgcatgatgacagaagccgagcaggacaagtggcaggctgtgctgcaggactgcatccggcactgcaacaatggaatccctgaggactccaaggtagagggccctgcgttcacagatgccatccgcatgtaccgacagtccaaggagctgtacggcacctgggagatgctgtgtgggaacgaggtgcagatcctgagcaacctggtgatggaggagctgggccctgagctgaaggcagagctcggcccgcggctgaaggggaaaccgcaggagcggcagcggcagtggatccagatctcggacgccgtgtaccacatggtgtacgagcaggccaaggcgcgcttcgaggaggtgctgtccaaggtgcagcaggtgcagccggccatgcaggccgtcatccgaactgacatggaccaaattatcacctccaaggagcaccttgccagcaagatccgagccttcatcctccccaaggcagaggtgtgcgtgcggaaccatgtccagccctacatcccatccatcctggaggccctgatggtccccaccagccagggcttcactgaggtgcgagatgtcttcttcaaggaggtcacggacatgaacctgaacgtcatcaacgagggcggcattgacaagctgggcgagtacatggagaagctgtcccggctggcgtaccaccccctgaagatgcagagctgctatgagaagatggagtcgctgcgactggacgggctgcagcagcgatttgatgtgtccagcacgtccgtgttcaagcagcgagcccagatccacatgcgggagcaaatggacaatgccgtgtatacgttcgagaccctcctgcaccaggagctggggaaggggcccaccaaggaggagctgtgcaagtccatccagcgggtcctggagcgggtgctgaagaaatacgactacgacagcagctctgtgcggaagaggttcttccgggaggcgctgctgcagatcagcatcccgttcctgctcaagaagctggcccctacctgcaagtcggagctgccccggttccaggagctgatcttcgaggactttgccaggttcatcctggtggaaaacacgtacgaggaggtggtgctgcagaccgtcatgaaggacatcctgcaggctgtgaaggaggccgcggtgcagaggaagcacaacctctaccgggacagcatggtcatgcacaacagcgaccccaacctgcacctgctggccgagggcgcccccatcgactggggcgaggagtacagcaacagcggcgggggcggcagccccagccccagcaccccggagtcagccaccctctcggaaaagcgacggcgcgccaagcaggtggtctctgtggtccaggatgaggaggtggggctgccctttgaggctagccctgagtcaccaccacctgcgtccccggacggtgtcactgagatccgaggcctgctggcccaaggtctgcggcctgagagccccccaccagccggccccctgctcaacggggcccccgctggggagagtccccagcctaaggccgcccccgaggcctcctcgccgcctgcctcacccctccagcatctcctgcctggaaaggctgtggaccttgggccccccaagcccagcgaccaggagactggagagcaggtgtccagccccagcagccaccccgccctccacaccaccaccgaggacagtgcaggggtgcagactgagttctaggccagtgggtccctgactgctgcacatggcacaggccgttcccttccggacccaggcaggctcagctctggggagggcaccctggtctgtgccttgtgggtggaggcggggcagggctgtgtggcaccgccagggagcgggcccacctgagtcactttattgggttcagtcaacactttcttgctccctgttttctcttctgtgggatgatctcagatgcaggggctggttttggggttttcctgcttgtgccaagggctggacactgctggggggctggaaagcccctcccttcctgtccttctgtggcctccatcccctcatgggtgctgccatccttcctggagagagggaggtgaaagctggtgtgagcccagtgggttcccgcccactcacccaggagctggctgggccaggaccgggagagggagcactgctgccctcctggccctgctccttccgcagttaggggtggaccgagcctcgctttccccactgttctggagggaaggggaaggagggggtcttcaggctggagccaggctgggggtgctgggtggagagatgagatttagggggtgcctcatggggtgggcaggcctggggtgaaatgagaaaggcccagaacgtgcaggtctgcggaggggaagtgtcctgagtgaaggaggggacccccatcctgggggatgctgggagtgagtgagtggagatggctgagtgagggttatggggagcctgaggttttatgggcctgtgtatccccttctcccggccccagcctgcctccctcctgcccgcctggcccacaggtctccctctggtccctgtccctctggtggttggggatggagcggcagcaaggggtgtaatggggctgggttctgtcttctacaggccaccccgaggtcctcagtggttgcctggggagccggacggggctcctgaggggtacaggttgggtgggccctccctgagggtctggggtcaggctttggcctctgctgcctctcagtcaccaagtcacctccctctgaaaatccagtcccttctttggatgtccttgtgagtcactctgggcctggctgtcgtccctcctcagcttcttgttcctgggacaagggtcaagccaggatgggggtgctgggtggagagatgagatttagggggtgcctcatggggtgggcaggcctggggtgaaatgagaaaggtcccagccctgcatcctccgtgccgtagacctgctccccagaggaggggccttgacccacaggacgtgtggtggcgcctggcactcagggacccccagctgccccagccctggtctctggcgcatctcttccctcttgtcccgaagatctgcgcctctagtgccttttgaggggttcccatcatccctccctgatattgtattgaaaatattatgcacactgttcatgcttctactaatcaataaacgctttatttaaaag

SEQ ID NO: 316052 - DNA, 925 bp, Homo sapiens
tgactagtacgaggctgggtgtgtgaatcggccgagggtccctccttccccaggatgggggtccccatcccccaggatgggggggaggggacccccatcctgggggatgctgggagtgagtgagtggagatggctgagtgagggttatggggagcctgaggttttatgggcctgtgtatccccttctcccggccccagcctgcctccctcctgcccgcctggcccacaggtctccctctggtccctgtccctctggtggttggggatggagcggcagcaaggggtgtaatggggctgggttctgtcttctacaggccaccccgaggtcctcagtggttgcctggggagccggacggggctcctgaggggtacaggttgggtgggccctccctgagggtctggggtcaggctttggcctctgctgcctctcagtcaccaagtcacctccctctgaaaatccagtcccttctttggatgtccttgtgagtcactctgggcctggctgtcgtccctcctcagcttcttgttcctgggacaagggtcaagccaggatgggcccaggcctgggatcccccaccccaggacccccaggccccctcccctgctgctttgcggggggcagggcagaaatggactccttttgggtccccgaggtggggtcccctcccagccctgcatcctccgtgccgtagacctgctccccagaggaggggccttgacccacaggacgtgtggtggcgcctggcactcagggacccccagctgccccagccctggtctctggcgcatctcttccctcttgtcccgaagatctgcgcctctagtgccttttgaggggttcccatcatccctccctgatattgtattgaaaatattatgcacactgttcatgcttctactaatcaataaacgctttatttaaaag

SEQ ID NO: 316053 - DNA, 3187 bp, Homo sapiens
gccaaggcggccggctggagggacggggcccgaccgggagcggagccggagcggaagccgcagccgggcggcgggagcggcgggagcgggggaagcagggcgggccgggctccatggcgccagcggcgtccgcctgagcagcgcgggcaacagcggcggcgtcggccggatcgggccgcgacacctcctggccatgggggacgtgctgtccacgcacctggacgacgcccggcgccagcacatcgcagaaaaaaccgggaagatcctgacggagttcctccagttctatgaagaccagtatggcgtggctctcttcaacagcatgcgccatgagattgagggcacggggctgccgcaggcccagctgctctggcgcaaggtgccactggacgagcgcatcgtcttctcggggaacctcttccagcaccaggaggacagcaagaagtggagaaaccgcttcagcctcgtgccccacaactacgggctggtgctctacgaaaacaaagcggcctatgagcggcaggtcccaccacgagccgtcatcaacagtgcaggctacaaaatcctcacgtccgtggaccaatacctggagctcattggcaactccttaccagggaccacggcaaagtcgggcagtgcccccatcctcaagtgccccacacagttcccgctcatcctctggcatccttatgcgcgtcactactacttctgcatgatgacagaagccgagcaggacaagtggcaggctgtgctgcaggactgcatccggcactgcaacaatggaatccctgaggactccaaggtagagggccctgcgttcacagatgccatccgcatgtaccgacagtccaaggagctgtacggcacctgggagatgctgtgtgggaacgaggtgcagatcctgagcaacctggtgatggaggagctgggccctgagctgaaggcagagctcggcccgcggctgaaggggaaaccgcaggagcggcagcggcagtggatccagatctcggacgccgtgtaccacatggtgtacgagcaggccaaggcgcgcttcgaggaggtgctgtccaaggtgcagcaggtgcagccggccatgcaggccgtcatccgaactgacatggaccaaattatcacctccaaggagcaccttgccagcaagatccgagccttcatcctccccaaggcagaggtgtgcgtgcggaaccatgtccagccctacatcccatccatcctggaggccctgatggtccccaccagccagggcttcactgaggtgcgagatgtcttcttcaaggaggtcacggacatgaacctgaacgtcatcaacgagggcggcattgacaagctgggcgagtacatggagaagctgtcccggctggcgtaccaccccctgaagatgcagagctgctatgagaagatggagtcgctgcgactggacgggctgcagcagcgatttgatgtgtccagcacgtccgtgttcaagcagcgagcccagatccacatgcgggagcaaatggacaatgccgtgtatacgttcgagaccctcctgcaccaggagctggggaaggggcccaccaaggaggagctgtgcaagtccatccagcgggtcctggagcgggtgctgaagaaatacgactacgacagcagctctgtgcggaagaggttcttccgggaggcgctgctgcagatcagcatcccgttcctgctcaagaagctggcccctacctgcaagtcggagctgccccggttccaggagctgatcttcgaggactttgccaggttcatcctggtggaaaacacgtacgaggaggtggtgctgcagaccgtcatgaaggacatcctgcaggctgtgaaggaggccgcggtgcagaggaagcacaacctctaccgggacagcatggtcatgcacaacagcgaccccaacctgcacctgctggccgagggcgcccccatcgactggggcgaggagtacagcaacagcggcgggggcggcagccccagccccagcaccccggagtcagccaccctctcggaaaagcgacggcgcgccaagcaggtggtctctgtggtccaggatgaggaggtggggctgccctttgaggctagccctgagtcaccaccacctgcgtccccggacggtgtcactgagatccgaggcctgctggcccaaggtctgcggcctgagagccccccaccagccggccccctgctcaacggggcccccgctggggagagtccccagcctaaggccgcccccgaggcctcctcgccgcctgcctcacccctccagcatctcctgcctggaaaggctgtggaccttgggccccccaagcccagcgaccaggagactggagagcaggtgtccagccccagcagccaccccgccctccacaccaccaccgaggacagtgcaggggtgcagactgagttctaggccagtgggtccctgactgctgcacatggcacaggccgttcccttccggacccaggcaggctcagctctggggagggcaccctggtctgtgccttgtgggtggaggcggggcagggctgtgtggcaccgccagggagcgggcccacctgagtcactttattgggttcagtcaacactttcttgctccctgttttctcttctgtgggatgatctcagatgcaggggctggttttggggttttcctgcttgtgccaagggctggacactgctggggggctggaaagcccctcccttcctgtccttctgtggcctccatcccctcatgggtgctgccatccttcctggagagagggaggtgaaagctggtgtgagcccagtgggttcccgcccactcacccaggagctggctgggccaggaccgggagagggagcactgctgccctcctggccctgctccttccgcagttaggggtggaccgagcctcgctttccccactgttctggagggaaggggaaggagggggtcttcaggctggagccaggctgggggtgctgggtggagagatgagatttagggggtgcctcatggggtgggcaggcctggggtgaaatgagaaaggcccagaacgtgcaggtctgcggaggggaagtgtcctgagtgaagggttcccatcatccctccctgatattgtattgaaaatattatgcacactgttcatgcttctactaatcaataaacgctttatttaaaag

SEQ ID NO: 316054 - DNA, 3423 bp, Homo sapiens
gccaaggcggccggctggagggacggggcccgaccgggagcggagccggagcggaagccgcagccgggcggcgggagcggcgggagcgggggaagcagggcgggccgggctccatggcgccagcggcgtccgcctgagcagcgcgggcaacagcggcggcgtcggccggatcgggccgcgacacctcctggccatgggggacgtgctgtccacgcacctggacgacgcccggcgccagcacatcgcagaaaaaaccgggaagatcctgacggagttcctccagttctatgaagaccagtatggcgtggctctcttcaacagcatgcgccatgagattgagggcacggggctgccgcaggcccagctgctctggcgcaaggtgccactggacgagcgcatcgtcttctcggggaacctcttccagcaccaggaggacagcaagaagtggagaaaccgcttcagcctcgtgccccacaactacgggctggtgctctacgaaaacaaagcggcctatgagcggcaggtcccaccacgagccgtcatcaacagtgcaggctacaaaatcctcacgtccgtggaccaatacctggagctcattggcaactccttaccagggaccacggcaaagtcgggcagtgcccccatcctcaagtgccccacacagttcccgctcatcctctggcatccttatgcgcgtcactactacttctgcatgatgacagaagccgagcaggacaagtggcaggctgtgctgcaggactgcatccggcactgcaacaatggaatccctgaggactccaaggtagagggccctgcgttcacagatgccatccgcatgtaccgacagtccaaggagctgtacggcacctgggagatgctgtgtgggaacgaggtgcagatcctgagcaacctggtgatggaggagctgggccctgagctgaaggcagagctcggcccgcggctgaaggggaaaccgcaggagcggcagcggcagtggatccagatctcggacgccgtgtaccacatggtgtacgagcaggccaaggcgcgcttcgaggaggtgctgtccaaggtgcagcaggtgcagccggccatgcaggccgtcatccgaactgacatggaccaaattatcacctccaaggagcaccttgccagcaagatccgagccttcatcctccccaaggcagaggtgtgcgtgcggaaccatgtccagccctacatcccatccatcctggaggccctgatggtccccaccagccagggcttcactgaggtgcgagatgtcttcttcaaggaggtcacggacatgaacctgaacgtcatcaacgagggcggcattgacaagctgggcgagtacatggagaagctgtcccggctggcgtaccaccccctgaagatgcagagctgctatgagaagatggagtcgctgcgactggacgggctgcagcagcgatttgatgtgtccagcacgtccgtgttcaagcagcgagcccagatccacatgcgggagcaaatggacaatgccgtgtatacgttcgagaccctcctgcaccaggagctggggaaggggcccaccaaggaggagctgtgcaagtccatccagcgggtcctggagcgggtgctgaagaaatacgactacgacagcagctctgtgcggaagaggttcttccgggaggcgctgctgcagatcagcatcccgttcctgctcaagaagctggcccctacctgcaagtcggagctgccccggttccaggagctgatcttcgaggactttgccaggttcatcctggtggaaaacacgtacgaggaggtggtgctgcagaccgtcatgaaggacatcctgcaggctgtgaaggaggccgcggtgcagaggaagcacaacctctaccgggacagcatggtcatgcacaacagcgaccccaacctgcacctgctggccgagggcgcccccatcgactggggcgaggagtacagcaacagcggcgggggcggcagccccagccccagcaccccggagtcagccaccctctcggaaaagcgacggcgcgccaagcaggtggtctctgtggtccaggatgaggaggtggggctgccctttgaggctagccctgagtcaccaccacctgcgtccccggacggtgtcactgagatccgaggcctgctggcccaaggtctgcggcctgagagccccccaccagccggccccctgctcaacggggcccccgctggggagagtccccagcctaaggccgcccccgaggcctcctcgccgcctgcctcacccctccagcatctcctgcctggaaaggctgtggaccttgggccccccaagcccagcgaccaggagactggagagcaggtgtccagccccagcagccaccccgccctccacaccaccaccgaggacagtgcaggggtgcagactgagttctaggccagtgggtccctgactgctgcacatggcacaggccgttcccttccggacccaggcaggctcagctctggggagggcaccctggtctgtgccttgtgggtggaggcggggcagggctgtgtggcaccgccagggagcgggcccacctgagtcactttattgggttcagtcaacactttcttgctccctgttttctcttctgtgggatgatctcagatgcaggggctggttttggggttttcctgcttgtgccaagggctggacactgctggggggctggaaagcccctcccttcctgtccttctgtggcctccatcccctcatgggtgctgccatccttcctggagagagggaggtgaaagctggtgtgagcccagtgggttcccgcccactcacccaggagctggctgggccaggaccgggagagggagcactgctgccctcctggccctgctccttccgcagttaggggtggaccgagcctcgctttccccactgttctggagggaaggggaaggagggggtcttcaggctggagccaggctgggggtgctgggtggagagatgagatttagggggtgcctcatggggtgggcaggcctggggtgaaatgagaaaggcccagaacgtgcaggtctgcggaggggaagtgtcctgagtgaaggaggggacccccatcctgggggatgctgggagtgagtgagtggagatggctgagtgagggttatggggagcctgaggttttatgggcctgtgtatccccttctcccggccccagcctgcctccctcctgcccgcctggcccacagcactcagggacccccagctgccccagccctggtctctggcgcatctcttccctcttgtcccgaagatctgcgcctctagtgccttttgaggggttcccatcatccctccctgatattgtattgaaaatattatgcacactgttcatgcttctactaatcaataaacgctttatttaaaag

SEQ ID NO: 316055 - DNA, 3358 bp, Homo sapiens
gccaaggcggccggctggagggacggggcccgaccgggagcggagccggagcggaagccgcagccgggcggcgggagcggcgggagcgggggaagcagggcgggccgggctccatggcgccagcggcgtccgcctgagcagcgcgggcaacagcggcggcgtcggccggatcgggccgcgacacctcctggccatgggggacgtgctgtccacgcacctggacgacgcccggcgccagcacatcgcagaaaaaaccgggaagatcctgacggagttcctccagttctatgaagaccagtatggcgtggctctcttcaacagcatgcgccatgagattgagggcacggggctgccgcaggcccagctgctctggcgcaaggtgccactggacgagcgcatcgtcttctcggggaacctcttccagcaccaggaggacagcaagaagtggagaaaccgcttcagcctcgtgccccacaactacgggctggtgctctacgaaaacaaagcggcctatgagcggcaggtcccaccacgagccgtcatcaacagtgcaggctacaaaatcctcacgtccgtggaccaatacctggagctcattggcaactccttaccagggaccacggcaaagtcgggcagtgcccccatcctcaagtgccccacacagttcccgctcatcctctggcatccttatgcgcgtcactactacttctgcatgatgacagaagccgagcaggacaagtggcaggctgtgctgcaggactgcatccggcactgcaacaatggaatccctgaggactccaaggtagagggccctgcgttcacagatgccatccgcatgtaccgacagtccaaggagctgtacggcacctgggagatgctgtgtgggaacgaggtgcagatcctgagcaacctggtgatggaggagctgggccctgagctgaaggcagagctcggcccgcggctgaaggggaaaccgcaggagcggcagcggcagtggatccagatctcggacgccgtgtaccacatggtgtacgagcaggccaaggcgcgcttcgaggaggtgctgtccaaggtgcagcaggtgcagccggccatgcaggccgtcatccgaactgacatggaccaaattatcacctccaaggagcaccttgccagcaagatccgagccttcatcctccccaaggcagaggtgtgcgtgcggaaccatgtccagccctacatcccatccatcctggaggccctgatggtccccaccagccagggcttcactgaggtgcgagatgtcttcttcaaggaggtcacggacatgaacctgaacgtcatcaacgagggcggcattgacaagctgggcgagtacatggagaagctgtcccggctggcgtaccaccccctgaagatgcagagctgctatgagaagatggagtcgctgcgactggacgggctgcagcagcgatttgatgtgtccagcacgtccgtgttcaagcagcgagcccagatccacatgcgggagcaaatggacaatgccgtgtatacgttcgagaccctcctgcaccaggagctggggaaggggcccaccaaggaggagctgtgcaagtccatccagcgggtcctggagcgggtgctgaagaaatacgactacgacagcagctctgtgcggaagaggttcttccgggaggcgctgctgcagatcagcatcccgttcctgctcaagaagctggcccctacctgcaagtcggagctgccccggttccaggagctgatcttcgaggactttgccaggttcatcctggtggaaaacacgtacgaggaggtggtgctgcagaccgtcatgaaggacatcctgcaggctgtgaaggaggccgcggtgcagaggaagcacaacctctaccgggacagcatggtcatgcacaacagcgaccccaacctgcacctgctggccgagggcgcccccatcgactggggcgaggagtacagcaacagcggcgggggcggcagccccagccccagcaccccggagtcagccaccctctcggaaaagcgacggcgcgccaagcaggtggtctctgtggtccaggatgaggaggtggggctgccctttgaggctagccctgagtcaccaccacctgcgtccccggacggtgtcactgagatccgaggcctgctggcccaaggtctgcggcctgagagccccccaccagccggccccctgctcaacggggcccccgctggggagagtccccagcctaaggccgcccccgaggcctcctcgccgcctgcctcacccctccagcatctcctgcctggaaaggctgtggaccttgggccccccaagcccagcgaccaggagactggagagcaggtgtccagccccagcagccaccccgccctccacaccaccaccgaggacagtgcaggggtgcagactgagttctaggccagtgggtccctgactgctgcacatggcacaggccgttcccttccggacccaggcaggctcagctctggggagggcaccctggtctgtgccttgtgggtggaggcggggcagggctgtgtggcaccgccagggagcgggcccacctgagtcactttattgggttcagtcaacactttcttgctccctgttttctcttctgtgggatgatctcagatgcaggggctggttttggggttttcctgcttgtgccaagggctggacactgctggggggctggaaagcccctcccttcctgtccttctgtggcctccatcccctcatgggtgctgccatccttcctggagagagggaggtgaaagctggtgtgagcccagtgggttcccgcccactcacccaggagctggctgggccaggaccgggagagggagcactgctgccctcctggccctgctccttccgcagttaggggtggaccgagcctcgctttccccactgttctggagggaaggggaaggagggggtcttcaggctggagccaggctgggggtgctgggtggagagatgagatttagggggtgcctcatggggtgggcaggcctggggtgaaatgagaaaggcccagaacgtgcaggtctgcggaggggaagtgtcctgagtgaatcccagccctgcatcctccgtgccgtagacctgctccccagaggaggggccttgacccacaggacgtgtggtggcgcctggcactcagggacccccagctgccccagccctggtctctggcgcatctcttccctcttgtcccgaagatctgcgcctctagtgccttttgaggggttcccatcatccctccctgatattgtattgaaaatattatgcacactgttcatgcttctactaatcaataaacgctttatttaaaag

SEQ ID NO: 316056 - DNA, 2825 bp, Homo sapiens
gccaaggcggccggctggagggacggggcccgaccgggagcggagccggagcggaagccgcagccgggcggcgggagcggcgggagcgggggaagcagggcgggccgggctccatggcgccagcggcgtccgcctgagcagcgcgggcaacagcggcggcgtcggccggatcgggccgcgacacctcctggccatgggggacgtgctgtccacgcacctggacgacgcccggcgccagcacatcgcagaaaaaaccgggaagatcctgacggagttcctccagttctatgaagaccagtatggcgtggctctcttcaacagcatgcgccatgagattgagggcacggggctgccgcaggcccagctgctctggcgcaaggtgccactggacgagcgcatcgtcttctcggggaacctcttccagcaccaggaggacagcaagaagtggagaaaccgcttcagcctcgtgccccacaactacgggctggtgctctacgaaaacaaagcggcctatgagcggcaggtcccaccacgagccgtcatcaacagtgcaggctacaaaatcctcacgtccgtggaccaatacctggagctcattggcaactccttaccagggaccacggcaaagtcgggcagtgcccccatcctcaagtgccccacacagttcccgctcatcctctggcatccttatgcgcgtcactactacttctgcatgatgacagaagccgagcaggacaagtggcaggctgtgctgcaggactgcatccggcactgcaacaatggaatccctgaggactccaaggtagagggccctgcgttcacagatgccatccgcatgtaccgacagtccaaggagctgtacggcacctgggagatgctgtgtgggaacgaggtgcagatcctgagcaacctggtgatggaggagctgggccctgagctgaaggcagagctcggcccgcggctgaaggggaaaccgcaggagcggcagcggcagtggatccagatctcggacgccgtgtaccacatggtgtacgagcaggccaaggcgcgcttcgaggaggtgctgtccaaggtgcagcaggtgcagccggccatgcaggccgtcatccgaactgacatggaccaaattatcacctccaaggagcaccttgccagcaagatccgagccttcatcctccccaaggcagaggtgtgcgtgcggaaccatgtccagccctacatcccatccatcctggaggccctgatggtccccaccagccagggcttcactgaggtgcgagatgtcttcttcaaggaggtcacggacatgaacctgaacgtcatcaacgagggcggcattgacaagctgggcgagtacatggagaagctgtcccggctggcgtaccaccccctgaagatgcagagctgctatgagaagatggagtcgctgcgactggacgggctgcagcagcgatttgatgtgtccagcacgtccgtgttcaagcagcgagcccagatccacatgcgggagcaaatggacaatgccgtgtatacgttcgagaccctcctgcaccaggagctggggaaggggcccaccaaggaggagctgtgcaagtccatccagcgggtcctggagcgggtgctgaagaaatacgactacgacagcagctctgtgcggaagaggttcttccgggaggcgctgctgcagatcagcatcccgttcctgctcaagaagctggcccctacctgcaagtcggagctgccccggttccaggagctgatcttcgaggactttgccaggttcatcctggtggaaaacacgtacgaggaggtggtgctgcagaccgtcatgaaggacatcctgcaggctgtgaaggaggccgcggtgcagaggaagcacaacctctaccgggacagcatggtcatgcacaacagcgaccccaacctgcacctgctggccgagggcgcccccatcgactggggcgaggagtacagcaacagcggcgggggcggcagccccagccccagcaccccggagtcagccaccctctcggaaaagcgacggcgcgccaagcaggtggtctctgtggtccaggatgaggaggtggggctgccctttgaggctagccctgagtcaccaccacctgcgtccccggacggtgtcactgagatccgaggcctgctggcccaaggtctgcggcctgagagccccccaccagccggccccctgctcaacggggcccccgctggggagagtccccagcctaaggccgcccccgaggcctcctcgccgcctgcctcacccctccagcatctcctgcctggaaaggctgtggaccttgggccccccaagcccagcgaccaggagactggagagcaggtgtccagccccagcagccaccccgccctccacaccaccaccgaggacagtgcaggggtgcagactgagttctaggccagtgggtccctgactgctgcacatggcacaggccgttcccttccggacccaggcaggctcagctctggggagggcaccctggtctgtgccttgtgggtggaggcggggcagggctgtgtggcaccgccagggagcgggcccacctgagtcactttattgggttcagtcaacactttcttgctccctgttttctcttctgtgggatgatcactcagggacccccagctgccccagccctggtctctggcgcatctcttccctcttgtcccgaagatctgcgcctctagtgccttttgaggggttcccatcatccctccctgatattgtattgaaaatattatgcacactgttcatgcttctactaatcaataaacgctttatttaaaag

SEQ ID NO: 316057 - DNA, 2146 bp, Homo sapiens
gccaaggcggccggctggagggacggggcccgaccgggagcggagccggagcggaagccgcagccgggcggcgggagcggcgggagcgggggaagcagggcgggccgggctccatggcgccagcggcgtccgcctgagcagcgcgggcaacagcggcggcgtcggccggatcgggccgcgacacctcctggccatgggggacgtgctgtccacgcacctggacgacgcccggcgccagcacatcgcagaaaaaaccgggaagatcctgacggagttcctccagttctatgaagaccagtatggcgtggctctcttcaacagcatgcgccatgagattgagggcacggggctgccgcaggcccagctgctctggcgcaaggtgccactggacgagcgcatcgtcttctcggggaacctcttccagcaccaggaggacagcaagaagtggagaaaccgcttcagcctcgtgccccacaactacgggctggtgctctacgaaaacaaagcggcctatgagcggcaggtcccaccacgagccgtcatcaacagtgcaggctacaaaatcctcacgtccgtggaccaatacctggagctcattggcaactccttaccagggaccacggcaaagtcgggcagtgcccccatcctcaagtgccccacacagttcccgctcatcctctggcatccttatgcgcgtcactactacttctgcatgatgacagaagccgagcaggacaagtggcaggctgtgctgcaggactgcatccggcactgcaacaatggaatccctgaggactccaaggtagagggccctgcgttcacagatgccatccgcatgtaccgacagtccaaggagctgtacggcacctgggagatgctgtgtgggaacgaggtgcagatcctgagcaacctggtgatggaggagctgggccctgagctgaaggcagagctcggcccgcggctgaaggggaaaccgcaggagcggcagcggcagtggatccagatctcggacgccgtgtaccacatggtgtacgagcaggccaaggcgcgcttcgaggaggtgctgtccaaggtgcagcaggtgcagccggccatgcaggccgtcatccgaactgacatggaccaaattatcacctccaaggagcaccttgccagcaagatccgagccttcatcctccccaaggcagaggtgtgcgtgcggaaccatgtccagccctacatcccatccatcctggaggccctgatggtccccaccagccagggcttcactgaggtgcgagatgtcttcttcaaggaggtcacggacatgaacctgaacgtcatcaacgagggcggcattgacaagctgggcgagtacatggagaagctgtcccggctggcgtaccaccccctgaagatgcagagctgctatgagaagatggagtcgctgcgactggacgggctgcagcagcgatttgatgtgtccagcacgtccgtgttcaagcagcgagcccagatccacatgcgggagcaaatggacaatgccgtgtatacgttcgagaccctcctgcaccaggagctggggaaggggcccaccaaggaggagctgtgcaagtccatccagcgggtcctggagcgggtgctgaagaaatacgactacgacagcagctctgtgcggaagaggttcttccgggaggcgctgctgcagatcagcatcccgttcctgctcaagaagctggcccctacctgcaagtcggagctgccccggttccaggagctgatcttcgaggactttgccaggttcatcctggtggaaaacacgtacgaggaggtggtgctgcagaccgtcatgaaggacatcctgcaggctgtgaaggaggccgcggtgcagaggaagcacaacctctaccgggacagcatggtcatgcacaacagcgaccccaacctgcacctgctggccgagggcgcccccatcgactggggcgaggagggtctcgaacgtatacacggcattgtccatttgctcccgcatgtggatctgggctcgctgcttgaacacggacgtgctggacacatcaaatcgctgctgcagcccgtccagtcgcagcgactccatcttctcatacagctctgcatcttcaggggctgtactacacccgggacagaa

SEQ ID NO: 316058 - DNA, 1992 bp, Homo sapiens
gccaaggcggccggctggagggacggggcccgaccgggagcggagccggagcggaagccgcagccgggcggcgggagcggcgggagcgggggaagcagggcgggccgggctccatggcgccagcggcgtccgcctgagcagcgcgggcaacagcggcggcgtcggccggatcgggccgcgacacctcctggccatgggggacgtgctgtccacgcacctggacgacgcccggcgccagcacatcgcagaaaaaaccgggaagatcctgacggagttcctccagttctatgaagaccagtatggcgtggctctcttcaacagcatgcgccatgagattgagggcacggggctgccgcaggcccagctgctctggcgcaaggtgccactggacgagcgcatcgtcttctcggggaacctcttccagcaccaggaggacagcaagaagtggagaaaccgcttcagcctcgtgccccacaactacgggctggtgctctacgaaaacaaagcggcctatgagcggcaggtcccaccacgagccgtcatcaacagtgcaggctacaaaatcctcacgtccgtggaccaatacctggagctcattggcaactccttaccagggaccacggcaaagtcgggcagtgcccccatcctcaagtgccccacacagttcccgctcatcctctggcatccttatgcgcgtcactactacttctgcatgatgacagaagccgagcaggacaagtggcaggctgtgctgcaggactgcatccggcactgcaacaatggaatccctgaggactccaaggtagagggccctgcgttcacagatgccatccgcatgtaccgacagtccaaggagctgtacggcacctgggagatgctgtgtgggaacgaggtgcagatcctgagcaacctggtgatggaggagctgggccctgagctgaaggcagagctcggcccgcggctgaaggggaaaccgcaggagcggcagcggcagtggatccagatctcggacgccgtgtaccacatggtgtacgagcaggccaaggcgcgcttcgaggaggtgctgtccaaggtgcagcaggtgcagccggccatgcaggccgtcatccgaactgacatggaccaaattatcacctccaaggagcaccttgccagcaagatccgagccttcatcctccccaaggcagaggtgtgcgtgcggaaccatgtccagccctacatcccatccatcctggaggccctgatggtccccaccagccagggcttcactgaggtgcgagatgtcttcttcaaggaggtcacggacatgaacctgaacgtcatcaacgagggcggcattgacaagctgggcgagtacatggagaagctgtcccggctggcgtaccaccccctgaagatgcagagctgctatgagaagatggagtcgctgcgactggacgggctgcagcagcgatttgatgtgtccagcacgtccgtgttcaagcagcgagcccagatccacatgcgggagcaaatggacaatgccgtgtatacgttcgagaccctcctgcaccaggagctggggaaggggcccaccaaggaggagctgtgcaagtccatccagcgggtcctggagcgggtgctgaagaaatacgactacgacagcagctctgtgcggaagaggttcttccgggaggcgctgctgcagatcagcatcccgttcctgctcaagaagctggcccctacctgcaagtcggagctgccccggttccaggagctgatcttcgaggactttgccaggttcatcctggtggaaaacacgtacgaggaggtggtgctgcagaccgtcatgaaggacatcctgcaggctgtgaaggaggccgcggtgcagaggaagcacaacctctaccgggacagcatggtcatgcacaacagcgaccccacagagagaaagggttaagtgagtcactgcaagttagctccctccccccacagagagagctcgggatcctt

SEQ ID NO: 316059 - DNA, 1869 bp, Homo sapiens
gccaaggcggccggctggagggacggggcccgaccgggagcggagccggagcggaagccgcagccgggcggcgggagcggcgggagcgggggaagcagggcgggccgggctccatggcgccagcggcgtccgcctgagcagcgcgggcaacagcggcggcgtcggccggatcgggccgcgacacctcctggccatgggggacgtgctgtccacgcacctggacgacgcccggcgccagcacatcgcagaaaaaaccgggaagatcctgacggagttcctccagttctatgaagaccagtatggcgtggctctcttcaacagcatgcgccatgagattgagggcacggggctgccgcaggcccagctgctctggcgcaaggtgccactggacgagcgcatcgtcttctcggggaacctcttccagcaccaggaggacagcaagaagtggagaaaccgcttcagcctcgtgccccacaactacgggctggtgctctacgaaaacaaagcggcctatgagcggcaggtcccaccacgagccgtcatcaacagtgcaggctacaaaatcctcacgtccgtggaccaatacctggagctcattggcaactccttaccagggaccacggcaaagtcgggcagtgcccccatcctcaagtgccccacacagttcccgctcatcctctggcatccttatgcgcgtcactactacttctgcatgatgacagaagccgagcaggacaagtggcaggctgtgctgcaggactgcatccggcactgcaacaatggaatccctgaggactccaaggtagagggccctgcgttcacagatgccatccgcatgtaccgacagtccaaggagctgtacggcacctgggagatgctgtgtgggaacgaggtgcagatcctgagcaacctggtgatggaggagctgggccctgagctgaaggcagagctcggcccgcggctgaaggggaaaccgcaggagcggcagcggcagtggatccagatctcggacgccgtgtaccacatggtgtacgagcaggccaaggcgcgcttcgaggaggtgctgtccaaggtgcagcaggtgcagccggccatgcaggccgtcatccgaactgacatggaccaaattatcacctccaaggagcaccttgccagcaagatccgagccttcatcctccccaaggcagaggtgtgcgtgcggaaccatgtccagccctacatcccatccatcctggaggccctgatggtccccaccagccagggcttcactgaggtgcgagatgtcttcttcaaggaggtcacggacatgaacctgaacgtcatcaacgagggcggcattgacaagctgggcgagtacatggagaagctgtcccggctggcgtaccaccccctgaagatgcagagctgctatgagaagatggagtcgctgcgactggacgggctgcagcagcgatttgatgtgtccagcacgtccgtgttcaagcagcgagcccagatccacatgcgggagcaaatggacaatgccgtgtatacgttcgagaccctcctgcaccaggagctggggaaggggcccaccaaggaggagctgtgcaagtccatccagcgggtcctggagcgggtgctgaagaaatacgactacgacagcagctctgtgcggaagaggttcttccgggaggcgctgctgcagatcagcatcccgttcctgctcaagaagctggcccctacctgcaagtcgaaccacgaggaggagatgaatgccctgagaggccaggtgggtggagatgtcaatgtggagatggacgctgcacctggcgtggacctgagccgcattctgaacgagatgcgtgaccgttgagatcagcatgtccc

SEQ ID NO: 316060 - DNA, 1883 bp, Homo sapiens
  misc_feature (1849)..(1849): n is a, c, g, or t
  misc_feature (1860)..(1860): n is a, c, g, or t
  misc_feature (1870)..(1870): n is a, c, g, or t
gccaaggcggccggctggagggacggggcccgaccgggagcggagccggagcggaagccgcagccgggcggcgggagcggcgggagcgggggaagcagggcgggccgggctccatggcgccagcggcgtccgcctgagcagcgcgggcaacagcggcggcgtcggccggatcgggccgcgacacctcctggccatgggggacgtgctgtccacgcacctggacgacgcccggcgccagcacatcgcagaaaaaaccgggaagatcctgacggagttcctccagttctatgaagaccagtatggcgtggctctcttcaacagcatgcgccatgagattgagggcacggggctgccgcaggcccagctgctctggcgcaaggtgccactggacgagcgcatcgtcttctcggggaacctcttccagcaccaggaggacagcaagaagtggagaaaccgcttcagcctcgtgccccacaactacgggctggtgctctacgaaaacaaagcggcctatgagcggcaggtcccaccacgagccgtcatcaacagtgcaggctacaaaatcctcacgtccgtggaccaatacctggagctcattggcaactccttaccagggaccacggcaaagtcgggcagtgcccccatcctcaagtgccccacacagttcccgctcatcctctggcatccttatgcgcgtcactactacttctgcatgatgacagaagccgagcaggacaagtggcaggctgtgctgcaggactgcatccggcactgcaacaatggaatccctgaggactccaaggtagagggccctgcgttcacagatgccatccgcatgtaccgacagtccaaggagctgtacggcacctgggagatgctgtgtgggaacgaggtgcagatcctgagcaacctggtgatggaggagctgggccctgagctgaaggcagagctcggcccgcggctgaaggggaaaccgcaggagcggcagcggcagtggatccagatctcggacgccgtgtaccacatggtgtacgagcaggccaaggcgcgcttcgaggaggtgctgtccaaggtgcagcaggtgcagccggccatgcaggccgtcatccgaactgacatggaccaaattatcacctccaaggagcaccttgccagcaagatccgagccttcatcctccccaaggcagaggtgtgcgtgcggaaccatgtccagccctacatcccatccatcctggaggccctgatggtccccaccagccagggcttcactgaggtgcgagatgtcttcttcaaggaggtcacggacatgaacctgaacgtcatcaacgagggcggcattgacaagctgggcgagtacatggagaagctgtcccggctggcgtaccaccccctgaagatgcagagctgctatgagaagatggagtcgctgcgactggacgggctgcagcagcgatttgatgtgtccagcacgtccgtgttcaagcagcgagcccagatccacatgcgggaggtagacccgaggctacgacccccaccccacaccctgtccactgccttccacaggccccctcgcccagggggtcccttctgctccgtcccgtcatgccatagccacgcttgcctggcacgctctctcctcctctgcttggaacatctgtgcctctgcccacctggctaattctgactcacttcccaggtctcagcttagagacctcttcctccaggaagctctccttgcgctcccaggccccttcccatatttcctgttgccttgaggcagggacttgctccagcgtgcagagctgtgagtgggcatagaccgcttgccattcctcagggccaatggagnccactgacctncacagggtcntcccagtcctgtc

SEQ ID NO: 316061 - DNA, 1612 bp, Homo sapiens
gccaaggcggccggctggagggacggggcccgaccgggagcggagccggagcggaagccgcagccgggcggcgggagcggcgggagcgggggaagcagggcgggccgggctccatggcgccagcggcgtccgcctgagcagcgcgggcaacagcggcggcgtcggccggatcgggccgcgacacctcctggccatgggggacgtgctgtccacgcacctggacgacgcccggcgccagcacatcgcagaaaaaaccgggaagatcctgacggagttcctccagttctatgaagaccagtatggcgtggctctcttcaacagcatgcgccatgagattgagggcacggggctgccgcaggcccagctgctctggcgcaaggtgccactggacgagcgcatcgtcttctcggggaacctcttccagcaccaggaggacagcaagaagtggagaaaccgcttcagcctcgtgccccacaactacgggctggtgctctacgaaaacaaagcggcctatgagcggcaggtcccaccacgagccgtcatcaacagtgcaggctacaaaatcctcacgtccgtggaccaatacctggagctcattggcaactccttaccagggaccacggcaaagtcgggcagtgcccccatcctcaagtgccccacacagttcccgctcatcctctggcatccttatgcgcgtcactactacttctgcatgatgacagaagccgagcaggacaagtggcaggctgtgctgcaggactgcatccggcactgcaacaatggaatccctgaggactccaaggtagagggccctgcgttcacagatgccatccgcatgtaccgacagtccaaggagctgtacggcacctgggagatgctgtgtgggaacgaggtgcagatcctgagcaacctggtgatggaggagctgggccctgagctgaaggcagagctcggcccgcggctgaaggggaaaccgcaggagcggcagcggcagtggatccagatctcggacgccgtgtaccacatggtgtacgagcaggccaaggcgcgcttcgaggaggtgctgtccaaggtgcagcaggtgcagccggccatgcaggccgtcatccgaactgacatggaccaaattatcacctccaaggagcaccttgccagcaagatccgagccttcatcctccccaaggcagaggtgtgcgtgcggaaccatgtccagccctacatcccatccatcctggaggccctgatggtccccaccagccagggcttcactgaggtgcgagatgtcttcttcaaggaggtcacggacatgaacctgaacgtcatcaacgagggcggcattgacaagctgggcgaggtgaggccggcaccgcccctaggagggggtctcctgagagtaggtctggtctgtcccagagggccccggctgcgtgactccgggcagccgttcccctccaaggccgtccctgtagacggggaggggctgctggggactaggggcagaggctgtgaggccagggctgttggagtcctcgtggggcctgcagtttgaggaaagagggaacattagctcccggccaccagcctttagaaaccaagagtggtgctaaaatag

SEQ ID NO: 316062 - DNA, 546 bp, Homo sapiens
gccaaggcggccggctggagggacggggcccgaccgggagcggagccggagcggaagccgcagccgggcggcgggagcggcgggagcgggggaagcagggcgggccgggctccatggcgccagcggcgtccgcctgagcagcgcgggcaacagcggcggcgtcggccggatcgggccgcgacacctcctggccatgggggacgtgctgtccacgcacctggacgacgcccggcgccagcacatcgcaggtcagaggagcaccagcctatggccctggacccctggggtattcagcgagttcctggaggacggtgggatggggctgtggttccagcaagaaaaaaccgggaagatcctgacggagttcctccagttctatgaagaccagtatggcctggtctctggcgcatctcttccctcttgtcccgaagatctgcgcctctagtgccttttgaggggttcccatcatccctccctgatattgtattgaaaatattatgcacactgttcatgcttctactaatcaataaacgctttatttaaaag

SEQ ID NO: 316063 - DNA, 949 bp, Homo sapiens
cgggggacgtctcccgcgggcgtcggcagggtcggcggcgtcggcagcagtgtcgacggcagcggcggcggcgggtgggaaatggcggagtatctggcctccatcttcggcaccgagaaagacaaagtcaactgttcattttatttcaaaattggagcatgtcgtcatggagacaggtgctctcggttgcacaataaaccgacgtttagccagaccattgccctcttgaacatttaccgtaaccctcaaaactcttcccagtctgctgacggtttgcgctgtgccgtgagcgatgtggagatgcaggaacactatgatgagttttttgaggaggtttttacagaaatggaggagaagtatggggaagtagaggagatgaacgtctgtgacaacctgggagaccacctggtggggaacgtgtacgtcaagtttcgccgtgaggaagatgcggaaaaggctgtgattgacttgaataaccgttggtttaatggacagccgatccacgccgagctgtcacccgtgacggacttcagagaagcctgctgccgtcagtatgagatgggagaatgcacacgaggcggcttctgcaacttcatgcatttgaagcccatttccagagagctgcggcgggagctgtatggccgccgtcgcaagaagcatagatcaagatcccgatcccgggagcgtcgttctcggtctagagaccgtggtcgtggcggtggcggtggcggtggtggaggtggcggcggacgggagcgtgacaggaggcggtcgagagatcgtgaaagatctgggcgattctgagccatgccatttttaccttatgtctgctagaaagtgttgtagttgattgaccaaaccagttcataaggggaattttttttaaaaaacaacaaaaaaaaaacatacaaagatgggtttctgaataaaatttgtagtgataacagta

SEQ ID NO: 316064 - DNA, 1332 bp, Homo sapiens
gtccggactggctgatcgcccgacgtccgggcctccgagtcgccgactcccggaagccgcctcgagccgcgctgaaagttgcctggagcatccgggccttttggacgtggacacgtttgttccaactttcggctgtgaatgtcctgtcgagcaagctctggtaccagcctcgccagtattcagtcgcttatctaacttagggtcctaagcgttggtgttttatccacttagccagcctcttgcctgtttaagcgaccgctgggccggcagtaaggagatatgacgagaaaaagtatggtggagactactggattaactatctaaccacaagagacgtgatccgctcttaacatacaggtgctcctggatttaccatgggattgcgttccgataaacccatcatgaatcgaaaatgcctttaataccccgataaacccatcatctaagttgaaaatttgtaagtcggtgactgttcttgaagacacaattctgatataaggaaaaagatgttttgattttttccttaaggttgcatgccttccctaatcaatcgttaggttaaaagcaaaacatttaatttcagctttaattgccaccttggcacgtactaatttccagtgagttggctgtagtttagactaaatggaatgttttcagacgtttgaaggataattcttactttgaaaacctaaagactcagcatctggcttaatctactctttagttatcttggcattcttcagtgccatacaaagttaacatgactttatgttttcaatgataaacccctaagtttgtcatagatgtttttaatgccacttttttcaaacgctatttaaaatgtttctcttttccaggatggagtctatcttgtaaaatgtcctcttcacacatggtagaatctcctgtgttgtttggatgaggaggctatatttctagcaaaattttaagccaaaatctaccagttatagtcactccagaaacatttagtgggggtcaactataggtcagtttctggagacttaaacatgggtaaaatttggatattatccttaaggaactcacggtatgatcttggcgaatgaatagaccagctctatcggaacaagagactcttctgagtttagggtgaagaactaacacatgtaggatcggggcatcattaatttctccttttcatatttgcatgtggcatgacttctgtcttgtaaaagtctatctccttatatttctgctataagcaaccacatttcaatctattgggctatactataaaggtcatggttttaattcagaaaagttgattatttaatctaggttacttgtgttttc

SEQ ID NO: 316065 - DNA, 7048 bp, Homo sapiens
tctttaatgttttgatttatgaaccgaatctcccctaactaaaccagtggccatggattgtggtataaccaagcatcttaagtgaccacccagttctttgattttggggggtgtcccaagtgttgggctgagagaaatcaactgttccctattctaaaagttttctttaatctggctggaggcactttctttatgtttttctggatcatagattacctgagaatgtgaaatgtgaagttaatttaggcattccaggtcagtgctggggagagcccattggagctcgatggggtcagtagtatgtgtcagcttaagcatcctagtttgatgcgtgggtttgttttggttggttttaggcaatcctagccacccttggctttcccattagactgcattgcctctttacgttaagcttccttcattaaatagccactgccagaatacctgagtgagaccaactgaattttactgttgaataattgggctcagtttagcttttcatcagggttgtcatggtacggtcatttcagttcaaagctgagtcaagtcagctttgggaagcctcccaggcctgagttcagttgactcagggctgtacttggcggcttatggaagaaacggggccctgatgcaggtctgagtggttcagtgtggacagtttgtcagacctccctcttaggtggggtgggcttcccagctgcacacctttgactgaggaactcttcatacaaccactcccctttaaacagagctagaaatggagctggctggttttataaaaccaccacttacaaaactgcttcacgtggatattgttgagactaaacatttatttttctaaatcatgcgagtgattgctttagcttgtaaatctctagcataattcagggtgggtttctttataagctgcttacagtgatatggacgttaagattcatgtaatatattagcctactaacttaaacatggtttgttttttcagacaacttgattttaagaagaacggtacagtgtaaggtttcaagtctgcctgatccagtttaaagcacaagggctaaaaggattttttttccttaaaagaaggatcggaaaagagcaaatgttttaagctattgtattatgtaaacagagatcccaccaagaaagtgtaaatcagagccgggtgtccatgacagttgacagacctgtttggtgtgcctgttttgctaggagaccagagaacttgatgtactgcagacagctgagttacgcatttggttttgaaaaattatcttgtgtgaggaatatgattataacgtgaatttttccacatcttggtgtctgctagcttgaagtacaagaaaatattagtattctactatttatcttgcattaaaacactttaacattgaaaacgtgggactaatcaaaacaatacagtttcttcttggttgctggctgacttgacccaagtcactgctcaaactctgttttcataatatgatggttttggtgtactcttcagaagacaaatgtctgacttgcgggaaaaaaacaaacgtttagccatttgcaaacaaattgtctctttgcaattgtctaatatatgcacagcagccagtagaattcccctttttatttttttttccccgcagaccatcttgattcaaaacatctatcgtaatccccaaaacagtgcacagacggctgacggctcacactgtaagtcccacagttggagaaatttttttaaaacaatggtgttaaagagcccactcttaattgagacaaataatgttggcttctgagctgctgacatagagctgttgcaaacaggacaaggtgctggaactccttggcgcacacagcaagaacttgatacttggccacgttcaggaggcttatcccttctagggagggtcactggcccggccacctccattgattgacatttgtcatgagagcaggtccgtccatgtgaaacggatttcaacattttgagccattcattggtctttacagtgactgaacccctggcctttattaagttctttgtgtaaaattaaaactcttaggaatattaaggaatcaataaggtaagttgcccagtaagtgtgggttttatttcaccattataatttttcctccaggaagtggagatttcatgatatgtaacaattgtatttctctaatacagtaattttttccatcagtttatgtaagcattattctttccgagttcattaaaaattttctgccacatctaagaacattttggtgctagcctggcaaactatttgtgcttttacctgaattggaattttgaaaaggagagttttcacgttctgtaagcagaagtacaagatgggcatatcatgagacctccgttacaccgcagtgttagggattcaaggcagccgccaactgagaaaacgcctctgcttctccagaaaataacttgctctcttttcagcactgaatctcaactgaagcacttgccagaggcagccggttaagtgtttacctttaattttccataatataaagttgttgcgttttgtatttcagaccattgccctcttgaacatttaccgtaaccctcaaaactcttcccagtctgctgacggtttgcgctgtaagttcatacaagttccttccccggttccctgggcttgcgtgtcagagctcagtgtccactccatctggtctgccgtgctagtgtcaaggaccgcgtttcactagaggtggcaaggagctttcgtcccactgaccccatggaaacctcttttggagatttgaactcccaccgtgtgttaaaagggaaaaagtaactggaaagggtgccctttaaaacagtctagagctgggccgggcgcggtggctcacgcctgtaatcccagcactttgggaggccgaggcgggtggatcatgaggtcaggagttcaagaccaatctggccaacatggtgaaaccccatctctactaaagatacaaaaattagctgggcgtggtggcagatgcctgcaatcccagcttctagggaggctgaggcagagaatcgcttgaacccgggaggcggaggttgcagtgaactgagatcgtgccgctgcactccagcctgggcgacagagtgagactccgtctccaaaaaaaaaaaaaaaaacagtctggagctgctgctgccccttcttcctttactttggccgtcatcctagagggaatgtactggaattaaacgtcgagtcatattcttccctcttagagcaacaaaatttgaatgtttctctcactttctggaatttttaaaaagcaaactttttaagttattttttcagattttatttctcattagccttttttccttgaactccattttggagtgcaccctgtagttgtaagagcattgtgctgagagcgttccccaaatgagggtctgcagcttgcactgacccctgagttcctcacccaccagccccgtgccgacccgtctaacccgtgtgggggtgctccactcaaataggcccttggcagaaaagattgtccgttctgtccacacactgcctggatacagtctccagctctaggagatggaattggtttgctccatttagaaatagatcaaaactgggcattcagtagatggtaccaatatcttcctgtactgggaaatactaaatttagattgtgaatatttacctaatgataatttttagagaaggagatatcatagatgagtatgattgggaagttcagaaaactaaaatttgatttttacagccatccaactatagaatcattagaatttagtcatttatggataaattaaaatgaacacctggactcttgttaaaatcagaaagtccaaaccaaagataggcacttcccattcaccattctgttttaaagcagtaaaaattgaggtgcccttggatatccacaagcctaaattgagtacacccttgaaccagagcccctcagttaatggggtgaccgacatggggtagctgatcccagggggcattcccctctcgagctggccctgcactgggtggcctggggattgtgcttccttgcacagtggtgcacatttctatgtgtggatgagattttcttgtcaacttttcctgccaagacactaaatgcttttcagtgctaatactgacctgatagtagagatttctttccctgagtcggatggtagcaggatttacttggtaacccttggtttaaaatacctgtttttttgtttgtttgttttcttttgttttttaaggaaataagatcaataggcggagggaaattgtttctatatgcacttattaaataatttttgttaacaaccctgccctgggataaaagtgaatggaagtacatgactgagtaacagtaattaattctttgccctgatcgtttatttggggactgtatatgctttcttgactgacaatagaatgttgtattagttttcattgtgtctttatttgcagttcacagcacttttgttttgcatatgctacaaactaaaagtttagcaattacgttatattccaattctggagtccagattgtacaaattagatgaaattctaattcgtcattttaggaagaaatcaattacctaaaattactggctcttttcaacataccctttagtatgtaaaaaaataagcttcaaatgcgtgggttaaagttaactatcaatcccagtttaagaatgatatttctgtaagaaaactgctttattttccaagttgtagtatttaacataggctgagtcacaaataagtttttaattgtatcttaatgcagttgtctctgcctttcaagtcactttgattgaaacattttaagcagaacaaatatagccaataatttaaaataatcaccccaaaaccatttctcaaacctgctaaaactttgagcatgtgaataattttctcctcttcacattcttcttatgtgggaaggaagtgaatttgaaatattaaaatctgccctttggaataggctactttggccgtttataacttgatttctactcggggaggaaggtacattcccaatagctttccaattgggatatcctgtgatatgattggcaggctgtccgagtagttacacttaataaaatttgggttcgaaagcagattcctggaagttcaaaaataactaaaacagccccggataggttagaaagtgaacttaaatcattctcagaattagaaaataagaagttattttttatcttcaaagataaaaagggggccgggcacggtggctcacgcctgtaatcccagcactttggaaagccgaggcaagtggatcacgaggtcgagagattgagaccatcctggccaacatggtggaaccccgtctctactaaaactacaaaaattagccaagatcacgccattgcactccagcctggagacagtgagacgccgtctcaaaaaaaagaaaaaaaaaagaatgctttcatcagcaaaacattgtaacattccctttacttgagggcgtccacaataccgtaaggttgcgtgaactgtcctactgaatcttcatggttgcttggattttaatcacatcagaagaatttgagagcataccatggctggcagtccataaaagactagttaggaacatcagcttttaatcatcgaccctgctttcaggtttcattttaaacttatagaagaggggaagacatcagtgtgcttatttggcctttactctaaatcttaaaaggaagaaaattttaatatttcttagtttgagcccaggtgcggtgtctcacgcctgtaatcacagcactttgggaggccaaggcaggcggatcacttgaggtcaggagttcaagaccagcctgccaacgtggtgaaaccctgtctgtactaaaaattaaaaaaaaaaaaaaaaattagccgggcgtggtggcagtcgcctgtagtcccagcaactccagaggctgagacaggagaatcgcttgaaccccagaggtggaggttgcagtgagctgagatggtgccactgcactccagcctgggcgacagagccagactgcatcttgtgggtgtaaaaaaaaaatttgtagtttgagagtcaactttttcctcacagtttctgaaaatgtggcccttttgatgctgattaaagctggttgtgattttaacaccttagtagccagaatcgagactgtcatggggacatttaaaatctcaccacacttgacaccattcacaagtagccatgtggctcagtctcctgagtgctcctgcagagtgcagctctgccaggcttttctctagataatctcgtgtgtgttactgtagcagtttgagtttaaacacaagagttcactcggttaacatgttctaaccagcaagatttctgttgtttgcaggtgccgtgagcgatgtggagatgcaggaacactatgatgagttttttgaggaggtttttacagaaatggaggagaagtatggggaagtagaggagatgaacgtctgtgacaacctgggagaccacctggtggggaacgtgtacgtcaagtttcgccgtgaggaagatgcggaaaaggctgtgattgacttgaataaccgttggtttaatggacagccgatccacgccgagctgtcacccgtgacggacttcagagaagcctgctgccgtcagtatgagatgggagaatgcacacgaggcggcttctgcaacttcatgcatttgaagcccatttccagagagctgcggcgggagctgtatggccgccgtcgcaagaagcatagatcaagatcccgatcccgggagcgtcgttctcggtctagagaccgtggtcgtggcggtggcggtggcggtggtggaggtggcggcggacgggagcgtgacaggaggcggtcgagagatcgtgaaagatctgggcgattctgagccatgccatttttaccttatgtctgctagaaagtgttgtagttgattgaccaaaccagttcataaggggaattttttttaaaaaacaacaaaaaaaaaacatacaaagatgggtttctgaataaaatttgtagtgataacagta

SEQ ID NO: 316066 - DNA, 4745 bp, Homo sapiens
tctttaatgttttgatttatgaaccgaatctcccctaactaaaccagtggccatggattgtggtataaccaagcatcttaagtgaccacccagttctttgattttggggggtgtcccaagtgttgggctgagagaaatcaactgttccctattctaaaagttttctttaatctggctggaggcactttctttatgtttttctggatcatagattacctgagaatgtgaaatgtgaagttaatttaggcattccaggtcagtgctggggagagcccattggagctcgatggggtcagtagtatgtgtcagcttaagcatcctagtttgatgcgtgggtttgttttggttggttttaggcaatcctagccacccttggctttcccattagactgcattgcctctttacgttaagcttccttcattaaatagccactgccagaatacctgagtgagaccaactgaattttactgttgaataattgggctcagtttagcttttcatcagggttgtcatggtacggtcatttcagttcaaagctgagtcaagtcagctttgggaagcctcccaggcctgagttcagttgactcagggctgtacttggcggcttatggaagaaacggggccctgatgcaggtctgagtggttcagtgtggacagtttgtcagacctccctcttaggtggggtgggcttcccagctgcacacctttgactgaggaactcttcatacaaccactcccctttaaacagagctagaaatggagctggctggttttataaaaccaccacttacaaaactgcttcacgtggatattgttgagactaaacatttatttttctaaatcatgcgagtgattgctttagcttgtaaatctctagcataattcagggtgggtttctttataagctgcttacagtgatatggacgttaagattcatgtaatatattagcctactaacttaaacatggtttgttttttcagacaacttgattttaagaagaacggtacagtgtaaggtttcaagtctgcctgatccagtttaaagcacaagggctaaaaggattttttttccttaaaagaaggatcggaaaagagcaaatgttttaagctattgtattatgtaaacagagatcccaccaagaaagtgtaaatcagagccgggtgtccatgacagttgacagacctgtttggtgtgcctgttttgctaggagaccagagaacttgatgtactgcagacagctgagttacgcatttggttttgaaaaattatcttgtgtgaggaatatgattataacgtgaatttttccacatcttggtgtctgctagcttgaagtacaagaaaatattagtattctactatttatcttgcattaaaacactttaacattgaaaacgtgggactaatcaaaacaatacagtttcttcttggttgctggctgacttgacccaagtcactgctcaaactctgttttcataatatgatggttttggtgtactcttcagaagacaaatgtctgacttgcgggaaaaaaacaaacgtttagccatttgcaaacaaattgtctctttgcaattgtctaatatatgcacagcagccagtagaattcccctttttatttttttttccccgcagaccatcttgattcaaaacatctatcgtaatccccaaaacagtgcacagacggctgacggctcacactgtaagtcccacagttggagaaatttttttaaaacaatggtgttaaagagcccactcttaattgagacaaataatgttggcttctgagctgctgacatagagctgttgcaaacaggacaaggtgctggaactccttggcgcacacagcaagaacttgatacttggccacgttcaggaggcttatcccttctagggagggtcactggcccggccacctccattgattgacatttgtcatgagagcaggtccgtccatgtgaaacggatttcaacattttgagccattcattggtctttacagtgactgaacccctggcctttattaagttctttgtgtaaaattaaaactcttaggaatattaaggaatcaataaggtaagttgcccagtaagtgtgggttttatttcaccattataatttttcctccaggaagtggagatttcatgatatgtaacaattgtatttctctaatacagtaattttttccatcagtttatgtaagcattattctttccgagttcattaaaaattttctgccacatctaagaacattttggtgctagcctggcaaactatttgtgcttttacctgaattggaattttgaaaaggagagttttcacgttctgtaagcagaagtacaagatgggcatatcatgagacctccgttacaccgcagtgttagggattcaaggcagccgccaactgagaaaacgcctctgcttctccagaaaataacttgctctcttttcagcactgaatctcaactgaagcacttgccagaggcagccggttaagtgtttacctttaattttccataatataaagttgttgcgttttgtatttcagaccattgccctcttgaacatttaccgtaaccctcaaaactcttcccagtctgctgacggtttgcgctgtaagttcatacaagttccttccccggttccctgggcttgcgtgtcagagctcagtgtccactccatctggtctgccgtgctagtgtcaaggaccgcgtttcactagaggtggcaaggagctttcgtcccactgaccccatggaaacctcttttggagatttgaactcccaccgtgtgttaaaagggaaaaagtaactggaaagggtgccctttaaaacagtctagagctgggccgggcgcggtggctcacgcctgtaatcccagcactttgggaggccgaggcgggtggatcatgaggtcaggagttcaagaccaatctggccaacatggtgaaaccccatctctactaaagatacaaaaattagctgggcgtggtggcagatgcctgcaatcccagcttctagggaggctgaggcagagaatcgcttgaacccgggaggcggaggttgcagtgaactgagatcgtgccgctgcactccagcctgggcgacagagtgagactccgtctcaaaaaaaagaaaaaaaaaagaatgctttcatcagcaaaacattgtaacattccctttacttgagggcgtccacaataccgtaaggttgcgtgaactgtcctactgaatcttcatggttgcttggattttaatcacatcagaagaatttgagagcataccatggctggcagtccataaaagactagttaggaacatcagcttttaatcatcgaccctgctttcaggtttcattttaaacttatagaagaggggaagacatcagtgtgcttatttggcctttactctaaatcttaaaaggaagaaaattttaatatttcttagtttgagcccaggtgcggtgtctcacgcctgtaatcacagcactttgggaggccaaggcaggcggatcacttgaggtcaggagttcaagaccagcctgccaacgtggtgaaaccctgtctgtactaaaaattaaaaaaaaaaaaaaaaattagccgggcgtggtggcagtcgcctgtagtcccagcaactccagaggctgagacaggagaatcgcttgaaccccagaggtggaggttgcagtgagctgagatggtgccactgcactccagcctgggcgacagagccagactgcatcttgtgggtgtaaaaaaaaaatttgtagtttgagagtcaactttttcctcacagtttctgaaaatgtggcccttttgatgctgattaaagctggttgtgattttaacaccttagtagccagaatcgagactgtcatggggacatttaaaatctcaccacacttgacaccattcacaagtagccatgtggctcagtctcctgagtgctcctgcagagtgcagctctgccaggcttttctctagataatctcgtgtgtgttactgtagcagtttgagtttaaacacaagagttcactcggttaacatgttctaaccagcaagatttctgttgtttgcaggtgccgtgagcgatgtggagatgcaggaacactatgatgagttttttgaggaggtttttacagaaatggaggagaagtatggggaagtagaggagatgaacgtctgtgacaacctgggagaccacctggtggggaacgtgtacgtcaagtttcgccgtgaggaagatgcggaaaaggctgtgattgacttgaataaccgttggtttaatggacagccgatccacgccgagctgtcacccgtgacggacttcagagaagcctgctgccgtcagtatgagatgggagaatgcacacgaggcggcttctgcaacttcatgcatttgaagcccatttccagagagctgcggcgggagctgtatggccgccgtcgcaagaagcatagatcaagatcccgatcccgggagcgtcgttctcggtctagagaccgtggtcgtggcggtggcggtggcggtggtggaggtggcggcggacgggagcgtgacaggaggcggtcgagagatcgtgaaagatctgggcgattctgagccatgccatttttaccttatgtctgctagaaagtgttgtagttgattgaccaaaccagttcataaggggaattttttttaaaaaacaacaaaaaaaaaacatacaaagatgggtttctgaataaaatttgtagtgataacagta

SEQ ID NO: 316067 - DNA, 6991 bp, Homo sapiens
tctttaatgttttgatttatgaaccgaatctcccctaactaaaccagtggccatggattgtggtataaccaagcatcttaagtgaccacccagttctttgattttggggggtgtcccaagtgttgggctgagagaaatcaactgttccctattctaaaagttttctttaatctggctggaggcactttctttatgtttttctggatcatagattacctgagaatgtgaaatgtgaagttaatttaggcattccaggtcagtgctggggagagcccattggagctcgatggggtcagtagtatgtgtcagcttaagcatcctagtttgatgcgtgggtttgttttggttggttttaggcaatcctagccacccttggctttcccattagactgcattgcctctttacgttaagcttccttcattaaatagccactgccagaatacctgagtgagaccaactgaattttactgttgaataattgggctcagtttagcttttcatcagggttgtcatggtacggtcatttcagttcaaagctgagtcaagtcagctttgggaagcctcccaggcctgagttcagttgactcagggctgtacttggcggcttatggaagaaacggggccctgatgcaggtctgagtggttcagtgtggacagtttgtcagacctccctcttaggtggggtgggcttcccagctgcacacctttgactgaggaactcttcatacaaccactcccctttaaacagagctagaaatggagctggctggttttataaaaccaccacttacaaaactgcttcacgtggatattgttgagactaaacatttatttttctaaatcatgcgagtgattgctttagcttgtaaatctctagcataattcagggtgggtttctttataagctgcttacagtgatatggacgttaagattcatgtaatatattagcctactaacttaaacatggtttgttttttcagacaacttgattttaagaagaacggtacagtgtaaggtttcaagtctgcctgatccagtttaaagcacaagggctaaaaggattttttttccttaaaagaaggatcggaaaagagcaaatgttttaagctattgtattatgtaaacagagatcccaccaagaaagtgtaaatcagagccgggtgtccatgacagttgacagacctgtttggtgtgcctgttttgctaggagaccagagaacttgatgtactgcagacagctgagttacgcatttggttttgaaaaattatcttgtgtgaggaatatgattataacgtgaatttttccacatcttggtgtctgctagcttgaagtacaagaaaatattagtattctactatttatcttgcattaaaacactttaacattgaaaacgtgggactaatcaaaacaatacagtttcttcttggttgctggctgacttgacccaagtcactgctcaaactctgttttcataatatgatggttttggtgtactcttcagaagacaaatgtctgacttgcgggaaaaaaacaaacgtttagccatttgcaaacaaattgtctctttgcaattgtctaatatatgcacagcagccagtagaattcccctttttatttttttttccccgcagaccatcttgattcaaaacatctatcgtaatccccaaaacagtgcacagacggctgacggctcacactgtaagtcccacagttggagaaatttttttaaaacaatggtgttaaagagcccactcttaattgagacaaataatgttggcttctgagctgctgacatagagctgttgcaaacaggacaaggtgctggaactccttggcgcacacagcaagaacttgatacttggccacgttcaggaggcttatcccttctagggagggtcactggcccggccacctccattgattgacatttgtcatgagagcaggtccgtccatgtgaaacggatttcaacattttgagccattcattggtctttacagtgactgaacccctggcctttattaagttctttgtgtaaaattaaaactcttaggaatattaaggaatcaataaggtaagttgcccagtaagtgtgggttttatttcaccattataatttttcctccaggaagtggagatttcatgatatgtaacaattgtatttctctaatacagtaattttttccatcagtttatgtaagcattattctttccgagttcattaaaaattttctgccacatctaagaacattttggtgctagcctggcaaactatttgtgcttttacctgaattggaattttgaaaaggagagttttcacgttctgtaagcagaagtacaagatgggcatatcatgagacctccgttacaccgcagtgttagggattcaaggcagccgccaactgagaaaacgcctctgcttctccagaaaataacttgctctcttttcagcactgaatctcaactgaagcacttgccagaggcagccggttaagtgtttacctttaattttccataatataaagttgttgcgttttgtatttcagaccattgccctcttgaacatttaccgtaaccctcaaaactcttcccagtctgctgacggtttgcgctgtaagttcatacaagttccttccccggttccctgggcttgcgtgtcagagctcagtgtccactccatctggtctgccgtgctagtgtcaaggaccgcgtttcactagaggtggcaaggagctttcgtcccactgaccccatggaaacctcttttggagatttgaactcccaccgtgtgttaaaagggaaaaagtaactggaaagggtgccctttaaaacagtctagagctgggccgggcgcggtggctcacgcctgtaatcccagcactttgggaggccgaggcgggtggatcatgaggtcaggagttcaagaccaatctggccaacatggtgaaaccccatctctactaaagatacaaaaattagctgggcgtggtggcagatgcctgcaatcccagcttctagggaggctgaggcagagaatcgcttgaacccgggaggcggaggttgcagtgaactgagatcgtgccgctgcactccagcctgggcgacagagtgagactccgtctccaaaaaaaaaaaaaaaaacagtctggagctgctgctgccccttcttcctttactttggccgtcatcctagagggaatgtactggaattaaacgtcgagtcatattcttccctcttagagcaacaaaatttgaatgtttctctcactttctggaatttttaaaaagcaaactttttaagttattttttcagattttatttctcattagccttttttccttgaactccattttggagtgcaccctgtagttgtaagagcattgtgctgagagcgttccccaaatgagggtctgcagcttgcactgacccctgagttcctcacccaccagccccgtgccgacccgtctaacccgtgtgggggtgctccactcaaataggcccttggcagaaaagattgtccgttctgtccacacactgcctggatacagtctccagctctaggagatggaattggtttgctccatttagaaatagatcaaaactgggcattcagtagatggtaccaatatcttcctgtactgggaaatactaaatttagattgtgaatatttacctaatgataatttttagagaaggagatatcatagatgagtatgattgggaagttcagaaaactaaaatttgatttttacagccatccaactatagaatcattagaatttagtcatttatggataaattaaaatgaacacctggactcttgttaaaatcagaaagtccaaaccaaagataggcacttcccattcaccattctgttttaaagcacagagcccctcagttaatggggtgaccgacatggggtagctgatcccagggggcattcccctctcgagctggccctgcactgggtggcctggggattgtgcttccttgcacagtggtgcacatttctatgtgtggatgagattttcttgtcaacttttcctgccaagacactaaatgcttttcagtgctaatactgacctgatagtagagatttctttccctgagtcggatggtagcaggatttacttggtaacccttggtttaaaatacctgtttttttgtttgtttgttttcttttgttttttaaggaaataagatcaataggcggagggaaattgtttctatatgcacttattaaataatttttgttaacaaccctgccctgggataaaagtgaatggaagtacatgactgagtaacagtaattaattctttgccctgatcgtttatttggggactgtatatgctttcttgactgacaatagaatgttgtattagttttcattgtgtctttatttgcagttcacagcacttttgttttgcatatgctacaaactaaaagtttagcaattacgttatattccaattctggagtccagattgtacaaattagatgaaattctaattcgtcattttaggaagaaatcaattacctaaaattactggctcttttcaacataccctttagtatgtaaaaaaataagcttcaaatgcgtgggttaaagttaactatcaatcccagtttaagaatgatatttctgtaagaaaactgctttattttccaagttgtagtatttaacataggctgagtcacaaataagtttttaattgtatcttaatgcagttgtctctgcctttcaagtcactttgattgaaacattttaagcagaacaaatatagccaataatttaaaataatcaccccaaaaccatttctcaaacctgctaaaactttgagcatgtgaataattttctcctcttcacattcttcttatgtgggaaggaagtgaatttgaaatattaaaatctgccctttggaataggctactttggccgtttataacttgatttctactcggggaggaaggtacattcccaatagctttccaattgggatatcctgtgatatgattggcaggctgtccgagtagttacacttaataaaatttgggttcgaaagcagattcctggaagttcaaaaataactaaaacagccccggataggttagaaagtgaacttaaatcattctcagaattagaaaataagaagttattttttatcttcaaagataaaaagggggccgggcacggtggctcacgcctgtaatcccagcactttggaaagccgaggcaagtggatcacgaggtcgagagattgagaccatcctggccaacatggtggaaccccgtctctactaaaactacaaaaattagccaagatcacgccattgcactccagcctggagacagtgagacgccgtctcaaaaaaaagaaaaaaaaaagaatgctttcatcagcaaaacattgtaacattccctttacttgagggcgtccacaataccgtaaggttgcgtgaactgtcctactgaatcttcatggttgcttggattttaatcacatcagaagaatttgagagcataccatggctggcagtccataaaagactagttaggaacatcagcttttaatcatcgaccctgctttcaggtttcattttaaacttatagaagaggggaagacatcagtgtgcttatttggcctttactctaaatcttaaaaggaagaaaattttaatatttcttagtttgagcccaggtgcggtgtctcacgcctgtaatcacagcactttgggaggccaaggcaggcggatcacttgaggtcaggagttcaagaccagcctgccaacgtggtgaaaccctgtctgtactaaaaattaaaaaaaaaaaaaaaaattagccgggcgtggtggcagtcgcctgtagtcccagcaactccagaggctgagacaggagaatcgcttgaaccccagaggtggaggttgcagtgagctgagatggtgccactgcactccagcctgggcgacagagccagactgcatcttgtgggtgtaaaaaaaaaatttgtagtttgagagtcaactttttcctcacagtttctgaaaatgtggcccttttgatgctgattaaagctggttgtgattttaacaccttagtagccagaatcgagactgtcatggggacatttaaaatctcaccacacttgacaccattcacaagtagccatgtggctcagtctcctgagtgctcctgcagagtgcagctctgccaggcttttctctagataatctcgtgtgtgttactgtagcagtttgagtttaaacacaagagttcactcggttaacatgttctaaccagcaagatttctgttgtttgcaggtgccgtgagcgatgtggagatgcaggaacactatgatgagttttttgaggaggtttttacagaaatggaggagaagtatggggaagtagaggagatgaacgtctgtgacaacctgggagaccacctggtggggaacgtgtacgtcaagtttcgccgtgaggaagatgcggaaaaggctgtgattgacttgaataaccgttggtttaatggacagccgatccacgccgagctgtcacccgtgacggacttcagagaagcctgctgccgtcagtatgagatgggagaatgcacacgaggcggcttctgcaacttcatgcatttgaagcccatttccagagagctgcggcgggagctgtatggccgccgtcgcaagaagcatagatcaagatcccgatcccgggagcgtcgttctcggtctagagaccgtggtcgtggcggtggcggtggcggtggtggaggtggcggcggacgggagcgtgacaggaggcggtcgagagatcgtgaaagatctgggcgattctgagccatgccatttttaccttatgtctgctagaaagtgttgtagttgattgaccaaaccagttcataaggggaattttttttaaaaaacaacaaaaaaaaaacatacaaagatgggtttctgaataaaatttgtagtgataacagta

SEQ ID NO: 316068 - DNA, 7205 bp, Homo sapiens
tctttaatgttttgatttatgaaccgaatctcccctaactaaaccagtggccatggattgtggtataaccaagcatcttaagtgaccacccagttctttgattttggggggtgtcccaagtgttgggctgagagaaatcaactgttccctattctaaaagttttctttaatctggctggaggcactttctttatgtttttctggatcatagattacctgagaatgtgaaatgtgaagttaatttaggcattccaggtcagtgctggggagagcccattggagctcgatggggtcagtagtatgtgtcagcttaagcatcctagtttgatgcgtgggtttgttttggttggttttaggcaatcctagccacccttggctttcccattagactgcattgcctctttacgttaagcttccttcattaaatagccactgccagaatacctgagtgagaccaactgaattttactgttgaataattgggctcagtttagcttttcatcagggttgtcatggtacggtcatttcagttcaaagctgagtcaagtcagctttgggaagcctcccaggcctgagttcagttgactcagggctgtacttggcggcttatggaagaaacggggccctgatgcaggtctgagtggttcagtgtggacagtttgtcagacctccctcttaggtggggtgggcttcccagctgcacacctttgactgaggaactcttcatacaaccactcccctttaaacagagctagaaatggagctggctggttttataaaaccaccacttacaaaactgcttcacgtggatattgttgagactaaacatttatttttctaaatcatgcgagtgattgctttagcttgtaaatctctagcataattcagggtgggtttctttataagctgcttacagtgatatggacgttaagattcatgtaatatattagcctactaacttaaacatggtttgttttttcagacaacttgattttaagaagaacggtacagtgtaaggtttcaagtctgcctgatccagtttaaagcacaagggctaaaaggattttttttccttaaaagaaggatcggaaaagagcaaatgttttaagctattgtattatgtaaacagagatcccaccaagaaagtgtaaatcagagccgggtgtccatgacagttgacagacctgtttggtgtgcctgttttgctaggagaccagagaacttgatgtactgcagacagctgagttacgcatttggttttgaaaaattatcttgtgtgaggaatatgattataacgtgaatttttccacatcttggtgtctgctagcttgaagtacaagaaaatattagtattctactatttatcttgcattaaaacactttaacattgaaaacgtgggactaatcaaaacaatacagtttcttcttggttgctggctgacttgacccaagtcactgctcaaactctgttttcataatatgatggttttggtgtactcttcagaagacaaatgtctgacttgcgggaaaaaaacaaacgtttagccatttgcaaacaaattgtctctttgcaattgtctaatatatgcacagcagccagtagaattcccctttttatttttttttccccgcagaccatcttgattcaaaacatctatcgtaatccccaaaacagtgcacagacggctgacggctcacactgtaagtcccacagttggagaaatttttttaaaacaatggtgttaaagagcccactcttaattgagacaaataatgttggcttctgagctgctgacatagagctgttgcaaacaggacaaggtgctggaactccttggcgcacacagcaagaacttgatacttggccacgttcaggaggcttatcccttctagggagggtcactggcccggccacctccattgattgacatttgtcatgagagcaggtccgtccatgtgaaacggatttcaacattttgagccattcattggtctttacagtgactgaacccctggcctttattaagttctttgtgtaaaattaaaactcttaggaatattaaggaatcaataaggtaagttgcccagtaagtgtgggttttatttcaccattataatttttcctccaggaagtggagatttcatgatatgtaacaattgtatttctctaatacagtaattttttccatcagtttatgtaagcattattctttccgagttcattaaaaattttctgccacatctaagaacattttggtgctagcctggcaaactatttgtgcttttacctgaattggaattttgaaaaggagagttttcacgttctgtaagcagaagtacaagatgggcatatcatgagacctccgttacaccgcagtgttagggattcaaggcagccgccaactgagaaaacgcctctgcttctccagaaaataacttgctctcttttcagcactgaatctcaactgaagcacttgccagaggcagccggttaagtgtttacctttaattttccataatataaagttgttgcgttttgtatttcagaccattgccctcttgaacatttaccgtaaccctcaaaactcttcccagtctgctgacggtttgcgctgtaagttcatacaagttccttccccggttccctgggcttgcgtgtcagagctcagtgtccactccatctggtctgccgtgctagtgtcaaggaccgcgtttcactagaggtggcaaggagctttcgtcccactgaccccatggaaacctcttttggagatttgaactcccaccgtgtgttaaaagggaaaaagtaactggaaagggtgccctttaaaacagtctagagctgggccgggcgcggtggctcacgcctgtaatcccagcactttgggaggccgaggcgggtggatcatgaggtcaggagttcaagaccaatctggccaacatggtgaaaccccatctctactaaagatacaaaaattagctgggcgtggtggcagatgcctgcaatcccagcttctagggaggctgaggcagagaatcgcttgaacccgggaggcggaggttgcagtgaactgagatcgtgccgctgcactccagcctgggcgacagagtgagactccgtctccaaaaaaaaaaaaaaaaacagtctggagctgctgctgccccttcttcctttactttggccgtcatcctagagggaatgtactggaattaaacgtcgagtcatattcttccctcttagagcaacaaaatttgaatgtttctctcactttctggaatttttaaaaagcaaactttttaagttattttttcagattttatttctcattagccttttttccttgaactccattttggagtgcaccctgtagttgtaagagcattgtgctgagagcgttccccaaatgagggtctgcagcttgcactgacccctgagttcctcacccaccagccccgtgccgacccgtctaacccgtgtgggggtgctccactcaaataggcccttggcagaaaagattgtccgttctgtccacacactgcctggatacagtctccagctctaggagatggaattggtttgctccatttagaaatagatcaaaactgggcattcagtagatggtaccaatatcttcctgtactgggaaatactaaatttagattgtgaatatttacctaatgataatttttagagaaggagatatcatagatgagtatgattgggaagttcagaaaactaaaatttgatttttacagccatccaactatagaatcattagaatttagtcatttatggataaattaaaatgaacacctggactcttgttaaaatcagaaagtccaaaccaaagataggcacttcccattcaccattctgttttaaagcagtaaaaattgaggtgcccttggatatccacaagcctaaattgagtacacccttgaaccagagcccctcagttaatggggtgaccgacatggggtagctgatcccagggggcattcccctctcgagctggccctgcactgggtggcctggggattgtgcttccttgcacagtggtgcacatttctatgtgtggatgagattttcttgtcaacttttcctgccaagacactaaatgcttttcagtgctaatactgacctgatagtagagatttctttccctgagtcggatggtagcaggatttacttggtaacccttggtttaaaatacctgtttttttgtttgtttgttttcttttgttttttaaggaaataagatcaataggcggagggaaattgtttctatatgcacttattaaataatttttgttaacaaccctgccctgggataaaagtgaatggaagtacatgactgagtaacagtaattaattctttgccctgatcgtttatttggggactgtatatgctttcttgactgacaatagaatgttgtattagttttcattgtgtctttatttgcagttcacagcacttttgttttgcatatgctacaaactaaaagtttagcaattacgttatattccaattctggagtccagattgtacaaattagatgaaattctaattcgtcattttaggaagaaatcaattacctaaaattactggctcttttcaacataccctttagtatgtaaaaaaataagcttcaaatgcgtgggttaaagttaactatcaatcccagtttaagaatgatatttctgtaagaaaactgctttattttccaagttgtagtatttaacataggctgagtcacaaataagtttttaattgtatcttaatgcagttgtctctgcctttcaagtcactttgattgaaacattttaagcagaacaaatatagccaataatttaaaataatcaccccaaaaccatttctcaaacctgctaaaactttgagcatgtgaataattttctcctcttcacattcttcttatgtgggaaggaagtgaatttgaaatattaaaatctgccctttggaataggctactttggccgtttataacttgatttctactcggggaggaaggtacattcccaatagctttccaattgggatatcctgtgatatgattggcaggctgtccgagtagttacacttaataaaatttgggttcgaaagcagattcctggaagttcaaaaataactaaaacagccccggataggttagaaagtgaacttaaatcattctcagaattagaaaataagaagttattttttatcttcaaagataaaaagggggccgggcacggtggctcacgcctgtaatcccagcactttggaaagccgaggcaagtggatcacgaggtcgagagattgagaccatcctggccaacatggtggaaccccgtctctactaaaactacaaaaattagccaagatcacgccattgcactccagcctggagacagtgagacgccgtctcaaaaaaaagaaaaaaaaaagaatgctttcatcagcaaaacattgtaacattccctttacttgagggcgtccacaataccgtaaggttgcgtgaactgtcctactgaatcttcatggttgcttggattttaatcacatcagaagaatttgagagcataccatggctggcagtccataaaagactagttaggaacatcagcttttaatcatcgaccctgctttcaggtttcattttaaacttatagaagaggggaagacatcagtgtgcttatttggcctttactctaaatcttaaaaggaagaaaattttaatatttcttagtttgagcccaggtgcggtgtctcacgcctgtaatcacagcactttgggaggccaaggcaggcggatcacttgaggtcaggagttcaagaccagcctgccaacgtggtgaaaccctgtctgtactaaaaattaaaaaaaaaaaaaaaaattagccgggcgtggtggcagtcgcctgtagtcccagcaactccagaggctgagacaggagaatcgcttgaaccccagaggtggaggttgcagtgagctgagatggtgccactgcactccagcctgggcgacagagccagactgcatcttgtgggtgtaaaaaaaaaatttgtagtttgagagtcaactttttcctcacagtttctgaaaatgtggcccttttgatgctgattaaagctggttgtgattttaacaccttagtagccagaatcgagactgtcatggggacatttaaaatctcaccacacttgacaccattcacaagtagccatgtggctcagtctcctgagtgctcctgcagagtgcagctctgccaggcttttctctagataatctcgtgtgtgttactgtagcagtttgagtttaaacacaagagttcactcggttaacatgttctaaccagcaagatttctgttgtttgcaggtgccgtgagcgatgtggagatgcaggaacactatgatgagttttttgaggtgagagaactgaactctgtgactgatagacctgttgatcttctgtatctgtttggaaggatttaaaatgtttctctgctaataaacatacatgagttatatctaatgacactttgtaatgtataacgagtcttaaaccactgtggtctcccttcaggaggtttttacagaaatggaggagaagtatggggaagtagaggagatgaacgtctgtgacaacctgggagaccacctggtggggaacgtgtacgtcaagtttcgccgtgaggaagatgcggaaaaggctgtgattgacttgaataaccgttggtttaatggacagccgatccacgccgagctgtcacccgtgacggacttcagagaagcctgctgccgtcagtatgagatgggagaatgcacacgaggcggcttctgcaacttcatgcatttgaagcccatttccagagagctgcggcgggagctgtatggccgccgtcgcaagaagcatagatcaagatcccgatcccgggagcgtcgttctcggtctagagaccgtggtcgtggcggtggcggtggcggtggtggaggtggcggcggacgggagcgtgacaggaggcggtcgagagatcgtgaaagatctgggcgattctgagccatgccatttttaccttatgtctgctagaaagtgttgtagttgattgaccaaaccagttcataaggggaattttttttaaaaaacaacaaaaaaaaaacatacaaagatgggtttctgaataaaatttgtagtgataacagta

SEQ ID NO: 316069 - DNA, 960 bp, Homo sapiens
aaaaaaaacaacaaacacaaaagaacacggcgaggatgaggaagtgcggcttaatcggccgaggagacggcagcggcggcggcgggtgggaaatggcggagtatctggcctccatcttcggcaccgagaaagacaaagtcaactgttcattttatttcaaaattggagcatgtcgtcatggagacaggtgctctcggttgcacaataaaccgacgtttagccagaccattgccctcttgaacatttaccgtaaccctcaaaactcttcccagtctgctgacggtttgcgctgtgccgtgagcgatgtggagatgcaggaacactatgatgagttttttgaggaggtttttacagaaatggaggagaagtatggggaagtagaggagatgaacgtctgtgacaacctgggagaccacctggtggggaacgtgtacgtcaagtttcgccgtgaggaagatgcggaaaaggctgtgattgacttgaataaccgttggtttaatggacagccgatccacgccgagctgtcacccgtgacggacttcagagaagcctgctgccgtcagtatgagatgggagaatgcacacgaggcggcttctgcaacttcatgcatttgaagcccatttccagagagctgcggcgggagctgtatggccgccgtcgcaagaagcatagatcaagatcccgatcccgggagcgtcgttctcggtctagagaccgtggtcgtggcggtggcggtggcggtggtggaggtggcggcggacgggagcgtgacaggaggcggtcgagagatcgtgaaagatctgggcgattctgagccatgccatttttaccttatgtctgctagaaagtgttgtagttgattgaccaaaccagttcataaggggaattttttttaaaaaacaacaaaaaaaaaacatacaaagatgggtttctgaataaaatttgtagtgataacagta

SEQ ID NO: 316070 - DNA, 7854 bp, Homo sapiens
tctttaatgttttgatttatgaaccgaatctcccctaactaaaccagtggccatggattgtggtataaccaagcatcttaagtgaccacccagttctttgattttggggggtgtcccaagtgttgggctgagagaaatcaactgttccctattctaaaagttttctttaatctggctggaggcactttctttatgtttttctggatcatagattacctgagaatgtgaaatgtgaagttaatttaggcattccaggtcagtgctggggagagcccattggagctcgatggggtcagtagtatgtgtcagcttaagcatcctagtttgatgcgtgggtttgttttggttggttttaggcaatcctagccacccttggctttcccattagactgcattgcctctttacgttaagcttccttcattaaatagccactgccagaatacctgagtgagaccaactgaattttactgttgaataattgggctcagtttagcttttcatcagggttgtcatggtacggtcatttcagttcaaagctgagtcaagtcagctttgggaagcctcccaggcctgagttcagttgactcagggctgtacttggcggcttatggaagaaacggggccctgatgcaggtctgagtggttcagtgtggacagtttgtcagacctccctcttaggtggggtgggcttcccagctgcacacctttgactgaggaactcttcatacaaccactcccctttaaacagagctagaaatggagctggctggttttataaaaccaccacttacaaaactgcttcacgtggatattgttgagactaaacatttatttttctaaatcatgcgagtgattgctttagcttgtaaatctctagcataattcagggtgggtttctttataagctgcttacagtgatatggacgttaagattcatgtaatatattagcctactaacttaaacatggtttgttttttcagacaacttgattttaagaagaacggtacagtgtaaggtttcaagtctgcctgatccagtttaaagcacaagggctaaaaggattttttttccttaaaagaaggatcggaaaagagcaaatgttttaagctattgtattatgtaaacagagatcccaccaagaaagtgtaaatcagagccgggtgtccatgacagttgacagacctgtttggtgtgcctgttttgctaggagaccagagaacttgatgtactgcagacagctgagttacgcatttggttttgaaaaattatcttgtgtgaggaatatgattataacgtgaatttttccacatcttggtgtctgctagcttgaagtacaagaaaatattagtattctactatttatcttgcattaaaacactttaacattgaaaacgtgggactaatcaaaacaatacagtttcttcttggttgctggctgacttgacccaagtcactgctcaaactctgttttcataatatgatggttttggtgtactcttcagaagacaaatgtctgacttgcgggaaaaaaacaaacgtttagccatttgcaaacaaattgtctctttgcaattgtctaatatatgcacagcagccagtagaattcccctttttatttttttttccccgcagaccatcttgattcaaaacatctatcgtaatccccaaaacagtgcacagacggctgacggctcacactgtaagtcccacagttggagaaatttttttaaaacaatggtgttaaagagcccactcttaattgagacaaataatgttggcttctgagctgctgacatagagctgttgcaaacaggacaaggtgctggaactccttggcgcacacagcaagaacttgatacttggccacgttcaggaggcttatcccttctagggagggtcactggcccggccacctccattgattgacatttgtcatgagagcaggtccgtccatgtgaaacggatttcaacattttgagccattcattggtctttacagtgactgaacccctggcctttattaagttctttgtgtaaaattaaaactcttaggaatattaaggaatcaataaggtaagttgcccagtaagtgtgggttttatttcaccattataatttttcctccaggaagtggagatttcatgatatgtaacaattgtatttctctaatacagtaattttttccatcagtttatgtaagcattattctttccgagttcattaaaaattttctgccacatctaagaacattttggtgctagcctggcaaactatttgtgcttttacctgaattggaattttgaaaaggagagttttcacgttctgtaagcagaagtacaagatgggcatatcatgagacctccgttacaccgcagtgttagggattcaaggcagccgccaactgagaaaacgcctctgcttctccagaaaataacttgctctcttttcagcactgaatctcaactgaagcacttgccagaggcagccggttaagtgtttacctttaattttccataatataaagttgttgcgttttgtatttcagaccattgccctcttgaacatttaccgtaaccctcaaaactcttcccagtctgctgacggtttgcgctgtaagttcatacaagttccttccccggttccctgggcttgcgtgtcagagctcagtgtccactccatctggtctgccgtgctagtgtcaaggaccgcgtttcactagaggtggcaaggagctttcgtcccactgaccccatggaaacctcttttggagatttgaactcccaccgtgtgttaaaagggaaaaagtaactggaaagggtgccctttaaaacagtctagagctgggccgggcgcggtggctcacgcctgtaatcccagcactttgggaggccgaggcgggtggatcatgaggtcaggagttcaagaccaatctggccaacatggtgaaaccccatctctactaaagatacaaaaattagctgggcgtggtggcagatgcctgcaatcccagcttctagggaggctgaggcagagaatcgcttgaacccgggaggcggaggttgcagtgaactgagatcgtgccgctgcactccagcctgggcgacagagtgagactccgtctccaaaaaaaaaaaaaaaaacagtctggagctgctgctgccccttcttcctttactttggccgtcatcctagagggaatgtactggaattaaacgtcgagtcatattcttccctcttagagcaacaaaatttgaatgtttctctcactttctggaatttttaaaaagcaaactttttaagttattttttcagattttatttctcattagccttttttccttgaactccattttggagtgcaccctgtagttgtaagagcattgtgctgagagcgttccccaaatgagggtctgcagcttgcactgacccctgagttcctcacccaccagccccgtgccgacccgtctaacccgtgtgggggtgctccactcaaataggcccttggcagaaaagattgtccgttctgtccacacactgcctggatacagtctccagctctaggagatggaattggtttgctccatttagaaatagatcaaaactgggcattcagtagatggtaccaatatcttcctgtactgggaaatactaaatttagattgtgaatatttacctaatgataatttttagagaaggagatatcatagatgagtatgattgggaagttcagaaaactaaaatttgatttttacagccatccaactatagaatcattagaatttagtcatttatggataaattaaaatgaacacctggactcttgttaaaatcagaaagtccaaaccaaagataggcacttcccattcaccattctgttttaaagcagtaaaaattgaggtgcccttggatatccacaagcctaaattgagtacacccttgaaccagagcccctcagttaatggggtgaccgacatggggtagctgatcccagggggcattcccctctcgagctggccctgcactgggtggcctggggattgtgcttccttgcacagtggtgcacatttctatgtgtggatgagattttcttgtcaacttttcctgccaagacactaaatgcttttcagtgctaatactgacctgatagtagagatttctttccctgagtcggatggtagcaggatttacttggtaacccttggtttaaaatacctgtttttttgtttgtttgttttcttttgttttttaaggaaataagatcaataggcggagggaaattgtttctatatgcacttattaaataatttttgttaacaaccctgccctgggataaaagtgaatggaagtacatgactgagtaacagtaattaattctttgccctgatcgtttatttggggactgtatatgctttcttgactgacaatagaatgttgtattagttttcattgtgtctttatttgcagttcacagcacttttgttttgcatatgctacaaactaaaagtttagcaattacgttatattccaattctggagtccagattgtacaaattagatgaaattctaattcgtcattttaggaagaaatcaattacctaaaattactggctcttttcaacataccctttagtatgtaaaaaaataagcttcaaatgcgtgggttaaagttaactatcaatcccagtttaagaatgatatttctgtaagaaaactgctttattttccaagttgtagtatttaacataggctgagtcacaaataagtttttaattgtatcttaatgcagttgtctctgcctttcaagtcactttgattgaaacattttaagcagaacaaatatagccaataatttaaaataatcaccccaaaaccatttctcaaacctgctaaaactttgagcatgtgaataattttctcctcttcacattcttcttatgtgggaaggaagtgaatttgaaatattaaaatctgccctttggaataggctactttggccgtttataacttgatttctactcggggaggaaggtacattcccaatagctttccaattgggatatcctgtgatatgattggcaggctgtccgagtagttacacttaataaaatttgggttcgaaagcagattcctggaagttcaaaaataactaaaacagccccggataggttagaaagtgaacttaaatcattctcagaattagaaaataagaagttattttttatcttcaaagataaaaagggggccgggcacggtggctcacgcctgtaatcccagcactttggaaagccgaggcaagtggatcacgaggtcgagagattgagaccatcctggccaacatggtggaaccccgtctctactaaaactacaaaaattagccaagatcacgccattgcactccagcctggagacagtgagacgccgtctcaaaaaaaagaaaaaaaaaagaatgctttcatcagcaaaacattgtaacattccctttacttgagggcgtccacaataccgtaaggttgcgtgaactgtcctactgaatcttcatggttgcttggattttaatcacatcagaagaatttgagagcataccatggctggcagtccataaaagactagttaggaacatcagcttttaatcatcgaccctgctttcaggtttcattttaaacttatagaagaggggaagacatcagtgtgcttatttggcctttactctaaatcttaaaaggaagaaaattttaatatttcttagtttgagcccaggtgcggtgtctcacgcctgtaatcacagcactttgggaggccaaggcaggcggatcacttgaggtcaggagttcaagaccagcctgccaacgtggtgaaaccctgtctgtactaaaaattaaaaaaaaaaaaaaaaattagccgggcgtggtggcagtcgcctgtagtcccagcaactccagaggctgagacaggagaatcgcttgaaccccagaggtggaggttgcagtgagctgagatggtgccactgcactccagcctgggcgacagagccagactgcatcttgtgggtgtaaaaaaaaaatttgtagtttgagagtcaactttttcctcacagtttctgaaaatgtggcccttttgatgctgattaaagctggttgtgattttaacaccttagtagccagaatcgagactgtcatggggacatttaaaatctcaccacacttgacaccattcacaagtagccatgtggctcagtctcctgagtgctcctgcagagtgcagctctgccaggcttttctctagataatctcgtgtgtgttactgtagcagtttgagtttaaacacaagagttcactcggttaacatgttctaaccagcaagatttctgttgtttgcaggtgccgtgagcgatgtggagatgcaggaacactatgatgagttttttgaggtgagagaactgaactctgtgactgatagacctgttgatcttctgtatctgtttggaaggatttaaaatgtttctctgctaataaacatacatgagttatatctaatgacactttgtaatgtataacgagtcttaaaccactgtggtctcccttcaggaggtttttacagaaatggaggagaagtatggggaagtagaggagatgaacgtctgtgacaacctgggagaccacctggtggggaacgtgtacgtcaaggtaggagccagggcgagacggcggcgtggccgcttagtgtgccagggccaaggccaacaggcgaaagcgagacagtggtgcagccgcttagtgtgccggggccaaggccgacagaggatggggtgcctgtcgccatgcaccttgagatcctggatgctcaggcgcacagcagggctcaggtgcactggctcggcgcctaccagctgcgtcatatgtggcggtggccagcccacacgtgcgcccagccagcagaactgaaggacggaccgtacaccacagccatcgttatttcagtgtagaatatttagtacctgttggtttagaagctgtgtggactaaggaaaagttaggtttactcacatgtttggtttcttttttcttttttagtgaataaaactttatttgcctacacagccatatttgctcctttaaccagttgaatttgaaaaatgaaggcaacatttggcaaaatcttggactatcttgaagttaatctcattgaaaataaaggatttttcaattatcctgtaatactattccaccttactatacctgagtgtgtatatctctctctgatatacttggattggtaattgagaaagtcttattaaagcgtggatggcaagcacttctgtttttgtcttttcagtttcgccgtgaggaagatgcggaaaaggctgtgattgacttgaataaccgttggtttaatggacagccgatccacgccgagctgtcacccgtgacggacttcagagaagcctgctgccgtcagtatgagatgggagaatgcacacgaggcggcttctgcaacttcatgcatttgaagcccatttccagagagctgcggcgggagctgtatggccgccgtcgcaagaagcatagatcaagatcccgatcccgggagcgtcgttctcggtctagagaccgtggtcgtggcggtggcggtggcggtggtggaggtggcggcggacgggagcgtgacaggaggcggtcgagagatcgtgaaagatctgggcgattctgagccatgccatttttaccttatgtctgctagaaagtgttgtagttgattgaccaaaccagttcataaggggaattttttttaaaaaacaacaaaaaaaaaacatacaaagatgggtttctgaataaaatttgtagtgataacagta

SEQ ID NO: 316071 - DNA, 1158 bp, Homo sapiens
  misc_feature (1156)..(1156): n is a, c, g, or t
cgggggacgtctcccgcgggcgtcggcagggtcggcggcgtcggcagcagtgtcgacggcagcggcggcggcgggtgggaaatggcggagtatctggcctccatcttcggcaccgagaaagacaaagtcaactgttcattttatttcaaaattggagcatgtcgtcatggagacaggtgctctcggttgcacaataaaccgacgtttagccagaccattgccctcttgaacatttaccgtaaccctcaaaactcttcccagtctgctgacggtttgcgctgtgccgtgagcgatgtggagatgcaggaacactatgatgagttttttgaggaggtttttacagaaatggaggagaagtatggggaagtagaggagatgaacgtctgtgacaacctgggagaccacctggtggggaacgtgtacgtcaagtttcgccgtgaggaagatgcggaaaaggctgtgattgacttgaataaccgttggtttaatggacagccgatccacgccgagctgtcacccgtgacggacttcagagaagcctgctgccgtcagtatgagatgggagaatgcacacgaggcggcttctgcaacttcatgcatttgaagcccatttccagagagctgcggcgggagctgtatggccgccgtcgcaagaagcatagatcaagatcccgatcccgggagcgtcgttctcggtctagagaccgtggtcgtggcggtggcggtggcggtggtggaggtggcggcggacgggagcgtgacaggaggcggtcgagagatcgtgaaagatctgggcgattctgagccatgccatttttaccttatgtctgctagaaagtgttgtagttgattgaccaaaccagttcaaacaaacaaaaaaaaaaaaaaaaaaaaaaaaccagtctggagctgctgctgccccttcttcctttactttggccgtcatcctagagggaatgtactggaattaaacgtcgagtcatattcttccctcttagagcaacaaaatttgaatgtttctctcactttctggaatttttaaaaagcaaactttttaagttattttttcagattttatttctcattagccttttttccttgaactccattttggagtgcaccctgtagttgtaagagcattgtgctgagccacgtncg

SEQ ID NO: 316072 - DNA, 9075 bp, Homo sapiens
tctttaatgttttgatttatgaaccgaatctcccctaactaaaccagtggccatggattgtggtataaccaagcatcttaagtgaccacccagttctttgattttggggggtgtcccaagtgttgggctgagagaaatcaactgttccctattctaaaagttttctttaatctggctggaggcactttctttatgtttttctggatcatagattacctgagaatgtgaaatgtgaagttaatttaggcattccaggtcagtgctggggagagcccattggagctcgatggggtcagtagtatgtgtcagcttaagcatcctagtttgatgcgtgggtttgttttggttggttttaggcaatcctagccacccttggctttcccattagactgcattgcctctttacgttaagcttccttcattaaatagccactgccagaatacctgagtgagaccaactgaattttactgttgaataattgggctcagtttagcttttcatcagggttgtcatggtacggtcatttcagttcaaagctgagtcaagtcagctttgggaagcctcccaggcctgagttcagttgactcagggctgtacttggcggcttatggaagaaacggggccctgatgcaggtctgagtggttcagtgtggacagtttgtcagacctccctcttaggtggggtgggcttcccagctgcacacctttgactgaggaactcttcatacaaccactcccctttaaacagagctagaaatggagctggctggttttataaaaccaccacttacaaaactgcttcacgtggatattgttgagactaaacatttatttttctaaatcatgcgagtgattgctttagcttgtaaatctctagcataattcagggtgggtttctttataagctgcttacagtgatatggacgttaagattcatgtaatatattagcctactaacttaaacatggtttgttttttcagacaacttgattttaagaagaacggtacagtgtaaggtttcaagtctgcctgatccagtttaaagcacaagggctaaaaggattttttttccttaaaagaaggatcggaaaagagcaaatgttttaagctattgtattatgtaaacagagatcccaccaagaaagtgtaaatcagagccgggtgtccatgacagttgacagacctgtttggtgtgcctgttttgctaggagaccagagaacttgatgtactgcagacagctgagttacgcatttggttttgaaaaattatcttgtgtgaggaatatgattataacgtgaatttttccacatcttggtgtctgctagcttgaagtacaagaaaatattagtattctactatttatcttgcattaaaacactttaacattgaaaacgtgggactaatcaaaacaatacagtttcttcttggttgctggctgacttgacccaagtcactgctcaaactctgttttcataatatgatggttttggtgtactcttcagaagacaaatgtctgacttgcgggaaaaaaacaaacgtttagccatttgcaaacaaattgtctctttgcaattgtctaatatatgcacagcagccagtagaattcccctttttatttttttttccccgcagaccatcttgattcaaaacatctatcgtaatccccaaaacagtgcacagacggctgacggctcacactgtaagtcccacagttggagaaatttttttaaaacaatggtgttaaagagcccactcttaattgagacaaataatgttggcttctgagctgctgacatagagctgttgcaaacaggacaaggtgctggaactccttggcgcacacagcaagaacttgatacttggccacgttcaggaggcttatcccttctagggagggtcactggcccggccacctccattgattgacatttgtcatgagagcaggtccgtccatgtgaaacggatttcaacattttgagccattcattggtctttacagtgactgaacccctggcctttattaagttctttgtgtaaaattaaaactcttaggaatattaaggaatcaataaggtaagttgcccagtaagtgtgggttttatttcaccattataatttttcctccaggaagtggagatttcatgatatgtaacaattgtatttctctaatacagtaattttttccatcagtttatgtaagcattattctttccgagttcattaaaaattttctgccacatctaagaacattttggtgctagcctggcaaactatttgtgcttttacctgaattggaattttgaaaaggagagttttcacgttctgtaagcagaagtacaagatgggcatatcatgagacctccgttacaccgcagtgttagggattcaaggcagccgccaactgagaaaacgcctctgcttctccagaaaataacttgctctcttttcagcactgaatctcaactgaagcacttgccagaggcagccggttaagtgtttacctttaattttccataatataaagttgttgcgttttgtatttcagaccattgccctcttgaacatttaccgtaaccctcaaaactcttcccagtctgctgacggtttgcgctgtaagttcatacaagttccttccccggttccctgggcttgcgtgtcagagctcagtgtccactccatctggtctgccgtgctagtgtcaaggaccgcgtttcactagaggtggcaaggagctttcgtcccactgaccccatggaaacctcttttggagatttgaactcccaccgtgtgttaaaagggaaaaagtaactggaaagggtgccctttaaaacagtctagagctgggccgggcgcggtggctcacgcctgtaatcccagcactttgggaggccgaggcgggtggatcatgaggtcaggagttcaagaccaatctggccaacatggtgaaaccccatctctactaaagatacaaaaattagctgggcgtggtggcagatgcctgcaatcccagcttctagggaggctgaggcagagaatcgcttgaacccgggaggcggaggttgcagtgaactgagatcgtgccgctgcactccagcctgggcgacagagtgagactccgtctccaaaaaaaaaaaaaaaaacagtctggagctgctgctgccccttcttcctttactttggccgtcatcctagagggaatgtactggaattaaacgtcgagtcatattcttccctcttagagcaacaaaatttgaatgtttctctcactttctggaatttttaaaaagcaaactttttaagttattttttcagattttatttctcattagccttttttccttgaactccattttggagtgcaccctgtagttgtaagagcattgtgctgagagcgttccccaaatgagggtctgcagcttgcactgacccctgagttcctcacccaccagccccgtgccgacccgtctaacccgtgtgggggtgctccactcaaataggcccttggcagaaaagattgtccgttctgtccacacactgcctggatacagtctccagctctaggagatggaattggtttgctccatttagaaatagatcaaaactgggcattcagtagatggtaccaatatcttcctgtactgggaaatactaaatttagattgtgaatatttacctaatgataatttttagagaaggagatatcatagatgagtatgattgggaagttcagaaaactaaaatttgatttttacagccatccaactatagaatcattagaatttagtcatttatggataaattaaaatgaacacctggactcttgttaaaatcagaaagtccaaaccaaagataggcacttcccattcaccattctgttttaaagcagtaaaaattgaggtgcccttggatatccacaagcctaaattgagtacacccttgaaccagagcccctcagttaatggggtgaccgacatggggtagctgatcccagggggcattcccctctcgagctggccctgcactgggtggcctggggattgtgcttccttgcacagtggtgcacatttctatgtgtggatgagattttcttgtcaacttttcctgccaagacactaaatgcttttcagtgctaatactgacctgatagtagagatttctttccctgagtcggatggtagcaggatttacttggtaacccttggtttaaaatacctgtttttttgtttgtttgttttcttttgttttttaaggaaataagatcaataggcggagggaaattgtttctatatgcacttattaaataatttttgttaacaaccctgccctgggataaaagtgaatggaagtacatgactgagtaacagtaattaattctttgccctgatcgtttatttggggactgtatatgctttcttgactgacaatagaatgttgtattagttttcattgtgtctttatttgcagttcacagcacttttgttttgcatatgctacaaactaaaagtttagcaattacgttatattccaattctggagtccagattgtacaaattagatgaaattctaattcgtcattttaggaagaaatcaattacctaaaattactggctcttttcaacataccctttagtatgtaaaaaaataagcttcaaatgcgtgggttaaagttaactatcaatcccagtttaagaatgatatttctgtaagaaaactgctttattttccaagttgtagtatttaacataggctgagtcacaaataagtttttaattgtatcttaatgcagttgtctctgcctttcaagtcactttgattgaaacattttaagcagaacaaatatagccaataatttaaaataatcaccccaaaaccatttctcaaacctgctaaaactttgagcatgtgaataattttctcctcttcacattcttcttatgtgggaaggaagtgaatttgaaatattaaaatctgccctttggaataggctactttggccgtttataacttgatttctactcggggaggaaggtacattcccaatagctttccaattgggatatcctgtgatatgattggcaggctgtccgagtagttacacttaataaaatttgggttcgaaagcagattcctggaagttcaaaaataactaaaacagccccggataggttagaaagtgaacttaaatcattctcagaattagaaaataagaagttattttttatcttcaaagataaaaagggggccgggcacggtggctcacgcctgtaatcccagcactttggaaagccgaggcaagtggatcacgaggtcgagagattgagaccatcctggccaacatggtggaaccccgtctctactaaaactacaaaaattagccaagatcacgccattgcactccagcctggagacagtgagacgccgtctcaaaaaaaagaaaaaaaaaagaatgctttcatcagcaaaacattgtaacattccctttacttgagggcgtccacaataccgtaaggttgcgtgaactgtcctactgaatcttcatggttgcttggattttaatcacatcagaagaatttgagagcataccatggctggcagtccataaaagactagttaggaacatcagcttttaatcatcgaccctgctttcaggtttcattttaaacttatagaagaggggaagacatcagtgtgcttatttggcctttactctaaatcttaaaaggaagaaaattttaatatttcttagtttgagcccaggtgcggtgtctcacgcctgtaatcacagcactttgggaggccaaggcaggcggatcacttgaggtcaggagttcaagaccagcctgccaacgtggtgaaaccctgtctgtactaaaaattaaaaaaaaaaaaaaaaattagccgggcgtggtggcagtcgcctgtagtcccagcaactccagaggctgagacaggagaatcgcttgaaccccagaggtggaggttgcagtgagctgagatggtgccactgcactccagcctgggcgacagagccagactgcatcttgtgggtgtaaaaaaaaaatttgtagtttgagagtcaactttttcctcacagtttctgaaaatgtggcccttttgatgctgattaaagctggttgtgattttaacaccttagtagccagaatcgagactgtcatggggacatttaaaatctcaccacacttgacaccattcacaagtagccatgtggctcagtctcctgagtgctcctgcagagtgcagctctgccaggcttttctctagataatctcgtgtgtgttactgtagcagtttgagtttaaacacaagagttcactcggttaacatgttctaaccagcaagatttctgttgtttgcaggtgccgtgagcgatgtggagatgcaggaacactatgatgagttttttgaggtgagagaactgaactctgtgactgatagacctgttgatcttctgtatctgtttggaaggatttaaaatgtttctctgctaataaacatacatgagttatatctaatgacactttgtaatgtataacgagtcttaaaccactgtggtctcccttcaggaggtttttacagaaatggaggagaagtatggggaagtagaggagatgaacgtctgtgacaacctgggagaccacctggtggggaacgtgtacgtcaaggtaggagccagggcgagacggcggcgtggccgcttagtgtgccagggccaaggccaacaggcgaaagcgagacagtggtgcagccgcttagtgtgccggggccaaggccgacagaggatggggtgcctgtcgccatgcaccttgagatcctggatgctcaggcgcacagcagggctcaggtgcactggctcggcgcctaccagctgcgtcatatgtggcggtggccagcccacacgtgcgcccagccagcagaactgaaggacggaccgtacaccacagccatcgttatttcagtgtagaatatttagtacctgttggtttagaagctgtgtggactaaggaaaagttaggtttactcacatgtttggtttcttttttcttttttagtgaataaaactttatttgcctacacagccatatttgctcctttaaccagttgaatttgaaaaatgaaggcaacatttggcaaaatcttggactatcttgaagttaatctcattgaaaataaaggatttttcaattatcctgtaatactattccaccttactatacctgagtgtgtatatctctctctgatatacttggattggtaattgagaaagtcttattaaagcgtggatggcaagcacttctgtttttgtcttttcagtttcgccgtgaggaagatgcggaaaaggctgtgattgacttgaataaccgttggtttaatggacagccgatccacgccgagctgtcacccgtgacggacttcagagaagcctgctgccgtcagtatgagatgggagaatgcacacgaggcggcttctgcaacttcatgcatttgaagcccatttccagagagctgcggcgggagctgtatggccgccgtcgcaagaagtgagtattcctgtgcccgttgttaagctcagtggcttctttctcccctcacaaccctcccccttccaaaaaaaaaattttggcataggtgtcgtttctgttttttaaaaggcagtgcttagaacatagtacatatttttaaatatccaaatgtcctctttggagaagaatattcacctgcacacaggtaacttcattatccaacttctcaagtagagatcagatcttagtaatcaagcaagagggcggttagctgggcagccgcggacatgaggctcgtggtgaaagtgggcatgcagtttattctcccagatattacgaagaagaagaatagatgttgtaacctcctttagatcagggatggcttccctgggacacattggaagaagaattgtcttgggtcacaaataaaatacactaatgatagctgataactttttttttaattgcaaaaaaaatctcataatgttttaagcaagttgatgaatttgtgttgggctgcaggttggacaagcttttgctttacatatttcacatgtccactggggtttcttttggttttgcttgttggttttagggcatttcattatgtcttgggatcgctggcatcctcccttcgggacactggcagaatcaggcccagcggtcacatctctctgatcctacatttaaatgtacgacaggtcacagagcagagaaaatcaagacgtcagaatcgaaccgattgagttctgagtctggagaggttctcatccctcttctgttaaacatggactagtaaatagatgggtggcgattgttttattgtcagcattcaagaagcataagagaaaaacaggcctgctctccccagcccaaaaacctgatggacacagtagctatgagcgcctgaagcgtggggtcagtgagggttgaagatggtatgtgtccagctcattttgattatgatttcctgtgaccatttgagttggttctagaagaagacagaagatgcaaggtattacacctgttcacttctaagttgcacatttttttctcctgaaacttttcacacctgaaatcagggtgtgtctcagtcacggcgtgcagtctcttcagcagtgtttttccttatcagtgccgttggcttgaggagctgcgcgtgttgagagagtgggtgtggttctgtgctgcgtgccgtggtttggatggcacggttttctttattttccttggttgcaggcatagatcaagatcccgatcccgggagcgtcgttctcggtctagagaccgtggtcgtggcggtggcggtggcggtggtggaggtggcggcggacgggagcgtgacaggaggcggtcgagagatcgtgaaagatctgggcgattctgagccatgccatttttaccttatgtctgctagaaagtgttgtagttgattgaccaaaccagttcataaggggaattttttttaaaaaacaacaaaaaaaaaacatacaaagatgggtttctgaataaaatttgtagtgataacagta

SEQ ID NO: 316073 - DNA, 1027 bp, Homo sapiens
aaaaaaaacaacaaacacaaaagaacacggcgaggatgaggaagtgcggcttaatcggccgaggagacggcagcggcggcggcgggtgggaaatggcggagtatctggcctccatcttcggcaccgagaaagacaaagtcaactgttcattttatttcaaaattggagcatgtcgtcatggagacaggtgctctcggttgcacaataaaccgacgtttagccagaccatcttgattcaaaacatctatcgtaatccccaaaacagtgcacagacggctgacggctcacactaccattgccctcttgaacatttaccgtaaccctcaaaactcttcccagtctgctgacggtttgcgctgtgccgtgagcgatgtggagatgcaggaacactatgatgagttttttgaggaggtttttacagaaatggaggagaagtatggggaagtagaggagatgaacgtctgtgacaacctgggagaccacctggtggggaacgtgtacgtcaagtttcgccgtgaggaagatgcggaaaaggctgtgattgacttgaataaccgttggtttaatggacagccgatccacgccgagctgtcacccgtgacggacttcagagaagcctgctgccgtcagtatgagatgggagaatgcacacgaggcggcttctgcaacttcatgcatttgaagcccatttccagagagctgcggcgggagctgtatggccgccgtcgcaagaagcatagatcaagatcccgatcccgggagcgtcgttctcggtctagagaccgtggtcgtggcggtggcggtggcggtggtggaggtggcggcggacgggagcgtgacaggaggcggtcgagagatcgtgaaagatctgggcgattctgagccatgccatttttaccttatgtctgctagaaagtgttgtagttgattgaccaaaccagttcataaggggaattttttttaaaaaacaacaaaaaaaaaacatacaaagatgggtttctgaataaaatttgtagtgataacagta

SEQ ID NO: 316074 - DNA, 1281 bp, Homo sapiens
gtccggactggctgatcgcccgacgtccgggcctccgagtcgccgactcccggaagccgcctcgagccgcgctgaaagttgcctggagcatccgggccttttggacgtggacacgtttgttccaactttcggctgtgaatgtcctgtcgagcaagctctggtaccagcctcgccagtattcagtcgcttatctaacttagggtcctaagcgttggtgttttatccacttagccagcctcttgcctgtttaagcgaccgctgggccggcagtaaggagatatgacgagaaaaagtatggtggagactactggattaactatctaaccacaagagacgtgatccgctcttaacatacaggtgctcctggatttaccatgggattgcgttccgataaacccatcatgaatcgaaaatgcctttaataccccgataaacccatcatctaagttgaaaatttagtcaactgttcattttatttcaaaattggagcatgtcgtcatggagacaggtgctctcggttgcacaataaaccgacgtttagccagaccattgccctcttgaacatttaccgtaaccctcaaaactcttcccagtctgctgacggtttgcgctgtgccgtgagcgatgtggagatgcaggaacactatgatgagttttttgaggaggtttttacagaaatggaggagaagtatggggaagtagaggagatgaacgtctgtgacaacctgggagaccacctggtggggaacgtgtacgtcaagtttcgccgtgaggaagatgcggaaaaggctgtgattgacttgaataaccgttggtttaatggacagccgatccacgccgagctgtcacccgtgacggacttcagagaagcctgctgccgtcagtatgagatgggagaatgcacacgaggcggcttctgcaacttcatgcatttgaagcccatttccagagagctgcggcgggagctgtatggccgccgtcgcaagaagcatagatcaagatcccgatcccgggagcgtcgttctcggtctagagaccgtggtcgtggcggtggcggtggcggtggtggaggtggcggcggacgggagcgtgacaggaggcggtcgagagatcgtgaaagatctgggcgattctgagccatgccatttttaccttatgtctgctagaaagtgttgtagttgattgaccaaaccagttcataaggggaattttttttaaaaaacaacaaaaaaaaaacatacaaagatgggtttctgaataaaatttgtagtgataacagta

SEQ ID NO: 316075 - DNA, 2370 bp, Homo sapiens
tctttaatgttttgatttatgaaccgaatctcccctaactaaaccagtggccatggattgtggtataaccaagcatcttaagtgaccacccagttctttgattttggggggtgtcccaagtgttgggctgagagaaatcaactgttccctattctaaaagttttctttaatctggctggaggcactttctttatgtttttctggatcatagattacctgagaatgtgaaatgtgaagttaatttaggcattccaggtcagtgctggggagagcccattggagctcgatggggtcagtagtatgtgtcagcttaagcatcctagtttgatgcgtgggtttgttttggttggttttaggcaatcctagccacccttggctttcccattagactgcattgcctctttacgttaagcttccttcattaaatagccactgccagaatacctgagtgagaccaactgaattttactgttgaataattgggctcagtttagcttttcatcagggttgtcatggtacggtcatttcagttcaaagctgagtcaagtcagctttgggaagcctcccaggcctgagttcagttgactcagggctgtacttggcggcttatggaagaaacggggccctgatgcaggtctgagtggttcagtgtggacagtttgtcagacctccctcttaggtggggtgggcttcccagctgcacacctttgactgaggaactcttcatacaaccactcccctttaaacagagctagaaatggagctggctggttttataaaaccaccacttacaaaactgcttcacgtggatattgttgagactaaacatttatttttctaaatcatgcgagtgattgctttagcttgtaaatctctagcataattcagggtgggtttctttataagctgcttacagtgatatggacgttaagattcatgtaatatattagcctactaacttaaacatggtttgttttttcagacaacttgattttaagaagaacggtacagtgtaaggtttcaagtctgcctgatccagtttaaagcacaagggctaaaaggattttttttccttaaaagaaggatcggaaaagagcaaatgttttaagctattgtattatgtaaacagagatcccaccaagaaagtgtaaatcagagccgggtgtccatgacagttgacagacctgtttggtgtgcctgttttgctaggagaccagagaacttgatgtactgcagacagctgagttacgcatttggttttgaaaaattatcttgtgtgaggaatatgattataacgtgaatttttccacatcttggtgtctgctagcttgaagtacaagaaaatattagtattctactatttatcttgcattaaaacactttaacattgaaaacgtgggactaatcaaaacaatacagtttcttcttggttgctggctgacttgacccaagtcactgctcaaactctgttttcataatatgatggttttggtgtactcttcagaagacaaatgtctgacttgcgggaaaaaaacaaacgtttagccatttgcaaacaaattgtctctttgcaattgtctaatatatgcacagcagccagtagaattcccctttttatttttttttccccgcagaccatcttgattcaaaacatctatcgtaatccccaaaacagtgcacagacggctgacggctcacactgtgccgtgagcgatgtggagatgcaggaacactatgatgagttttttgaggaggtttttacagaaatggaggagaagtatggggaagtagaggagatgaacgtctgtgacaacctgggagaccacctggtggggaacgtgtacgtcaagtttcgccgtgaggaagatgcggaaaaggctgtgattgacttgaataaccgttggtttaatggacagccgatccacgccgagctgtcacccgtgacggacttcagagaagcctgctgccgtcagtatgagatgggagaatgcacacgaggcggcttctgcaacttcatgcatttgaagcccatttccagagagctgcggcgggagctgtatggccgccgtcgcaagaagcatagatcaagatcccgatcccgggagcgtcgttctcggtctagagaccgtggtcgtggcggtggcggtggcggtggtggaggtggcggcggacgggagcgtgacaggaggcggtcgagagatcgtgaaagatctgggcgattctgagccatgccatttttaccttatgtctgctagaaagtgttgtagttgattgaccaaaccagttcataaggggaattttttttaaaaaacaacaaaaaaaaaacatacaaagatgggtttctgaataaaatttgtagtgataacagta

SEQ ID NO: 316076 - DNA, 5928 bp, Homo sapiens
tctttaatgttttgatttatgaaccgaatctcccctaactaaaccagtggccatggattgtggtataaccaagcatcttaagtgaccacccagttctttgattttggggggtgtcccaagtgttgggctgagagaaatcaactgttccctattctaaaagttttctttaatctggctggaggcactttctttatgtttttctggatcatagattacctgagaatgtgaaatgtgaagttaatttaggcattccaggtcagtgctggggagagcccattggagctcgatggggtcagtagtatgtgtcagcttaagcatcctagtttgatgcgtgggtttgttttggttggttttaggcaatcctagccacccttggctttcccattagactgcattgcctctttacgttaagcttccttcattaaatagccactgccagaatacctgagtgagaccaactgaattttactgttgaataattgggctcagtttagcttttcatcagggttgtcatggtacggtcatttcagttcaaagctgagtcaagtcagctttgggaagcctcccaggcctgagttcagttgactcagggctgtacttggcggcttatggaagaaacggggccctgatgcaggtctgagtggttcagtgtggacagtttgtcagacctccctcttaggtggggtgggcttcccagctgcacacctttgactgaggaactcttcatacaaccactcccctttaaacagagctagaaatggagctggctggttttataaaaccaccacttacaaaactgcttcacgtggatattgttgagactaaacatttatttttctaaatcatgcgagtgattgctttagcttgtaaatctctagcataattcagggtgggtttctttataagctgcttacagtgatatggacgttaagattcatgtaatatattagcctactaacttaaacatggtttgttttttcagacaacttgattttaagaagaacggtacagtgtaaggtttcaagtctgcctgatccagtttaaagcacaagggctaaaaggattttttttccttaaaagaaggatcggaaaagagcaaatgttttaagctattgtattatgtaaacagagatcccaccaagaaagtgtaaatcagagccgggtgtccatgacagttgacagacctgtttggtgtgcctgttttgctaggagaccagagaacttgatgtactgcagacagctgagttacgcatttggttttgaaaaattatcttgtgtgaggaatatgattataacgtgaatttttccacatcttggtgtctgctagcttgaagtacaagaaaatattagtattctactatttatcttgcattaaaacactttaacattgaaaacgtgggactaatcaaaacaatacagtttcttcttggttgctggctgacttgacccaagtcactgctcaaactctgttttcataatatgatggttttggtgtactcttcagaagacaaatgtctgacttgcgggaaaaaaacaaacgtttagccatttgcaaacaaattgtctctttgcaattgtctaatatatgcacagcagccagtagaattcccctttttatttttttttccccgcagaccatcttgattcaaaacatctatcgtaatccccaaaacagtgcacagacggctgacggctcacactgtaagtcccacagttggagaaatttttttaaaacaatggtgttaaagagcccactcttaattgagacaaataatgttggcttctgagctgctgacatagagctgttgcaaacaggacaaggtgctggaactccttggcgcacacagcaagaacttgatacttggccacgttcaggaggcttatcccttctagggagggtcactggcccggccacctccattgattgacatttgtcatgagagcaggtccgtccatgtgaaacggatttcaacattttgagccattcattggtctttacagtgactgaacccctggcctttattaagttctttgtgtaaaattaaaactcttaggaatattaaggaatcaataaggtaagttgcccagtaagtgtgggttttatttcaccattataatttttcctccaggaagtggagatttcatgatatgtaacaattgtatttctctaatacagtaattttttccatcagtttatgtaagcattattctttccgagttcattaaaaattttctgccacatctaagaacattttggtgctagcctggcaaactatttgtgcttttacctgaattggaattttgaaaaggagagttttcacgttctgtaagcagaagtacaagatgggcatatcatgagacctccgttacaccgcagtgttagggattcaaggcagccgccaactgagaaaacgcctctgcttctccagaaaataacttgctctcttttcagcactgaatctcaactgaagcacttgccagaggcagccggttaagtgtttacctttaattttccataatataaagttgttgcgttttgtatttcagaccattgccctcttgaacatttaccgtaaccctcaaaactcttcccagtctgctgacggtttgcgctgtaagttcatacaagttccttccccggttccctgggcttgcgtgtcagagctcagtgtccactccatctggtctgccgtgctagtgtcaaggaccgcgtttcactagaggtggcaaggagctttcgtcccactgaccccatggaaacctcttttggagatttgaactcccaccgtgtgttaaaagggaaaaagtaactggaaagggtgccctttaaaacagtctagagctgggccgggcgcggtggctcacgcctgtaatcccagcactttgggaggccgaggcgggtggatcatgaggtcaggagttcaagaccaatctggccaacatggtgaaaccccatctctactaaagatacaaaaattagctgggcgtggtggcagatgcctgcaatcccagcttctagggaggctgaggcagagaatcgcttgaacccgggaggcggaggttgcagtgaactgagatcgtgccgctgcactccagcctgggcgacagagtgagactccgtctccaaaaaaaaaaaaaaaaacagtctggagctgctgctgccccttcttcctttactttggccgtcatcctagagggaatgtactggaattaaacgtcgagtcatattcttccctcttagagcaacaaaatttgaatgtttctctcactttctggaatttttaaaaagcaaactttttaagttattttttcagattttatttctcattagccttttttccttgaactccattttggagtgcaccctgtagttgtaagagcattgtgctgagagcgttccccaaatgagggtctgcagcttgcactgacccctgagttcctcacccaccagccccgtgccgacccgtctaacccgtgtgggggtgctccactcaaataggcccttggcagaaaagattgtccgttctgtccacacactgcctggatacagtctccagctctaggagatggaattggtttgctccatttagaaatagatcaaaactgggcattcagtagatggtaccaatatcttcctgtactgggaaatactaaatttagattgtgaatatttacctaatgataatttttagagaaggagatatcatagatgagtatgattgggaagttcagaaaactaaaatttgatttttacagccatccaactatagaatcattagaatttagtcatttatggataaattaaaatgaacacctggactcttgttaaaatcagaaagtccaaaccaaagataggcacttcccattcaccattctgttttaaagcagtaaaaattgaggtgcccttggatatccacaagcctaaattgagtacacccttgaaccagagcccctcagttaatggggtgaccgacatggggtagctgatcccagggggcattcccctctcgagctggccctgcactgggtggcctggggattgtgcttccttgcacagtggtgcacatttctatgtgtggatgagattttcttgtcaacttttcctgccaagacactaaatgcttttcagtgctaatactgacctgatagtagagatttctttccctgagtcggatggtagcaggatttacttggtaacccttggtttaaaatacctgtttttttgtttgtttgttttcttttgttttttaaggaaataagatcaataggcggagggaaattgtttctatatgcacttattaaataatttttgttaacaaccctgccctgggataaaagtgaatggaagtacatgactgagtaacagtaattaattctttgccctgatcgtttatttggggactgtatatgctttcttgactgacaatagaatgttgtattagttttcattgtgtctttatttgcagttcacagcacttttgttttgcatatgctacaaactaaaagtttagcaattacgttatattccaattctggagtccagattgtacaaattagatgaaattctaattcgtcattttaggaagaaatcaattacctaaaattactggctcttttcaacataccctttagtatgtaaaaaaataagcttcaaatgcgtgggttaaagttaactatcaatcccagtttaagaatgatatttctgtaagaaaactgctttattttccaagttgtagtatttaacataggctgagtcacaaataagtttttaattgtatcttaatgcagttgtctctgcctttcaagtcactttgattgaaacattttaagcagaacaaatatagccaataatttaaaataatcaccccaaaaccatttctcaaacctgctaaaactttgagcatgtgaataattttctcctcttcacattcttcttatgtgggaaggaagtgaatttgaaatattaaaatctgccctttggaataggctactttggccgtttataacttgatttctactcggggaggaaggtacattcccaatagctttccaattgggatatcctgtgatatgattggcaggctgtccgagtagttacacttaataaaatttgggttcgaaagcagattcctggaagttcaaaaataactaaaacagccccggataggttagaaagtgaacttaaatcattctcagaattagaaaataagaagttattttttatcttcaaagataaaaagggggccgggcacggtggctcacgcctgtaatcccagcactttggaaagccgaggcaagtggatcacgaggtcgagagattgagaccatcctggccaacatggtggaaccccgtctctactaaaactacaaaaattagccaagatcacgccattgcactccagcctggagacagtgagacgccgtctcaaaaaaaaaaaaaaaaagataaaaagagttttgagcaagctcaaagacccgtgtgccagcagtcagatgcccacgttgggtgcacaggctaaggcagccggcccaatctggaaaccagtcaggcttttgccagcccctaatctagctgattggaacatgtttgttgatacaccagctctgtgatttctcaggtttagagaactctagaatttgatagagtgggccgggggcagtggctcatgcctgtaatctcagcactttgggaggctgaggtaagcagatcacgtgaggtcaggaggttgagaccagcctggccaacatggtgaaaccccgtctctactaaaaatacaaaaattagccaggcatggtggtgcgcgcctgtagtcccacctacttgggaggctgaggaaggagaattgcttgaacctaggaagtggaggttgcagtgagccaagatcacgccactgcactccagcctggagtggacagagactccatctc

SEQ ID NO: 316077 - DNA, 842 bp, Homo sapiens
agcacctgtctccatgacgacatgctctcggtttattgtgcaaccgagagcatctgtctccatgacgacatgctctcggttgcacaataaaccgacgtttagccagaccattgccctcttgaacatttaccgtaaccctcaaaactcttcccagtctgctgacggtttgcgctgtgccgtgagcgatgtggagatgcaggaacactatgatgagttttttgaggaggtttttacagaaatggaggagaagtatggggaagtagaggagatgaacgtctgtgacaacctgggagaccacctggtggggaacgtgtacgtcaagtttcgccgtgaggaagatgcggaaaaggctgtgattgacttgaataaccgttggtttaatggacagccgatccacgccgagctgtcacccgtgacggacttcagagaagcctgctgccgtcagtatgagatgggagaatgcacacgaggcggcttctgcaacttcatgcatttgaagcccatttccagagagctgcggcgggagctgtatggccgccgtcgcaagaagcatagatcaagatcccgatcccgggagcgtcgttctcggtctagagaccgtggtcgtggcggtggcggtggcggtggtggaggtggcggcggacgggagcgtgacaggaggcggtcgagagatcgtgaaagatctgggcgattctgagccatgccatttttaccttatgtctgctagaaagtgttgtagttgattgaccaaaccagttcataaggggaattttttttaaaaaacaacaaaaaaaaaacatacaaagatgggtttctgaataaaatttgtagtgataacagta

SEQ ID NO: 316078 - DNA, 960 bp, Homo sapiens
aaaaaaaacaacaaacacaaaagaacacggcgaggatgaggaagtgcggcttaatcggccgaggagacggcagcggcggcggcgggtgggaaatggcggagtatctggcctccatcttcggcaccgagaaagacaaagtcaactgttcattttatttcaaaattggagcatgtcgtcatggagacaggtgctctcggttgcacaataaaccgacgtttagccagaccatcttgattcaaaacatctatcgtaatccccaaaacagtgcacagacggctgacggctcacactgtgccgtgagcgatgtggagatgcaggaacactatgatgagttttttgaggaggtttttacagaaatggaggagaagtatggggaagtagaggagatgaacgtctgtgacaacctgggagaccacctggtggggaacgtgtacgtcaagtttcgccgtgaggaagatgcggaaaaggctgtgattgacttgaataaccgttggtttaatggacagccgatccacgccgagctgtcacccgtgacggacttcagagaagcctgctgccgtcagtatgagatgggagaatgcacacgaggcggcttctgcaacttcatgcatttgaagcccatttccagagagctgcggcgggagctgtatggccgccgtcgcaagaagcatagatcaagatcccgatcccgggagcgtcgttctcggtctagagaccgtggtcgtggcggtggcggtggcggtggtggaggtggcggcggacgggagcgtgacaggaggcggtcgagagatcgtgaaagatctgggcgattctgagccatgccatttttaccttatgtctgctagaaagtgttgtagttgattgaccaaaccagttcataaggggaattttttttaaaaaacaacaaaaaaaaaacatacaaagatgggtttctgaataaaatttgtagtgataacagta

SEQ ID NO: 316079 - DNA, 920 bp, Homo sapiens
cgggggacgtctcccgcgggcgtcggcagggtcggcggcgtcggcagcagtgtcgacggcagcggcggcggcgggtgggaaatggcggagtatctggcctccatcttcggcaccgagaaagacaaagtcaactgttcattttatttcaaaattggagcatgtcgtcatggagacaggtgctctcggttgcacaataaaccgacgtttagccagcactgaatctcaactgaagcacttgccagaggcagccggtgccgtgagcgatgtggagatgcaggaacactatgatgagttttttgaggaggtttttacagaaatggaggagaagtatggggaagtagaggagatgaacgtctgtgacaacctgggagaccacctggtggggaacgtgtacgtcaagtttcgccgtgaggaagatgcggaaaaggctgtgattgacttgaataaccgttggtttaatggacagccgatccacgccgagctgtcacccgtgacggacttcagagaagcctgctgccgtcagtatgagatgggagaatgcacacgaggcggcttctgcaacttcatgcatttgaagcccatttccagagagctgcggcgggagctgtatggccgccgtcgcaagaagcatagatcaagatcccgatcccgggagcgtcgttctcggtctagagaccgtggtcgtggcggtggcggtggcggtggtggaggtggcggcggacgggagcgtgacaggaggcggtcgagagatcgtgaaagatctgggcgattctgagccatgccatttttaccttatgtctgctagaaagtgttgtagttgattgaccaaaccagttcataaggggaattttttttaaaaaacaacaaaaaaaaaacatacaaagatgggtttctgaataaaatttgtagtgataacagta

SEQ ID NO: 316080 - DNA, 7505 bp, Homo sapiens
tctttaatgttttgatttatgaaccgaatctcccctaactaaaccagtggccatggattgtggtataaccaagcatcttaagtgaccacccagttctttgattttggggggtgtcccaagtgttgggctgagagaaatcaactgttccctattctaaaagttttctttaatctggctggaggcactttctttatgtttttctggatcatagattacctgagaatgtgaaatgtgaagttaatttaggcattccaggtcagtgctggggagagcccattggagctcgatggggtcagtagtatgtgtcagcttaagcatcctagtttgatgcgtgggtttgttttggttggttttaggcaatcctagccacccttggctttcccattagactgcattgcctctttacgttaagcttccttcattaaatagccactgccagaatacctgagtgagaccaactgaattttactgttgaataattgggctcagtttagcttttcatcagggttgtcatggtacggtcatttcagttcaaagctgagtcaagtcagctttgggaagcctcccaggcctgagttcagttgactcagggctgtacttggcggcttatggaagaaacggggccctgatgcaggtctgagtggttcagtgtggacagtttgtcagacctccctcttaggtggggtgggcttcccagctgcacacctttgactgaggaactcttcatacaaccactcccctttaaacagagctagaaatggagctggctggttttataaaaccaccacttacaaaactgcttcacgtggatattgttgagactaaacatttatttttctaaatcatgcgagtgattgctttagcttgtaaatctctagcataattcagggtgggtttctttataagctgcttacagtgatatggacgttaagattcatgtaatatattagcctactaacttaaacatggtttgttttttcagacaacttgattttaagaagaacggtacagtgtaaggtttcaagtctgcctgatccagtttaaagcacaagggctaaaaggattttttttccttaaaagaaggatcggaaaagagcaaatgttttaagctattgtattatgtaaacagagatcccaccaagaaagtgtaaatcagagccgggtgtccatgacagttgacagacctgtttggtgtgcctgttttgctaggagaccagagaacttgatgtactgcagacagctgagttacgcatttggttttgaaaaattatcttgtgtgaggaatatgattataacgtgaatttttccacatcttggtgtctgctagcttgaagtacaagaaaatattagtattctactatttatcttgcattaaaacactttaacattgaaaacgtgggactaatcaaaacaatacagtttcttcttggttgctggctgacttgacccaagtcactgctcaaactctgttttcataatatgatggttttggtgtactcttcagaagacaaatgtctgacttgcgggaaaaaaacaaacgtttagccatttgcaaacaaattgtctctttgcaattgtctaatatatgcacagcagccagtagaattcccctttttatttttttttccccgcagaccatcttgattcaaaacatctatcgtaatccccaaaacagtgcacagacggctgacggctcacactgtaagtcccacagttggagaaatttttttaaaacaatggtgttaaagagcccactcttaattgagacaaataatgttggcttctgagctgctgacatagagctgttgcaaacaggacaaggtgctggaactccttggcgcacacagcaagaacttgatacttggccacgttcaggaggcttatcccttctagggagggtcactggcccggccacctccattgattgacatttgtcatgagagcaggtccgtccatgtgaaacggatttcaacattttgagccattcattggtctttacagtgactgaacccctggcctttattaagttctttgtgtaaaattaaaactcttaggaatattaaggaatcaataaggtaagttgcccagtaagtgtgggttttatttcaccattataatttttcctccaggaagtggagatttcatgatatgtaacaattgtatttctctaatacagtaattttttccatcagtttatgtaagcattattctttccgagttcattaaaaattttctgccacatctaagaacattttggtgctagcctggcaaactatttgtgcttttacctgaattggaattttgaaaaggagagttttcacgttctgtaagcagaagtacaagatgggcatatcatgagacctccgttacaccgcagtgttagggattcaaggcagccgccaactgagaaaacgcctctgcttctccagaaaataacttgctctcttttcagcactgaatctcaactgaagcacttgccagaggcagccggttaagtgtttacctttaattttccataatataaagttgttgcgttttgtatttcagaccattgccctcttgaacatttaccgtaaccctcaaaactcttcccagtctgctgacggtttgcgctgtaagttcatacaagttccttccccggttccctgggcttgcgtgtcagagctcagtgtccactccatctggtctgccgtgctagtgtcaaggaccgcgtttcactagaggtggcaaggagctttcgtcccactgaccccatggaaacctcttttggagatttgaactcccaccgtgtgttaaaagggaaaaagtaactggaaagggtgccctttaaaacagtctagagctgggccgggcgcggtggctcacgcctgtaatcccagcactttgggaggccgaggcgggtggatcatgaggtcaggagttcaagaccaatctggccaacatggtgaaaccccatctctactaaagatacaaaaattagctgggcgtggtggcagatgcctgcaatcccagcttctagggaggctgaggcagagaatcgcttgaacccgggaggcggaggttgcagtgaactgagatcgtgccgctgcactccagcctgggcgacagagtgagactccgtctccaaaaaaaaaaaaaaaaacagtctggagctgctgctgccccttcttcctttactttggccgtcatcctagagggaatgtactggaattaaacgtcgagtcatattcttccctcttagagcaacaaaatttgaatgtttctctcactttctggaatttttaaaaagcaaactttttaagttattttttcagattttatttctcattagccttttttccttgaactccattttggagtgcaccctgtagttgtaagagcattgtgctgagagcgttccccaaatgagggtctgcagcttgcactgacccctgagttcctcacccaccagccccgtgccgacccgtctaacccgtgtgggggtgctccactcaaataggcccttggcagaaaagattgtccgttctgtccacacactgcctggatacagtctccagctctaggagatggaattggtttgctccatttagaaatagatcaaaactgggcattcagtagatggtaccaatatcttcctgtactgggaaatactaaatttagattgtgaatatttacctaatgataatttttagagaaggagatatcatagatgagtatgattgggaagttcagaaaactaaaatttgatttttacagccatccaactatagaatcattagaatttagtcatttatggataaattaaaatgaacacctggactcttgttaaaatcagaaagtccaaaccaaagataggcacttcccattcaccattctgttttaaagcagtaaaaattgaggtgcccttggatatccacaagcctaaattgagtacacccttgaaccagagcccctcagttaatggggtgaccgacatggggtagctgatcccagggggcattcccctctcgagctggccctgcactgggtggcctggggattgtgcttccttgcacagtggtgcacatttctatgtgtggatgagattttcttgtcaacttttcctgccaagacactaaatgcttttcagtgctaatactgacctgatagtagagatttctttccctgagtcggatggtagcaggatttacttggtaacccttggtttaaaatacctgtttttttgtttgtttgttttcttttgttttttaaggaaataagatcaataggcggagggaaattgtttctatatgcacttattaaataatttttgttaacaaccctgccctgggataaaagtgaatggaagtacatgactgagtaacagtaattaattctttgccctgatcgtttatttggggactgtatatgctttcttgactgacaatagaatgttgtattagttttcattgtgtctttatttgcagttcacagcacttttgttttgcatatgctacaaactaaaagtttagcaattacgttatattccaattctggagtccagattgtacaaattagatgaaattctaattcgtcattttaggaagaaatcaattacctaaaattactggctcttttcaacataccctttagtatgtaaaaaaataagcttcaaatgcgtgggttaaagttaactatcaatcccagtttaagaatgatatttctgtaagaaaactgctttattttccaagttgtagtatttaacataggctgagtcacaaataagtttttaattgtatcttaatgcagttgtctctgcctttcaagtcactttgattgaaacattttaagcagaacaaatatagccaataatttaaaataatcaccccaaaaccatttctcaaacctgctaaaactttgagcatgtgaataattttctcctcttcacattcttcttatgtgggaaggaagtgaatttgaaatattaaaatctgccctttggaataggctactttggccgtttataacttgatttctactcggggaggaaggtacattcccaatagctttccaattgggatatcctgtgatatgattggcaggctgtccgagtagttacacttaataaaatttgggttcgaaagcagattcctggaagttcaaaaataactaaaacagccccggataggttagaaagtgaacttaaatcattctcagaattagaaaataagaagttattttttatcttcaaagataaaaagggggccgggcacggtggctcacgcctgtaatcccagcactttggaaagccgaggcaagtggatcacgaggtcgagagattgagaccatcctggccaacatggtggaaccccgtctctactaaaactacaaaaattagccaagatcacgccattgcactccagcctggagacagtgagacgccgtctcaaaaaaaagaaaaaaaaaagaatgctttcatcagcaaaacattgtaacattccctttacttgagggcgtccacaataccgtaaggttgcgtgaactgtcctactgaatcttcatggttgcttggattttaatcacatcagaagaatttgagagcataccatggctggcagtccataaaagactagttaggaacatcagcttttaatcatcgaccctgctttcaggtttcattttaaacttatagaagaggggaagacatcagtgtgcttatttggcctttactctaaatcttaaaaggaagaaaattttaatatttcttagtttgagcccaggtgcggtgtctcacgcctgtaatcacagcactttgggaggccaaggcaggcggatcacttgaggtcaggagttcaagaccagcctgccaacgtggtgaaaccctgtctgtactaaaaattaaaaaaaaaaaaaaaaattagccgggcgtggtggcagtcgcctgtagtcccagcaactccagaggctgagacaggagaatcgcttgaaccccagaggtggaggttgcagtgagctgagatggtgccactgcactccagcctgggcgacagagccagactgcatcttgtgggtgtaaaaaaaaaatttgtagtttgagagtcaactttttcctcacagtttctgaaaatgtggcccttttgatgctgattaaagctggttgtgattttaacaccttagtagccagaatcgagactgtcatggggacatttaaaatctcaccacacttgacaccattcacaagtagccatgtggctcagtctcctgagtgctcctgcagagtgcagctctgccaggcttttctctagataatctcgtgtgtgttactgtagcagtttgagtttaaacacaagagttcactcggttaacatgttctaaccagcaagatttctgttgtttgcaggtgccgtgagcgatgtggagatgcaggaacactatgatgagttttttgaggtgagagaactgaactctgtgactgatagacctgttgatcttctgtatctgtttggaaggatttaaaatgtttctctgctaataaacatacatgagttatatctaatgacactttgtaatgtataacgagtcttaaaccactgtggtctcccttcaggaggtttttacagaaatggaggagaagtatggggaagtagaggagatgaacgtctgtgacaacctgggagaccacctggtggggaacgtgtacgtcaaggtaggagccagggcgagacggcggcgtggccgcttagtgtgccagggccaaggccaacaggcgaaagcgagacagtggtgcagccgcttagtgtgccggggccaaggccgacagaggatggggtgcctgtcgccatgcaccttgagatcctggatgctcaggcgcacagcagggctcaggtgcactggctcggcgcctaccagctgcgtcatatgtggcggtggccagcccacacgtgcgcccagccagcagaactgaaggacggaccgtacaccacagccatcgttatttcagtgtagaatatttagtacctgttggtttagaagctgtgtggactaaggaaaagttaggtttactcacatgtttggtttcttttttcttttttagtgaataaaactttatttgcctacacagccatatttgctcctttaaccagttgaatttgaaaaatgaaggcaacatttggcaaaatcttggactatcttgaagttaatctcattgaaaataaaggatttttcaattatcctgtaatactattccaccttactatacctgagtgtgtatatctctctctgatatacttggattggtaattgagaaagtcttattaaagcgtggatggcaagcacttctgtttttgtcttttcagtttcgccgtgaggaagatgcggaaaaggctgtgattgacttgaataaccgttggtttaatggacagccgatccacgccgagctgtcacccgtgacggacttcagagaagcctgctgccgtcagtatgagatggggtgagtgaggagtggccagtgacgtgactgagcacag

SEQ ID NO: 316081 - DNA, 870 bp, Homo sapiens
gaatgaaaaattttatcatcactcctgttcaccccgcagagtctgcggagtgctaaagggcacaccaataaggatccgagggagggggtctacatctgctttttcagcccccaaagccatatattggggtggcccaatataaagctactcattagtttggttcctgagcagacctgctaataaacctcaaaaacacaaaagtctacttcactagccagactcgtgccgaattcggcacgaggttttttgaggaggtttttacagaaatggaggagaagtatggggaagtagaggagatgaacgtctgtgacaacctgggagaccacctggtggggaacgtgtacgtcaagtttcgccgtgaggaagatgcggaaaaggctgtgattgacttgaataaccgttggtttaatggacagccgatccacgccgagctgtcacccgtgacggacttcagagaagcctgctgccgtcagtatgagatgggagaatgcacacgaggcggcttctgcaacttcatgcatttgaagcccatttccagagagctgcggcgggagctgtatggccgccgtcgcaagaagcatagatcaagatcccgatcccgggagcgtcgttctcggtctagagaccgtggtcgtggcggtggcggtggcggtggtggaggtggcggcggacgggagcgtgacaggaggcggtcgagagatcgtgaaagatctgggcgattctgagccatgccatttttaccttatgtctgctagaaagtgttgtagttgattgaccaaaccagttcataaggggaattttttttaaaaaacaacaaaaaaaaaacatacaaagatgggtttctgaataaaatttgtagtgataacagta

SEQ ID NO: 316082 - DNA, 2170 bp, Homo sapiens
cgggggacgtctcccgcgggcgtcggcagggtcggcggcgtcggcagcagtgtcgacggcagcggcggcggcgggtgggaaatggcggagtatctggcctccatcttcggcaccgagaaagacaaagtcaactgttcattttatttcaaaattggagcatgtcgtcatggagacaggtgctctcggttgcacaataaaccgacgtttagccagaccattgccctcttgaacatttaccgtaaccctcaaaactcttcccagtctgctgacggtttgcgctgtgccgtgagcgatgtggagatgcaggaacactatgatgagttttttgaggaggtttttacagaaatggaggagaagtatggggaagtagaggagatgaacgtctgtgacaacctgggagaccacctggtggggaacgtgtacgtcaagtttcgccgtgaggaagatgcggaaaaggctgtgattgacttgaataaccgttggtttaatggacagccgatccacgccgagctgtcacccgtgacggacttcagagaagcctgctgccgtcagtatgagatgggagaatgcacacgaggcggcttctgcaacttcatgcatttgaagcccatttccagagagctgcggcgggagctgtatggccgccgtcgcaagaagtgagtattcctgtgcccgttgttaagctcagtggcttctttctcccctcacaaccctcccccttccaaaaaaaaaattttggcataggtgtcgtttctgttttttaaaaggcagtgcttagaacatagtacatatttttaaatatccaaatgtcctctttggagaagaatattcacctgcacacaggtaacttcattatccaacttctcaagtagagatcagatcttagtaatcaagcaagagggcggttagctgggcagccgcggacatgaggctcgtggtgaaagtgggcatgcagtttattctcccagatattacgaagaagaagaatagatgttgtaacctcctttagatcagggatggcttccctgggacacattggaagaagaattgtcttgggtcacaaataaaatacactaatgatagctgataactttttttttaattgcaaaaaaaatctcataatgttttaagcaagttgatgaatttgtgttgggctgcaggttggacaagcttttgctttacatatttcacatgtccactggggtttcttttggttttgcttgttggttttagggcatttcattatgtcttgggatcgctggcatcctcccttcgggacactggcagaatcaggcccagcggtcacatctctctgatcctacatttaaatgtacgacaggtcacagagcagagaaaatcaagacgtcagaatcgaaccgattgagttctgagtctggagaggttctcatccctcttctgttaaacatggactagtaaatagatgggtggcgattgttttattgtcagcattcaagaagcataagagaaaaacaggcctgctctccccagcccaaaaacctgatggacacagtagctatgagcgcctgaagcgtggggtcagtgagggttgaagatggtatgtgtccagctcattttgattatgatttcctgtgaccatttgagttggttctagaagaagacagaagatgcaaggtattacacctgttcacttctaagttgcacatttttttctcctgaaacttttcacacctgaaatcagggtgtgtctcagtcacggcgtgcagtctcttcagcagtgtttttccttatcagtgccgttggcttgaggagctgcgcgtgttgagagagtgggtgtggttctgtgctgcgtgccgtggtttggatggcacggttttctttattttccttggttgcaggcatagatcaagatcccgatcccgggagcgtcgttctcggtctagagaccgtggtcgtggcggtggcggtggcggtggtggaggtggcggcggacgggagcgtgacaggaggcggtcgagagatcgtgaaagatctgggcgattctgagccatgccatttttaccttatgtctgctagaaagtgttgtagttgattgaccaaaccagttcataaggggaattttttttaaaaaacaacaaaaaaaaaacatacaaagatgggtttctgaataaaatttgtagtgataacagta

SEQ ID NO: 316083 - DNA, 2170 bp, Homo sapiens
cgggggacgtctcccgcgggcgtcggcagggtcggcggcgtcggcagcagtgtcgacggcagcggcggcggcgggtgggaaatggcggagtatctggcctccatcttcggcaccgagaaagacaaagtcaactgttcattttatttcaaaattggagcatgtcgtcatggagacaggtgctctcggttgcacaataaaccgacgtttagccagaccatcttgattcaaaacatctatcgtaatccccaaaacagtgcacagacggctgacggctcacactgtgccgtgagcgatgtggagatgcaggaacactatgatgagttttttgaggaggtttttacagaaatggaggagaagtatggggaagtagaggagatgaacgtctgtgacaacctgggagaccacctggtggggaacgtgtacgtcaagtttcgccgtgaggaagatgcggaaaaggctgtgattgacttgaataaccgttggtttaatggacagccgatccacgccgagctgtcacccgtgacggacttcagagaagcctgctgccgtcagtatgagatgggagaatgcacacgaggcggcttctgcaacttcatgcatttgaagcccatttccagagagctgcggcgggagctgtatggccgccgtcgcaagaagtgagtattcctgtgcccgttgttaagctcagtggcttctttctcccctcacaaccctcccccttccaaaaaaaaaattttggcataggtgtcgtttctgttttttaaaaggcagtgcttagaacatagtacatatttttaaatatccaaatgtcctctttggagaagaatattcacctgcacacaggtaacttcattatccaacttctcaagtagagatcagatcttagtaatcaagcaagagggcggttagctgggcagccgcggacatgaggctcgtggtgaaagtgggcatgcagtttattctcccagatattacgaagaagaagaatagatgttgtaacctcctttagatcagggatggcttccctgggacacattggaagaagaattgtcttgggtcacaaataaaatacactaatgatagctgataactttttttttaattgcaaaaaaaatctcataatgttttaagcaagttgatgaatttgtgttgggctgcaggttggacaagcttttgctttacatatttcacatgtccactggggtttcttttggttttgcttgttggttttagggcatttcattatgtcttgggatcgctggcatcctcccttcgggacactggcagaatcaggcccagcggtcacatctctctgatcctacatttaaatgtacgacaggtcacagagcagagaaaatcaagacgtcagaatcgaaccgattgagttctgagtctggagaggttctcatccctcttctgttaaacatggactagtaaatagatgggtggcgattgttttattgtcagcattcaagaagcataagagaaaaacaggcctgctctccccagcccaaaaacctgatggacacagtagctatgagcgcctgaagcgtggggtcagtgagggttgaagatggtatgtgtccagctcattttgattatgatttcctgtgaccatttgagttggttctagaagaagacagaagatgcaaggtattacacctgttcacttctaagttgcacatttttttctcctgaaacttttcacacctgaaatcagggtgtgtctcagtcacggcgtgcagtctcttcagcagtgtttttccttatcagtgccgttggcttgaggagctgcgcgtgttgagagagtgggtgtggttctgtgctgcgtgccgtggtttggatggcacggttttctttattttccttggttgcaggcatagatcaagatcccgatcccgggagcgtcgttctcggtctagagaccgtggtcgtggcggtggcggtggcggtggtggaggtggcggcggacgggagcgtgacaggaggcggtcgagagatcgtgaaagatctgggcgattctgagccatgccatttttaccttatgtctgctagaaagtgttgtagttgattgaccaaaccagttcataaggggaattttttttaaaaaacaacaaaaaaaaaacatacaaagatgggtttctgaataaaatttgtagtgataacagta

SEQ ID NO: 316084 - DNA, 941 bp, Homo sapiens
aaaaaaaacaacaaacacaaaagaacacggcgaggatgaggaagtgcggcttaatcggccgaggagacggcagcggcggcggcgggtgggaaatggcggagtatctggcctccatcttcggcaccgagaaagacaaagtcaactgttcattttatttcaaaattggagcatgtcgtcatggagacaggtgctctcggttgcacaataaaccgacgtttagccaggtttgtttgcctttttttcatgtaaattataaaaacttcatgttcttttcaaagacagttaatttctacatattaagcaagtcattttttctctcgtagttgtattttccatttgtgttcataagtgtgttcttttatttaaataatagtgaggcaggtgatcgacttccagtggaaggtctgagaccaccactccttgtttttatcattagagaaactttaaaaatcagtttttgatgtttgtgtgttggctgtgcctgatatttgctgccctgccatcttccctaccccctctgatagacatgggtccagagggggtggccgtgccagccttgggttagcctcctccaggcaccagtggacacggagtgggctttctgctctttgctgtctccagacagtagaggtgagccaccttccaagttagcgtgattgtcaccaggcccatcatgctgctcgagcttctctggctgcgtcctcactttcacatccctagctgaggaaacagcgagtcgcatcacgtcatggaaacatgaaaaattaagctgaaaggtagaaaatgggccgtaaattgctcttagcgggtctgtttggttaattgaggagtgcctgttatcttgggcttagatccgctctgagttcagttcaatcaaaagttgtgagttttgatagttttatttttggttagttgaagaaaaggcaaaggttggtacacta

SEQ ID NO: 316085 - DNA, 1101 bp, Homo sapiens
aagcgcctgctgtgagttttattaatggcacttttctaaaacttcattaatttcaattatgagaatttgatatctggtgtaattcattgagctgctagtttgatttgctctagctcgttttaaaaagctctgtcaggcaacaggatatggatgggagtgggtcaggtgagtgaaaacgttttaagcactcctttcttcagaaaacacctctgtacccacatggggtgtgctcctcaggagtcattcagacaggtccaggagaacttgtcccccagggtgctccgtccagatacaattttaaatactgcactttcgcattttggtattttcaatggacttgacacccaataattctgaataaaggtaggaaagagggagatgattaacttttacaagtacctactatgtgccaggcactatgctacacattcttcatattttatctcaacattatcaaccaagtaggtattaagttctcacctattgatgaggaatctgaggctaagaacaatctagtaacttcttcagtgtcacccagctaataagtgactgggatttcagcctgtgtttgtctttttccagtctatgtttgttcctttatactactttgttcttaaatttcatctcttctcttaaaagaggtcaactttgggagaaggtagataatatataaacattgaaagaaaaagattatataatcatttgccagaaataaatctgaaaatattgggctggacacggtggcccacacctgcaatcccagcactttcagaggctaaggcaggaaaatcatttgaaccaaaaaaaaaaaaaaaaaaaaaagtagtgaaaatgtatggtttattaatgtaatcagcttgttattattagcatgcgtacttaatagccacaaaataaagcttaccagagatggtgtatttcggtccttgtgaaatatcttgggattggcattagaggtgacaggttagcaaggaatttgataatggcttgagagattccaataagcactacactctctgactcagaatgttctacttagaacacaaagaaagcttacgattgctcagcgcttgttcttccatgatgttgaaagttgcaaac

SEQ ID NO: 316086 - DNA, 999 bp, Homo sapiens
  misc_feature (848)..(848): n is a, c, g, or t
  misc_feature (856)..(856): n is a, c, g, or t
  misc_feature (864)..(864): n is a, c, g, or t
  misc_feature (866)..(866): n is a, c, g, or t
  misc_feature (876)..(876): n is a, c, g, or t
  misc_feature (879)..(879): n is a, c, g, or t
gggcaagcgccccggggggggaggttagggaccagcagctgtcgcgccgctctcagatttcctgttagacaagacaaattagagttttcctactgacttaacttgggtgaagagggaacagaaatctttgccccctgactttggaaatctcgtttaaccttcaaactggcgatgtcaagggttccaagtcctccacctccggcagaaatgtcgagtggccccgtagctgagagttggtgctacacacagatcaaggtagtgaaattctcctacatgtggaccatcaataactttagcttttgccgggaggaaatgggtgaagtcattaaaagttctacattttcatcaggagcaaatgataaactgaaatggtgtttgcgagtaaaccccaaagggttagatgaagaaagcaaagattacctgtcactttacctgttactggtcagctgtccaaagagtgaagttcgggcaaaattcaaattctccatcctgaatgccaagggagaagaaaccaaagctatggagagtcaacgggcatataggtttgtgcaaggcaaagactggggattcaagaaattcatccgtagagattttcttttggatgaggccaacgggcttctccctgatgacaagcttaccctcttctgcgaggtgagtgttgtgcaagattctgtcaacatttctggccagaataccatgaacatggtaaaggttcctgagtgccggctggcagatgagttaggaggactgtgggagaattcccggttcacagactgctgcttgtgtgttgccggccaggaattccaggctcacaaggctatcttagcagtcgtcccggtttagtgccngttgactnaatggggngnccaagatccntgnacacggtggccccagtttaagaaaaaggccctcacaggagccacctcccaagtgggtttgcgcgaaatctcgcgcaatgtgaccccccggaaaaatgcccaaaacgcgaaatattgggga

SEQ ID NO: 316087 - DNA, 2554 bp, Homo sapiens
gaaacccagggaggggaggggaggagaagggagtaatggggaggaggccgcgcggggtggggtctggcggtacgcgctggctgcgtcgacgtgctgacgccatgacgccccggctggtgtgtgtcggtgtgtatgtgtgtgtgtgagtgtgcgcgctccgagtgtgtgtgtatttgtgtatcggcggtcccgcaggtcccggatgttgcggacagtatgaggcaagcgcagggggacggggaccagcagctgtcgccgccgctctcagggtgaagagggaacagaaatctttgccccctgactttggaaatctcgtttaaccttcaaactggcgatgtcaagggttccaagtcctccacctccggcagaaatgtcgagtggccccgtagctgagagttggtgctacacacagatcaaggtagtgaaattctcctacatgtggaccatcaataactttagcttttgccgggaggaaatgggtgaagtcattaaaagttctacattttcatcaggagcaaatgataaactgaaatggtgtttgcgagtaaaccccaaagggttagatgaagaaagcaaagattacctgtcactttacctgttactggtcagctgtccaaagagtgaagttcgggcaaaattcaaattctccatcctgaatgccaagggagaagaaaccaaagctatggagagtcaacgggcatataggtttgtgcaaggcaaagactggggattcaagaaattcatccgtagagattttcttttggatgaggccaacgggcttctccctgatgacaagcttaccctcttctgcgaggtgagtgttgtgcaagattctgtcaacatttctggccagaataccatgaacatggtaaaggttcctgagtgccggctggcagatgagttaggaggactgtgggagaattcccggttcacagactgctgcttgtgtgttgccggccaggaattccaggctcacaaggctatcttagcagctcgttctccggtttttagtgccatgtttgaacatgaaatggaggagagcaaaaagaatcgagttgaaatcaatgatgtggagcctgaagtttttaaggaaatgatgtgcttcatttacacggggaaggctccaaacctcgacaaaatggctgatgatttgctggcagctgctgacaagtatgccctggagcgcttaaaggtcatgtgtgaggatgccctctgcagtaacctgtccgtggagaacgctgcagaaattctcatcctggccgacctccacagtgcagatcagttgaaaactcaggcagtggatttcatcaactatcatgcttcggatgtcttggagacctctgggtggaagtcaatggtggtgtcacatccccacttggtggctgaggcataccgctctctggcttcagcacagtgcccttttctgggacccccacgcaaacgcctgaagcaatcctaagatcctgcttgttgtaagactccgtttaatttccagaagcagcagccactgttgctgccactgaccaccaggtagacagcgcaatctgtggagcttttactctgttgtgaggggaagagactgcattgtggccccagacttttaaaacagcactaaataacttgggggaaacggggggagggaaaatgaaatgaaaaccctgttgctgcgtcactgtgttccctttggcctggctgagtttgatactgtggggattcagtttaggcgctggcccgaggatatcccagcggtggtacttcggagacacctgtctgcatctgactgagcagaacaaatcgtcaggtgcctggagcaaaaaggaaaaaaaaaaaagaaaggacattgagttttaacagaagggaaaaggaaagaagaaaagatttttgcagaatttctcaaaaatcagtttgtggattccagtagtatttatattgagagaaacaaattttagtccttctaactgtgctaaaacttggatatttgtgaaaactccttaccaccatacaagcatcagaagagctctcttgttgttagcacttattgtttgcaagaacagaatacatccttttatccttttatgaaaaatgacaagtgaaggcaaaaggggaaggttatttgatctggaagatgagtgttctgatgtggtggcttttgcaaaaatctttattggtgttgaaaactggaaaaaataactcatccagaattcatattgtcttgacaagaactatggttctctgtttttagatattgtggaaaatgtttttgggcatttttctctgattttatttcttctcccccacccctttttctaaaaaacaaacaaaaaaaaaaaacacacaaaacaaaaacagaacaaaagaagagagaaggaaattttatcaattaaaaatgctgtgtgataaaatcccagcccagattgctcagctgtttgtacctgacttgccgcctgcataggagccagttctgttccttctgactagcccctcttcctccaggggagaacttccaaatgttaatttttttttttttgaaaatataaataattactattttgta

SEQ ID NO: 316088 - DNA, 2957 bp, Homo sapiens
gaaacccagggaggggaggggaggagaagggagtaatggggaggaggccgcgcggggtggggtctggcggtacgcgctggctgcgtcgacgtgctgacgccatgacgccccggctggtgtgtgtcggtgtgtatgtgtgtgtgtgagtgtgcgcgctccgagtgtgtgtgtatttgtgtatcggcggtcccgcaggtcccggatgttgcggacagtatgaggcaagcgcagggggacggggaccagcagctgtcgccgccgctctcagggtgaagagggaacagaaatctttgccccctgactttggaaatctcgtttaaccttcaaactggcgatgtcaagggttccaagtcctccacctccggcagaaatgtcgagtggccccgtagctgagagttggtgctacacacagatcaaggtagtgaaattctcctacatgtggaccatcaataactttagcttttgccgggaggaaatgggtgaagtcattaaaagttctacattttcatcaggagcaaatgataaactgaaatggtgtttgcgagtaaaccccaaagggttagatgaagaaagcaaagattacctgtcactttacctgttactggtcagctgtccaaagagtgaagttcgggcaaaattcaaattctccatcctgaatgccaagggagaagaaaccaaagctatggagagtcaacgggcatataggtttgtgcaaggcaaagactggggattcaagaaattcatccgtagagattttcttttggatgaggccaacgggcttctccctgatgacaagcttaccctcttctgcgaggtgagtgttgtgcaagattctgtcaacatttctggccagaataccatgaacatggtaaaggttcctgagtgccggctggcagatgagttaggaggactgtgggagaattcccggttcacagactgctgcttgtgtgttgccggccaggaattccaggctcacaaggctatcttagcagctcgttctccggtttttagtgccatgtttgaacatgaaatggaggagagcaaaaagaatcgagttgaaatcaatgatgtggagcctgaagtttttaaggaaatgatgtgcttcatttacacggggaaggctccaaacctcgacaaaatggctgatgatttgctggcagctgctgacaagtatgccctggagcgcttaaaggtcatgtgtgaggatgccctctgcagtaacctgtccgtggagaacgctgcagaaattctcatcctggccgacctccacagtgcagatcagttgaaaactcaggcagtggatttcatcaactatcatgcttcggatgtcttggagacctctgggtggaagtcaatggtggtgtcacatccccacttggtggctgaggcataccgctctctggcttcagcacagtgcccttttctgggacccccacgcaaacgcctgaagcaatcctaagatcctgcttgttgtaagactccgtttaatttccagaagcagcagccactgttgctgccactgaccaccaggtagacagcgcaatctgtggagcttttactctgttgtgaggggaagagactgcattgtggccccagacttttaaaacagcactaaataacttgggggaaacggggggagggaaaatgaaatgaaaaccctgttgctgcgtcactgtgttccctttggcctggctgagtttgatactgtggggattcagtttaggcgctggcccgaggatatcccagcggtggtacttcggagacacctgtctgcatctgactgagcagaacaaatcgtcaggtgcctggagcaaaaaggaaaaaaaaaaaagaaaggacattgagttttaacagaagggaaaaggaaagaagaaaagatttttgcagaatttctcaaaaatcagtttgtggattccagtagtatttatattgagagaaacaaattttagtccttctaactgtgctaaaacttggatatttgtgaaaactccttaccaccatacaagcatcagaagagctctcttgttgttagcacttattgtttgcaagaacagaatacatccttttatccttttatgaaaaatgacaagtgaaggcaaaaggggaaggttatttgatctggaagatgagtgttctgatgtggtggcttttgcaaaaatctttattggtgttgaaaactggaaaaaataactcatccagaattcatattgtcttgacaagaactatggttctctgtttttagatattgtggaaaatgtttttgggcatttttctctgattttatttcttctcccccacccctttttctaaaaaacaaacaaaaaaaaaaaacacacaaaacaaaaacagaacaaaagaagagagaaggaaattttatcaattaaaaatgctgtgtgataaaatcccagcccagattgctcagctgtttgtacctgacttgccgcctgcataggagccagttctgttccttctgactagcccctcttcctccaggggagaacttccaaatgttaatttttttttttttgaaaatataaataattactattttgtactgtgtggtatctctggtcttttgtttcactcacctgccttgtctcttgggtctgagtcccttgcttaagggattttgaagtcctagttttcagcttgcagagattatgtctgaaatgcctaatgagtcgcagggatttgttgagactccgtaatctcaagttctctttgtgagctatcagcatctgccagtctcttgtcctccctgagtatctcacagtccatatcctgatgagggatcaggcccctacctctgccaaggcaagtaatggtagtgggcttttaaactgccccccgtatgttttaagacctaatccccacctcccttcttctaactaaatataaaaagatccaggggacataaatgtggagattaaataaagggaaattattgtctctaaaag

SEQ ID NO: 316089 - DNA, 2149 bp, Homo sapiens
  misc_feature (2121)..(2121): n is a, c, g, or t
  misc_feature (2133)..(2133): n is a, c, g, or t
  misc_feature (2144)..(2144): n is a, c, g, or t
gaaacccagggaggggaggggaggagaagggagtaatggggaggaggccgcgcggggtggggtctggcggtacgcgctggctgcgtcgacgtgctgacgccatgacgccccggctggtgtgtgtcggtgtgtatgtgtgtgtgtgagtgtgcgcgctccgagtgtgtgtgtatttgtgtatcggcggtcccgcaggtcccggatgttgcggacagtatgaggcaagcgcagggggacggggaccagcagctgtcgccgccgctctcagggtgaagagggaacagaaatctttgccccctgactttggaaatctcgtttaaccttcaaactggcgatgtcaagggttccaagtcctccacctccggcagaaatgtcgagtggccccgtagctgagagttggtgctacacacagatcaaggtagtgaaattctcctacatgtggaccatcaataactttagcttttgccgggaggaaatgggtgaagtcattaaaagttctacattttcatcaggagcaaatgataaactgaaatggtgtttgcgagtaaaccccaaagggttagatgaagaaagcaaagattacctgtcactttacctgttactggtcagctgtccaaagagtgaagttcgggcaaaattcaaattctccatcctgaatgccaagggagaagaaaccaaagctatggagagtcaacgggcatataggtttgtgcaaggcaaagactggggattcaagaaattcatccgtagagattttcttttggatgaggccaacgggcttctccctgatgacaagcttaccctcttctgcgaggtgagtgttgtgcaagattctgtcaacatttctggccagaataccatgaacatggtaaaggttcctgagtgccggctggcagatgagttaggaggactgtgggagaattcccggttcacagactgctgcttgtgtgttgccggccaggaattccaggctcacaaggctatcttagcagctcgttctccggtttttagtgccatgtttgaacatgaaatggaggagagcaaaaagaatcgagttgaaatcaatgatgtggagcctgaagtttttaaggaaatgatgtgcttcatttacacggggaaggctccaaacctcgacaaaatggctgatgatttgctggcagctgctgacaagtatgccctggagcgcttaaaggtcatgtgtgaggatgccctctgcagtaacctgtccgtggagaacgctgcagaaattctcatcctggccgacctccacagtgcagatcagttgaaaactcaggcagtggatttcatcaactatcatgcttcggatgtcttggagacctctgggtggaagtcaatggtggtgtcacatccccacttggtggctgaggcataccgctctctggcttcagcacagtgcccttttctgggacccccacgcaaacgcctgaagcaatcctaagatcctgcttgttgtaagactccgtttaatttccagaagcagcagccactgttgctgccactgaccaccaggtagacagcgcaatctgtggagcttttactctgttgtgaggggaagagactgcattgtggccccagacttttaaaacagcactaaataacttgggggaaacggggggagggaaaatgaaatgaaaaccctgttgctgcgtcactgtgttccctttggcctggctgagtttgatactgtggggattcagtttaggcgctggcccgaggatatcccagcggtggtacttcggagacacctgtctgcatctgactgagcagaacaaatcgtcaggtgcctggagcaaaaaggaaaaaaaaaaaagaaaggacattgagttttaacagaagggaaaaggaaagaagaaaagatttttgcagaatttctcaaaaatcagtttgtggattccagtagtatttatattgagagaaacaaattttagtccttctaactgtgctaaaacttggatatttgtgaaaactccttaccaccatacaagcatcagaagagctctcttgttgttagcacttattgtttgcaagaacagaatacatccttttatccttttatgaaaaatgacaagtgaaggaaatttgcgggggatcctgggagantcccaagagcgnggcgaagcttnccttt

SEQ ID NO: 316090 - DNA, 2676 bp, Homo sapiens
gaaacccagggaggggaggggaggagaagggagtaatggggaggaggccgcgcggggtggggtctggcggtacgcgctggctgcgtcgacgtgctgacgccatgacgccccggctggtgtgtgtcggtgtgtatgtgtgtgtgtgagtgtgcgcgctccgagtgtgtgtgtatttgtgtatcggcggtcccgcaggtcccggatgttgcggacagtatgaggcaagcgcagggggacggggaccagcagctgtcgccgccgctctcagatcgagtcttgctctgtcacccaggctggagtgcagtggcgcgatctcagctcactgccacctttgcctcctgggttcaagcgattcttctgcctcagcctcccgagtagctgggattacagggtgaagagggaacagaaatctttgccccctgactttggaaatctcgtttaaccttcaaactggcgatgtcaagggttccaagtcctccacctccggcagaaatgtcgagtggccccgtagctgagagttggtgctacacacagatcaaggtagtgaaattctcctacatgtggaccatcaataactttagcttttgccgggaggaaatgggtgaagtcattaaaagttctacattttcatcaggagcaaatgataaactgaaatggtgtttgcgagtaaaccccaaagggttagatgaagaaagcaaagattacctgtcactttacctgttactggtcagctgtccaaagagtgaagttcgggcaaaattcaaattctccatcctgaatgccaagggagaagaaaccaaagctatggagagtcaacgggcatataggtttgtgcaaggcaaagactggggattcaagaaattcatccgtagagattttcttttggatgaggccaacgggcttctccctgatgacaagcttaccctcttctgcgaggtgagtgttgtgcaagattctgtcaacatttctggccagaataccatgaacatggtaaaggttcctgagtgccggctggcagatgagttaggaggactgtgggagaattcccggttcacagactgctgcttgtgtgttgccggccaggaattccaggctcacaaggctatcttagcagctcgttctccggtttttagtgccatgtttgaacatgaaatggaggagagcaaaaagaatcgagttgaaatcaatgatgtggagcctgaagtttttaaggaaatgatgtgcttcatttacacggggaaggctccaaacctcgacaaaatggctgatgatttgctggcagctgctgacaagtatgccctggagcgcttaaaggtcatgtgtgaggatgccctctgcagtaacctgtccgtggagaacgctgcagaaattctcatcctggccgacctccacagtgcagatcagttgaaaactcaggcagtggatttcatcaactatcatgcttcggatgtcttggagacctctgggtggaagtcaatggtggtgtcacatccccacttggtggctgaggcataccgctctctggcttcagcacagtgcccttttctgggacccccacgcaaacgcctgaagcaatcctaagatcctgcttgttgtaagactccgtttaatttccagaagcagcagccactgttgctgccactgaccaccaggtagacagcgcaatctgtggagcttttactctgttgtgaggggaagagactgcattgtggccccagacttttaaaacagcactaaataacttgggggaaacggggggagggaaaatgaaatgaaaaccctgttgctgcgtcactgtgttccctttggcctggctgagtttgatactgtggggattcagtttaggcgctggcccgaggatatcccagcggtggtacttcggagacacctgtctgcatctgactgagcagaacaaatcgtcaggtgcctggagcaaaaaggaaaaaaaaaaaagaaaggacattgagttttaacagaagggaaaaggaaagaagaaaagatttttgcagaatttctcaaaaatcagtttgtggattccagtagtatttatattgagagaaacaaattttagtccttctaactgtgctaaaacttggatatttgtgaaaactccttaccaccatacaagcatcagaagagctctcttgttgttagcacttattgtttgcaagaacagaatacatccttttatccttttatgaaaaatgacaagtgaaggcaaaaggggaaggttatttgatctggaagatgagtgttctgatgtggtggcttttgcaaaaatctttattggtgttgaaaactggaaaaaataactcatccagaattcatattgtcttgacaagaactatggttctctgtttttagatattgtggaaaatgtttttgggcatttttctctgattttatttcttctcccccacccctttttctaaaaaacaaacaaaaaaaaaaaacacacaaaacaaaaacagaacaaaagaagagagaaggaaattttatcaattaaaaatgctgtgtgataaaatcccagcccagattgctcagctgtttgtacctgacttgccgcctgcataggagccagttctgttccttctgactagcccctcttcctccaggggagaacttccaaatgttaatttttttttttttgaaaatataaataattactattttgta

SEQ ID NO: 316091 - DNA, 2593 bp, Homo sapiens
aactaggctagtacgaggctggtgtggaatcggccgagggtcggtgtgtatgtgtgtgtgtgagtgtgcgcgctccgagtgtgtgtgtatttgtgtatcggcggtcccgcaggtcccggatgttgcggacagtatgaggcaagcgcagggggacggggaccagcagctgtcgccgccgctctcagatcgagtcttgctctgtcacccaggctggagtgcagtggcgcgatctcagctcactgccacctttgcctcctgggttcaagcgattcttctgcctcagcctcccgagtagctgggattacagggtgaagagggaacagaaatctttgccccctgactttggaaatctcgtttaaccttcaaactggcgatgtcaagggttccaagtcctccacctccggcagaaatgtcgagtggccccgtagctgagagttggtgctacacacagatcaaggtagtgaaattctcctacatgtggaccatcaataactttagcttttgccgggaggaaatgggtgaagtcattaaaagttctacattttcatcaggagcaaatgataaactgaaatggtgtttgcgagtaaaccccaaagggttagatgaagaaagcaaagattacctgtcactttacctgttactggtcagctgtccaaagagtgaagttcgggcaaaattcaaattctccatcctgaatgccaagggagaagaaaccaaagctatggagagtcaacgggcatataggtttgtgcaaggcaaagactggggattcaagaaattcatccgtagagattttcttttggatgaggccaacgggcttctccctgatgacaagcttaccctcttctgcgaggtgagtgttgtgcaagattctgtcaacatttctggccagaataccatgaacatggtaaaggttcctgagtgccggctggcagatgagttaggaggactgtgggagaattcccggttcacagactgctgcttgtgtgttgccggccaggaattccaggctcacaaggctatcttagcagctcgttctccggtttttagtgccatgtttgaacatgaaatggaggagagcaaaaagaatcgagttgaaatcaatgatgtggagcctgaagtttttaaggaaatgatgtgcttcatttacacggggaaggctccaaacctcgacaaaatggctgatgatttgctggcagctgctgacaagtatgccctggagcgcttaaaggtcatgtgtgaggatgccctctgcagtaacctgtccgtggagaacgctgcagaaattctcatcctggccgacctccacagtgcagatcagttgaaaactcaggcagtggatttcatcaactatcatgcttcggatgtcttggagacctctgggtggaagtcaatggtggtgtcacatccccacttggtggctgaggcataccgctctctggcttcagcacagtgcccttttctgggacccccacgcaaacgcctgaagcaatcctaagatcctgcttgttgtaagactccgtttaatttccagaagcagcagccactgttgctgccactgaccaccaggtagacagcgcaatctgtggagcttttactctgttgtgaggggaagagactgcattgtggccccagacttttaaaacagcactaaataacttgggggaaacggggggagggaaaatgaaatgaaaaccctgttgctgcgtcactgtgttccctttggcctggctgagtttgatactgtggggattcagtttaggcgctggcccgaggatatcccagcggtggtacttcggagacacctgtctgcatctgactgagcagaacaaatcgtcaggtgcctggagcaaaaaggaaaaaaaaaaaagaaaggacattgagttttaacagaagggaaaaggaaagaagaaaagatttttgcagaatttctcaaaaatcagtttgtggattccagtagtatttatattgagagaaacaaattttagtccttctaactgtgctaaaacttggatatttgtgaaaactccttaccaccatacaagcatcagaagagctctcttgttgttagcacttattgtttgcaagaacagaatacatccttttatccttttatgaaaaatgacaagtgaaggcaaaaggggaaggttatttgatctggaagatgagtgttctgatgtggtggcttttgcaaaaatctttattggtgttgaaaactggaaaaaataactcatccagaattcatattgtcttgacaagaactatggttctctgtttttagatattgtggaaaatgtttttgggcatttttctctgattttatttcttctcccccacccctttttctaaaaaacaaacaaaaaaaaaaaacacacaaaacaaaaacagaacaaaagaagagagaaggaaattttatcaattaaaaatgctgtgtgataaaatcccagcccagattgctcagctgtttgtacctgacttgccgcctgcataggagccagttctgttccttctgactagcccctcttcctccaggggagaacttccaaatgttaatttttttttttttgaaaatataaataattactattttgta

SEQ ID NO: 316092 - DNA, 2606 bp, Homo sapiens
gaaacccagggaggggaggggaggagaagggagtaatggggaggaggccgcgcggggtggggtctggcggtacgcgctggctgcgtcgacgtgctgacgccatgacgccccggctggtgtgtgtcggtgtgtatgtgtgtgtgtgagtgtgcgcgctccgagtgtgtgtgtatttgtgtatcggcggtcccgcaggtcccggatgttgcggacagtatgaggcaagcgcagggggacggggaccagcagctgtcgccgccgctctcaggctctgggaaccacccttctactttctgtctctaggaatttcactactctagggtgaagagggaacagaaatctttgccccctgactttggaaatctcgtttaaccttcaaactggcgatgtcaagggttccaagtcctccacctccggcagaaatgtcgagtggccccgtagctgagagttggtgctacacacagatcaaggtagtgaaattctcctacatgtggaccatcaataactttagcttttgccgggaggaaatgggtgaagtcattaaaagttctacattttcatcaggagcaaatgataaactgaaatggtgtttgcgagtaaaccccaaagggttagatgaagaaagcaaagattacctgtcactttacctgttactggtcagctgtccaaagagtgaagttcgggcaaaattcaaattctccatcctgaatgccaagggagaagaaaccaaagctatggagagtcaacgggcatataggtttgtgcaaggcaaagactggggattcaagaaattcatccgtagagattttcttttggatgaggccaacgggcttctccctgatgacaagcttaccctcttctgcgaggtgagtgttgtgcaagattctgtcaacatttctggccagaataccatgaacatggtaaaggttcctgagtgccggctggcagatgagttaggaggactgtgggagaattcccggttcacagactgctgcttgtgtgttgccggccaggaattccaggctcacaaggctatcttagcagctcgttctccggtttttagtgccatgtttgaacatgaaatggaggagagcaaaaagaatcgagttgaaatcaatgatgtggagcctgaagtttttaaggaaatgatgtgcttcatttacacggggaaggctccaaacctcgacaaaatggctgatgatttgctggcagctgctgacaagtatgccctggagcgcttaaaggtcatgtgtgaggatgccctctgcagtaacctgtccgtggagaacgctgcagaaattctcatcctggccgacctccacagtgcagatcagttgaaaactcaggcagtggatttcatcaactatcatgcttcggatgtcttggagacctctgggtggaagtcaatggtggtgtcacatccccacttggtggctgaggcataccgctctctggcttcagcacagtgcccttttctgggacccccacgcaaacgcctgaagcaatcctaagatcctgcttgttgtaagactccgtttaatttccagaagcagcagccactgttgctgccactgaccaccaggtagacagcgcaatctgtggagcttttactctgttgtgaggggaagagactgcattgtggccccagacttttaaaacagcactaaataacttgggggaaacggggggagggaaaatgaaatgaaaaccctgttgctgcgtcactgtgttccctttggcctggctgagtttgatactgtggggattcagtttaggcgctggcccgaggatatcccagcggtggtacttcggagacacctgtctgcatctgactgagcagaacaaatcgtcaggtgcctggagcaaaaaggaaaaaaaaaaaagaaaggacattgagttttaacagaagggaaaaggaaagaagaaaagatttttgcagaatttctcaaaaatcagtttgtggattccagtagtatttatattgagagaaacaaattttagtccttctaactgtgctaaaacttggatatttgtgaaaactccttaccaccatacaagcatcagaagagctctcttgttgttagcacttattgtttgcaagaacagaatacatccttttatccttttatgaaaaatgacaagtgaaggcaaaaggggaaggttatttgatctggaagatgagtgttctgatgtggtggcttttgcaaaaatctttattggtgttgaaaactggaaaaaataactcatccagaattcatattgtcttgacaagaactatggttctctgtttttagatattgtggaaaatgtttttgggcatttttctctgattttatttcttctcccccacccctttttctaaaaaacaaacaaaaaaaaaaaacacacaaaacaaaaacagaacaaaagaagagagaaggaaattttatcaattaaaaatgctgtgtgataaaatcccagcccagattgctcagctgtttgtacctgacttgccgcctgcataggagccagttctgttccttctgactagcccctcttcctccaggggagaacttccaaatgttaatttttttttttttgaaaatataaataattactattttgta

SEQ ID NO: 316093 - DNA, 2522 bp, Homo sapiens
aactaggctagtacgaggctggtgtggaatcggccgagggtcggtgtgtatgtgtgtgtgtgagtgtgcgcgctccgagtgtgtgtgtatttgtgtatcggcggtcccgcaggtcccggatgttgcggacagtatgaggcaagcgcagggggacggggaccagcagctgtcgccgccgctctcagagatttcctgttagacaagacaaattagagttttcctactgacttaacttgggtgaagagggaacagaaatctttgccccctgactttggaaatctcgtttaaccttcaaactggcgatgtcaagggttccaagtcctccacctccggcagaaatgtcgagtggccccgtagctgagagttggtgctacacacagatcaaggtagtgaaattctcctacatgtggaccatcaataactttagcttttgccgggaggaaatgggtgaagtcattaaaagttctacattttcatcaggagcaaatgataaactgaaatggtgtttgcgagtaaaccccaaagggttagatgaagaaagcaaagattacctgtcactttacctgttactggtcagctgtccaaagagtgaagttcgggcaaaattcaaattctccatcctgaatgccaagggagaagaaaccaaagctatggagagtcaacgggcatataggtttgtgcaaggcaaagactggggattcaagaaattcatccgtagagattttcttttggatgaggccaacgggcttctccctgatgacaagcttaccctcttctgcgaggtgagtgttgtgcaagattctgtcaacatttctggccagaataccatgaacatggtaaaggttcctgagtgccggctggcagatgagttaggaggactgtgggagaattcccggttcacagactgctgcttgtgtgttgccggccaggaattccaggctcacaaggctatcttagcagctcgttctccggtttttagtgccatgtttgaacatgaaatggaggagagcaaaaagaatcgagttgaaatcaatgatgtggagcctgaagtttttaaggaaatgatgtgcttcatttacacggggaaggctccaaacctcgacaaaatggctgatgatttgctggcagctgctgacaagtatgccctggagcgcttaaaggtcatgtgtgaggatgccctctgcagtaacctgtccgtggagaacgctgcagaaattctcatcctggccgacctccacagtgcagatcagttgaaaactcaggcagtggatttcatcaactatcatgcttcggatgtcttggagacctctgggtggaagtcaatggtggtgtcacatccccacttggtggctgaggcataccgctctctggcttcagcacagtgcccttttctgggacccccacgcaaacgcctgaagcaatcctaagatcctgcttgttgtaagactccgtttaatttccagaagcagcagccactgttgctgccactgaccaccaggtagacagcgcaatctgtggagcttttactctgttgtgaggggaagagactgcattgtggccccagacttttaaaacagcactaaataacttgggggaaacggggggagggaaaatgaaatgaaaaccctgttgctgcgtcactgtgttccctttggcctggctgagtttgatactgtggggattcagtttaggcgctggcccgaggatatcccagcggtggtacttcggagacacctgtctgcatctgactgagcagaacaaatcgtcaggtgcctggagcaaaaaggaaaaaaaaaaaagaaaggacattgagttttaacagaagggaaaaggaaagaagaaaagatttttgcagaatttctcaaaaatcagtttgtggattccagtagtatttatattgagagaaacaaattttagtccttctaactgtgctaaaacttggatatttgtgaaaactccttaccaccatacaagcatcagaagagctctcttgttgttagcacttattgtttgcaagaacagaatacatccttttatccttttatgaaaaatgacaagtgaaggcaaaaggggaaggttatttgatctggaagatgagtgttctgatgtggtggcttttgcaaaaatctttattggtgttgaaaactggaaaaaataactcatccagaattcatattgtcttgacaagaactatggttctctgtttttagatattgtggaaaatgtttttgggcatttttctctgattttatttcttctcccccacccctttttctaaaaaacaaacaaaaaaaaaaaacacacaaaacaaaaacagaacaaaagaagagagaaggaaattttatcaattaaaaatgctgtgtgataaaatcccagcccagattgctcagctgtttgtacctgacttgccgcctgcataggagccagttctgttccttctgactagcccctcttcctccaggggagaacttccaaatgttaatttttttttttttgaaaatataaataattactattttgta

SEQ ID NO: 316094 - DNA, 2645 bp, Homo sapiens
aactaggctagtacgaggctggtgtggaatcggccgagggtcggtgtgtatgtgtgtgtgtgagtgtgcgcgctccgagtgtgtgtgtatttgtgtatcggcggtcccgcaggtcccggatgttgcggacagtatgaggcaagcgcagggggacggggaccagcagctgtcgccgccgctctcagatcgagtcttgctctgtcacccaggctggagtgcagtggcgcgatctcagctcactgccacctttgcctcctgggttcaagcgattcttctgcctcagcctcccgagtagctgggattacaggctctgggaaccacccttctactttctgtctctaggaatttcactactctagggtgaagagggaacagaaatctttgccccctgactttggaaatctcgtttaaccttcaaactggcgatgtcaagggttccaagtcctccacctccggcagaaatgtcgagtggccccgtagctgagagttggtgctacacacagatcaaggtagtgaaattctcctacatgtggaccatcaataactttagcttttgccgggaggaaatgggtgaagtcattaaaagttctacattttcatcaggagcaaatgataaactgaaatggtgtttgcgagtaaaccccaaagggttagatgaagaaagcaaagattacctgtcactttacctgttactggtcagctgtccaaagagtgaagttcgggcaaaattcaaattctccatcctgaatgccaagggagaagaaaccaaagctatggagagtcaacgggcatataggtttgtgcaaggcaaagactggggattcaagaaattcatccgtagagattttcttttggatgaggccaacgggcttctccctgatgacaagcttaccctcttctgcgaggtgagtgttgtgcaagattctgtcaacatttctggccagaataccatgaacatggtaaaggttcctgagtgccggctggcagatgagttaggaggactgtgggagaattcccggttcacagactgctgcttgtgtgttgccggccaggaattccaggctcacaaggctatcttagcagctcgttctccggtttttagtgccatgtttgaacatgaaatggaggagagcaaaaagaatcgagttgaaatcaatgatgtggagcctgaagtttttaaggaaatgatgtgcttcatttacacggggaaggctccaaacctcgacaaaatggctgatgatttgctggcagctgctgacaagtatgccctggagcgcttaaaggtcatgtgtgaggatgccctctgcagtaacctgtccgtggagaacgctgcagaaattctcatcctggccgacctccacagtgcagatcagttgaaaactcaggcagtggatttcatcaactatcatgcttcggatgtcttggagacctctgggtggaagtcaatggtggtgtcacatccccacttggtggctgaggcataccgctctctggcttcagcacagtgcccttttctgggacccccacgcaaacgcctgaagcaatcctaagatcctgcttgttgtaagactccgtttaatttccagaagcagcagccactgttgctgccactgaccaccaggtagacagcgcaatctgtggagcttttactctgttgtgaggggaagagactgcattgtggccccagacttttaaaacagcactaaataacttgggggaaacggggggagggaaaatgaaatgaaaaccctgttgctgcgtcactgtgttccctttggcctggctgagtttgatactgtggggattcagtttaggcgctggcccgaggatatcccagcggtggtacttcggagacacctgtctgcatctgactgagcagaacaaatcgtcaggtgcctggagcaaaaaggaaaaaaaaaaaagaaaggacattgagttttaacagaagggaaaaggaaagaagaaaagatttttgcagaatttctcaaaaatcagtttgtggattccagtagtatttatattgagagaaacaaattttagtccttctaactgtgctaaaacttggatatttgtgaaaactccttaccaccatacaagcatcagaagagctctcttgttgttagcacttattgtttgcaagaacagaatacatccttttatccttttatgaaaaatgacaagtgaaggcaaaaggggaaggttatttgatctggaagatgagtgttctgatgtggtggcttttgcaaaaatctttattggtgttgaaaactggaaaaaataactcatccagaattcatattgtcttgacaagaactatggttctctgtttttagatattgtggaaaatgtttttgggcatttttctctgattttatttcttctcccccacccctttttctaaaaaacaaacaaaaaaaaaaaacacacaaaacaaaaacagaacaaaagaagagagaaggaaattttatcaattaaaaatgctgtgtgataaaatcccagcccagattgctcagctgtttgtacctgacttgccgcctgcataggagccagttctgttccttctgactagcccctcttcctccaggggagaacttccaaatgttaatttttttttttttgaaaatataaataattactattttgta

SEQ ID NO: 316095 - DNA, 2574 bp, Homo sapiens
aactaggctagtacgaggctggtgtggaatcggccgagggtcggtgtgtatgtgtgtgtgtgagtgtgcgcgctccgagtgtgtgtgtatttgtgtatcggcggtcccgcaggtcccggatgttgcggacagtatgaggcaagcgcagggggacggggaccagcagctgtcgccgccgctctcaggctctgggaaccacccttctactttctgtctctaggaatttcactactctagagatttcctgttagacaagacaaattagagttttcctactgacttaacttgggtgaagagggaacagaaatctttgccccctgactttggaaatctcgtttaaccttcaaactggcgatgtcaagggttccaagtcctccacctccggcagaaatgtcgagtggccccgtagctgagagttggtgctacacacagatcaaggtagtgaaattctcctacatgtggaccatcaataactttagcttttgccgggaggaaatgggtgaagtcattaaaagttctacattttcatcaggagcaaatgataaactgaaatggtgtttgcgagtaaaccccaaagggttagatgaagaaagcaaagattacctgtcactttacctgttactggtcagctgtccaaagagtgaagttcgggcaaaattcaaattctccatcctgaatgccaagggagaagaaaccaaagctatggagagtcaacgggcatataggtttgtgcaaggcaaagactggggattcaagaaattcatccgtagagattttcttttggatgaggccaacgggcttctccctgatgacaagcttaccctcttctgcgaggtgagtgttgtgcaagattctgtcaacatttctggccagaataccatgaacatggtaaaggttcctgagtgccggctggcagatgagttaggaggactgtgggagaattcccggttcacagactgctgcttgtgtgttgccggccaggaattccaggctcacaaggctatcttagcagctcgttctccggtttttagtgccatgtttgaacatgaaatggaggagagcaaaaagaatcgagttgaaatcaatgatgtggagcctgaagtttttaaggaaatgatgtgcttcatttacacggggaaggctccaaacctcgacaaaatggctgatgatttgctggcagctgctgacaagtatgccctggagcgcttaaaggtcatgtgtgaggatgccctctgcagtaacctgtccgtggagaacgctgcagaaattctcatcctggccgacctccacagtgcagatcagttgaaaactcaggcagtggatttcatcaactatcatgcttcggatgtcttggagacctctgggtggaagtcaatggtggtgtcacatccccacttggtggctgaggcataccgctctctggcttcagcacagtgcccttttctgggacccccacgcaaacgcctgaagcaatcctaagatcctgcttgttgtaagactccgtttaatttccagaagcagcagccactgttgctgccactgaccaccaggtagacagcgcaatctgtggagcttttactctgttgtgaggggaagagactgcattgtggccccagacttttaaaacagcactaaataacttgggggaaacggggggagggaaaatgaaatgaaaaccctgttgctgcgtcactgtgttccctttggcctggctgagtttgatactgtggggattcagtttaggcgctggcccgaggatatcccagcggtggtacttcggagacacctgtctgcatctgactgagcagaacaaatcgtcaggtgcctggagcaaaaaggaaaaaaaaaaaagaaaggacattgagttttaacagaagggaaaaggaaagaagaaaagatttttgcagaatttctcaaaaatcagtttgtggattccagtagtatttatattgagagaaacaaattttagtccttctaactgtgctaaaacttggatatttgtgaaaactccttaccaccatacaagcatcagaagagctctcttgttgttagcacttattgtttgcaagaacagaatacatccttttatccttttatgaaaaatgacaagtgaaggcaaaaggggaaggttatttgatctggaagatgagtgttctgatgtggtggcttttgcaaaaatctttattggtgttgaaaactggaaaaaataactcatccagaattcatattgtcttgacaagaactatggttctctgtttttagatattgtggaaaatgtttttgggcatttttctctgattttatttcttctcccccacccctttttctaaaaaacaaacaaaaaaaaaaaacacacaaaacaaaaacagaacaaaagaagagagaaggaaattttatcaattaaaaatgctgtgtgataaaatcccagcccagattgctcagctgtttgtacctgacttgccgcctgcataggagccagttctgttccttctgactagcccctcttcctccaggggagaacttccaaatgttaatttttttttttttgaaaatataaataattactattttgta

SEQ ID NO: 316096 - DNA, 2370 bp, Homo sapiens
taaaaaaattgtaaaaaaacagcggtacggtccggaatcccgggagagcaacgcaggggaggggacacactgtcgccgcgctctggtgaagagggaacagaaatctttgccccctgactttggaaatctcgtttaaccttcaaactggcgatgtcaagggttccaagtcctccacctccggcagaaatgtcgagtggccccgtagctgagagttggtgctacacacagatcaaggtagtgaaattctcctacatgtggaccatcaataactttagcttttgccgggaggaaatgggtgaagtcattaaaagttctacattttcatcaggagcaaatgataaactgaaatggtgtttgcgagtaaaccccaaagggttagatgaagaaagcaaagattacctgtcactttacctgttactggtcagctgtccaaagagtgaagttcgggcaaaattcaaattctccatcctgaatgccaagggagaagaaaccaaagctatggagagtcaacgggcatataggtttgtgcaaggcaaagactggggattcaagaaattcatccgtagagattttcttttggatgaggccaacgggcttctccctgatgacaagcttaccctcttctgcgaggtgagtgttgtgcaagattctgtcaacatttctggccagaataccatgaacatggtaaaggttcctgagtgccggctggcagatgagttaggaggactgtgggagaattcccggttcacagactgctgcttgtgtgttgccggccaggaattccaggctcacaaggctatcttagcagctcgttctccggtttttagtgccatgtttgaacatgaaatggaggagagcaaaaagaatcgagttgaaatcaatgatgtggagcctgaagtttttaaggaaatgatgtgcttcatttacacggggaaggctccaaacctcgacaaaatggctgatgatttgctggcagctgctgacaagtatgccctggagcgcttaaaggtcatgtgtgaggatgccctctgcagtaacctgtccgtggagaacgctgcagaaattctcatcctggccgacctccacagtgcagatcagttgaaaactcaggcagtggatttcatcaactatcatgcttcggatgtcttggagacctctgggtggaagtcaatggtggtgtcacatccccacttggtggctgaggcataccgctctctggcttcagcacagtgcccttttctgggacccccacgcaaacgcctgaagcaatcctaagatcctgcttgttgtaagactccgtttaatttccagaagcagcagccactgttgctgccactgaccaccaggtagacagcgcaatctgtggagcttttactctgttgtgaggggaagagactgcattgtggccccagacttttaaaacagcactaaataacttgggggaaacggggggagggaaaatgaaatgaaaaccctgttgctgcgtcactgtgttccctttggcctggctgagtttgatactgtggggattcagtttaggcgctggcccgaggatatcccagcggtggtacttcggagacacctgtctgcatctgactgagcagaacaaatcgtcaggtgcctggagcaaaaaggaaaaaaaaaaaagaaaggacattgagttttaacagaagggaaaaggaaagaagaaaagatttttgcagaatttctcaaaaatcagtttgtggattccagtagtatttatattgagagaaacaaattttagtccttctaactgtgctaaaacttggatatttgtgaaaactccttaccaccatacaagcatcagaagagctctcttgttgttagcacttattgtttgcaagaacagaatacatccttttatccttttatgaaaaatgacaagtgaaggcaaaaggggaaggttatttgatctggaagatgagtgttctgatgtggtggcttttgcaaaaatctttattggtgttgaaaactggaaaaaataactcatccagaattcatattgtcttgacaagaactatggttctctgtttttagatattgtggaaaatgtttttgggcatttttctctgattttatttcttctcccccacccctttttctaaaaaacaaacaaaaaaaaaaaacacacaaaacaaaaacagaacaaaagaagagagaaggaaattttatcaattaaaaatgctgtgtgataaaatcccagcccagattgctcagctgtttgtacctgacttgccgcctgcataggagccagttctgttccttctgactagcccctcttcctccaggggagaacttccaaatgttaatttttttttttttgaaaatataaataattactattttgta

SEQ ID NO: 316097 - DNA, 3105 bp, Homo sapiens
ctttctcaggtattttttccatttctacatgttgaataaaagaccatacctgatctaagagtcaccccaaaggaattgcaaagtgttggtttaggagttaaaagactttgtgttctaaactcaagcccattaatagccatgtgaccacagcaaattggaactctgagcttctgttcccttatttgtaaaatacttgcttgctctgtgtgcctcacagagctgttgaaaatcccaaataagatcataaatgtcagagtactttgaagactgtgaaacattgaatactgcttatgagggagtggttatatagcttaaagcatttaactggaaaggaccttggaaatccttttaaaggaggatgggggtggaaatgcacaggttgcttctctctctctctctctttttttttttttttgagacggtcacccaggctgtagtgcagtggcgtgatctcggctcactgtggcctccacctcccaagtagctgggattacaggcttgcgccatcatgcagggctaatttttgtatttttagtagagacgaggtttcatcatgttggccaggctggtctggaactcctgacctcaagtgatctgcccaccttggcctcccaaagtgctgggattaaaggcatgagccaccacgcctggcctaggttgttcctctactgtgaatcttgaggttatggtttccactagactatagtgctcaactatagtggcctattttaagtggccttataattcctaaccaaagtgacttgtgaaacagaggaccctggataaatttaaatgttataaagatgataaaatgtacagggtgaagagggaacagaaatctttgccccctgactttggaaatctcgtttaaccttcaaactggcgatgtcaagggttccaagtcctccacctccggcagaaatgtcgagtggccccgtagctgagagttggtgctacacacagatcaaggtagtgaaattctcctacatgtggaccatcaataactttagcttttgccgggaggaaatgggtgaagtcattaaaagttctacattttcatcaggagcaaatgataaactgaaatggtgtttgcgagtaaaccccaaagggttagatgaagaaagcaaagattacctgtcactttacctgttactggtcagctgtccaaagagtgaagttcgggcaaaattcaaattctccatcctgaatgccaagggagaagaaaccaaagctatggagagtcaacgggcatataggtttgtgcaaggcaaagactggggattcaagaaattcatccgtagagattttcttttggatgaggccaacgggcttctccctgatgacaagcttaccctcttctgcgaggtgagtgttgtgcaagattctgtcaacatttctggccagaataccatgaacatggtaaaggttcctgagtgccggctggcagatgagttaggaggactgtgggagaattcccggttcacagactgctgcttgtgtgttgccggccaggaattccaggctcacaaggctatcttagcagctcgttctccggtttttagtgccatgtttgaacatgaaatggaggagagcaaaaagaatcgagttgaaatcaatgatgtggagcctgaagtttttaaggaaatgatgtgcttcatttacacggggaaggctccaaacctcgacaaaatggctgatgatttgctggcagctgctgacaagtatgccctggagcgcttaaaggtcatgtgtgaggatgccctctgcagtaacctgtccgtggagaacgctgcagaaattctcatcctggccgacctccacagtgcagatcagttgaaaactcaggcagtggatttcatcaactatcatgcttcggatgtcttggagacctctgggtggaagtcaatggtggtgtcacatccccacttggtggctgaggcataccgctctctggcttcagcacagtgcccttttctgggacccccacgcaaacgcctgaagcaatcctaagatcctgcttgttgtaagactccgtttaatttccagaagcagcagccactgttgctgccactgaccaccaggtagacagcgcaatctgtggagcttttactctgttgtgaggggaagagactgcattgtggccccagacttttaaaacagcactaaataacttgggggaaacggggggagggaaaatgaaatgaaaaccctgttgctgcgtcactgtgttccctttggcctggctgagtttgatactgtggggattcagtttaggcgctggcccgaggatatcccagcggtggtacttcggagacacctgtctgcatctgactgagcagaacaaatcgtcaggtgcctggagcaaaaaggaaaaaaaaaaaagaaaggacattgagttttaacagaagggaaaaggaaagaagaaaagatttttgcagaatttctcaaaaatcagtttgtggattccagtagtatttatattgagagaaacaaattttagtccttctaactgtgctaaaacttggatatttgtgaaaactccttaccaccatacaagcatcagaagagctctcttgttgttagcacttattgtttgcaagaacagaatacatccttttatccttttatgaaaaatgacaagtgaaggcaaaaggggaaggttatttgatctggaagatgagtgttctgatgtggtggcttttgcaaaaatctttattggtgttgaaaactggaaaaaataactcatccagaattcatattgtcttgacaagaactatggttctctgtttttagatattgtggaaaatgtttttgggcatttttctctgattttatttcttctcccccacccctttttctaaaaaacaaacaaaaaaaaaaaacacacaaaacaaaaacagaacaaaagaagagagaaggaaattttatcaattaaaaatgctgtgtgataaaatcccagcccagattgctcagctgtttgtacctgacttgccgcctgcataggagccagttctgttccttctgactagcccctcttcctccaggggagaacttccaaatgttaatttttttttttttgaaaatataaataattactattttgta

SEQ ID NO: 316098 - DNA, 2565 bp, Homo sapiens
gggcaagcgccccggggggggaggttagggaccagcagctgtcgcgccgctctcatcgagtcttgctctgtcacccaggctggagtgcagtggcgcgatctcagctcactgccacctttgcctcctgggttcaagcgattcttctgcctcagcctcccgagtagctgggattacaggctctgggaaccacccttctactttctgtctctaggaatttcactactctagagatttcctgttagacaagacaaattagagttttcctactgacttaacttgggtgaagagggaacagaaatctttgccccctgactttggaaatctcgtttaaccttcaaactggcgatgtcaagggttccaagtcctccacctccggcagaaatgtcgagtggccccgtagctgagagttggtgctacacacagatcaaggtagtgaaattctcctacatgtggaccatcaataactttagcttttgccgggaggaaatgggtgaagtcattaaaagttctacattttcatcaggagcaaatgataaactgaaatggtgtttgcgagtaaaccccaaagggttagatgaagaaagcaaagattacctgtcactttacctgttactggtcagctgtccaaagagtgaagttcgggcaaaattcaaattctccatcctgaatgccaagggagaagaaaccaaagctatggagagtcaacgggcatataggtttgtgcaaggcaaagactggggattcaagaaattcatccgtagagattttcttttggatgaggccaacgggcttctccctgatgacaagcttaccctcttctgcgaggtgagtgttgtgcaagattctgtcaacatttctggccagaataccatgaacatggtaaaggttcctgagtgccggctggcagatgagttaggaggactgtgggagaattcccggttcacagactgctgcttgtgtgttgccggccaggaattccaggctcacaaggctatcttagcagctcgttctccggtttttagtgccatgtttgaacatgaaatggaggagagcaaaaagaatcgagttgaaatcaatgatgtggagcctgaagtttttaaggaaatgatgtgcttcatttacacggggaaggctccaaacctcgacaaaatggctgatgatttgctggcagctgctgacaagtatgccctggagcgcttaaaggtcatgtgtgaggatgccctctgcagtaacctgtccgtggagaacgctgcagaaattctcatcctggccgacctccacagtgcagatcagttgaaaactcaggcagtggatttcatcaactatcatgcttcggatgtcttggagacctctgggtggaagtcaatggtggtgtcacatccccacttggtggctgaggcataccgctctctggcttcagcacagtgcccttttctgggacccccacgcaaacgcctgaagcaatcctaagatcctgcttgttgtaagactccgtttaatttccagaagcagcagccactgttgctgccactgaccaccaggtagacagcgcaatctgtggagcttttactctgttgtgaggggaagagactgcattgtggccccagacttttaaaacagcactaaataacttgggggaaacggggggagggaaaatgaaatgaaaaccctgttgctgcgtcactgtgttccctttggcctggctgagtttgatactgtggggattcagtttaggcgctggcccgaggatatcccagcggtggtacttcggagacacctgtctgcatctgactgagcagaacaaatcgtcaggtgcctggagcaaaaaggaaaaaaaaaaaagaaaggacattgagttttaacagaagggaaaaggaaagaagaaaagatttttgcagaatttctcaaaaatcagtttgtggattccagtagtatttatattgagagaaacaaattttagtccttctaactgtgctaaaacttggatatttgtgaaaactccttaccaccatacaagcatcagaagagctctcttgttgttagcacttattgtttgcaagaacagaatacatccttttatccttttatgaaaaatgacaagtgaaggcaaaaggggaaggttatttgatctggaagatgagtgttctgatgtggtggcttttgcaaaaatctttattggtgttgaaaactggaaaaaataactcatccagaattcatattgtcttgacaagaactatggttctctgtttttagatattgtggaaaatgtttttgggcatttttctctgattttatttcttctcccccacccctttttctaaaaaacaaacaaaaaaaaaaaacacacaaaacaaaaacagaacaaaagaagagagaaggaaattttatcaattaaaaatgctgtgtgataaaatcccagcccagattgctcagctgtttgtacctgacttgccgcctgcataggagccagttctgttccttctgactagcccctcttcctccaggggagaacttccaaatgttaatttttttttttttgaaaatataaataattactattttgta

SEQ ID NO: 316099 - DNA, 2785 bp, Homo sapiens
aattgtgactaggtgactactttacattagatagtcttctctgatgttaacatttaaatttaggacctcggctgggtgcggtggctcacgcctgtaatctcagcactttgggaggccgaggagggtggatcacctgaggtcgagagttcaagaccagcctgactaacatggagaaaccccgtctctgctaaaaatacacaattagtcaggtgtggtggggcatgcctgtaatcccagctactcgggaggcttaggcaggagaatcacttgaacccaggaaaggcggaggttgcggtgagccaagatcgcaccactgcactcccgtctgggcaacaagagcgaaactatcaggaaaaaaaaaaaaaattttaggacctcagtggtaaggagccactcaaacaatgtggagacaaaatttccagcctctatcaggtcaaacaatagttaggatcgtatcttaataatctaataaagttttcttgcttcttggatctgaccaggtgaagagggaacagaaatctttgccccctgactttggaaatctcgtttaaccttcaaactggcgatgtcaagggttccaagtcctccacctccggcagaaatgtcgagtggccccgtagctgagagttggtgctacacacagatcaaggtagtgaaattctcctacatgtggaccatcaataactttagcttttgccgggaggaaatgggtgaagtcattaaaagttctacattttcatcaggagcaaatgataaactgaaatggtgtttgcgagtaaaccccaaagggttagatgaagaaagcaaagattacctgtcactttacctgttactggtcagctgtccaaagagtgaagttcgggcaaaattcaaattctccatcctgaatgccaagggagaagaaaccaaagctatggagagtcaacgggcatataggtttgtgcaaggcaaagactggggattcaagaaattcatccgtagagattttcttttggatgaggccaacgggcttctccctgatgacaagcttaccctcttctgcgaggtgagtgttgtgcaagattctgtcaacatttctggccagaataccatgaacatggtaaaggttcctgagtgccggctggcagatgagttaggaggactgtgggagaattcccggttcacagactgctgcttgtgtgttgccggccaggaattccaggctcacaaggctatcttagcagctcgttctccggtttttagtgccatgtttgaacatgaaatggaggagagcaaaaagaatcgagttgaaatcaatgatgtggagcctgaagtttttaaggaaatgatgtgcttcatttacacggggaaggctccaaacctcgacaaaatggctgatgatttgctggcagctgctgacaagtatgccctggagcgcttaaaggtcatgtgtgaggatgccctctgcagtaacctgtccgtggagaacgctgcagaaattctcatcctggccgacctccacagtgcagatcagttgaaaactcaggcagtggatttcatcaactatcatgcttcggatgtcttggagacctctgggtggaagtcaatggtggtgtcacatccccacttggtggctgaggcataccgctctctggcttcagcacagtgcccttttctgggacccccacgcaaacgcctgaagcaatcctaagatcctgcttgttgtaagactccgtttaatttccagaagcagcagccactgttgctgccactgaccaccaggtagacagcgcaatctgtggagcttttactctgttgtgaggggaagagactgcattgtggccccagacttttaaaacagcactaaataacttgggggaaacggggggagggaaaatgaaatgaaaaccctgttgctgcgtcactgtgttccctttggcctggctgagtttgatactgtggggattcagtttaggcgctggcccgaggatatcccagcggtggtacttcggagacacctgtctgcatctgactgagcagaacaaatcgtcaggtgcctggagcaaaaaggaaaaaaaaaaaagaaaggacattgagttttaacagaagggaaaaggaaagaagaaaagatttttgcagaatttctcaaaaatcagtttgtggattccagtagtatttatattgagagaaacaaattttagtccttctaactgtgctaaaacttggatatttgtgaaaactccttaccaccatacaagcatcagaagagctctcttgttgttagcacttattgtttgcaagaacagaatacatccttttatccttttatgaaaaatgacaagtgaaggcaaaaggggaaggttatttgatctggaagatgagtgttctgatgtggtggcttttgcaaaaatctttattggtgttgaaaactggaaaaaataactcatccagaattcatattgtcttgacaagaactatggttctctgtttttagatattgtggaaaatgtttttgggcatttttctctgattttatttcttctcccccacccctttttctaaaaaacaaacaaaaaaaaaaaacacacaaaacaaaaacagaacaaaagaagagagaaggaaattttatcaattaaaaatgctgtgtgataaaatcccagcccagattgctcagctgtttgtacctgacttgccgcctgcataggagccagttctgttccttctgactagcccctcttcctccaggggagaacttccaaatgttaatttttttttttttgaaaatataaataattactattttgta

SEQ ID NO: 316100 - DNA, 2777 bp, Homo sapiens
gaaacccagggaggggaggggaggagaagggagtaatggggaggaggccgcgcggggtggggtctggcggtacgcgctggctgcgtcgacgtgctgacgccatgacgccccggctggtgtgtgtcggtgtgtatgtgtgtgtgtgagtgtgcgcgctccgagtgtgtgtgtatttgtgtatcggcggtcccgcaggtcccggatgttgcggacagtatgaggcaagcgcagggggacggggaccagcagctgtcgccgccgctctcagggtgaagagggaacagaaatctttgccccctgactttggaaatctcgtttaaccttcaaactggcgatgtcaagggttccaagtcctccacctccggcagaaatgtcgagtggccccgtagctgagagttggtgctacacacagatcaaggtagtgaaattctcctacatgtggaccatcaataactttagcttttgccgggaggaaatgggtgaagtcattaaaagttctacattttcatcaggagcaaatgataaactgaaatggtgtttgcgagtaaaccccaaagggttagatgaagaaagcaaagattacctgtcactttacctgttactggtcagctgtccaaagagtgaagttcgggcaaaattcaaattctccatcctgaatgccaagggagaagaaaccaaagctatggagagtcaacgggcatataggtttgtgcaaggcaaagactggggattcaagaaattcatccgtagagattttcttttggatgaggccaacgggcttctccctgatgacaagcttaccctcttctgcgagattcttatcaagagttgaggcctatggtttgtcttgctggagtaattgtgaaataagaagaaggaactacaggtcattaactttgcctctgggcttatgactgcgtttaagggatgacttgcatcttgaaggttaaaagaaatctgggtcattaaggatgttcctaagctgtctttctcatcttactgttaggaacagcaagagtggggagctaattctcaaggtgagtgttgtgcaagattctgtcaacatttctggccagaataccatgaacatggtaaaggttcctgagtgccggctggcagatgagttaggaggactgtgggagaattcccggttcacagactgctgcttgtgtgttgccggccaggaattccaggctcacaaggctatcttagcagctcgttctccggtttttagtgccatgtttgaacatgaaatggaggagagcaaaaagaatcgagttgaaatcaatgatgtggagcctgaagtttttaaggaaatgatgtgcttcatttacacggggaaggctccaaacctcgacaaaatggctgatgatttgctggcagctgctgacaagtatgccctggagcgcttaaaggtcatgtgtgaggatgccctctgcagtaacctgtccgtggagaacgctgcagaaattctcatcctggccgacctccacagtgcagatcagttgaaaactcaggcagtggatttcatcaactatcatgcttcggatgtcttggagacctctgggtggaagtcaatggtggtgtcacatccccacttggtggctgaggcataccgctctctggcttcagcacagtgcccttttctgggacccccacgcaaacgcctgaagcaatcctaagatcctgcttgttgtaagactccgtttaatttccagaagcagcagccactgttgctgccactgaccaccaggtagacagcgcaatctgtggagcttttactctgttgtgaggggaagagactgcattgtggccccagacttttaaaacagcactaaataacttgggggaaacggggggagggaaaatgaaatgaaaaccctgttgctgcgtcactgtgttccctttggcctggctgagtttgatactgtggggattcagtttaggcgctggcccgaggatatcccagcggtggtacttcggagacacctgtctgcatctgactgagcagaacaaatcgtcaggtgcctggagcaaaaaggaaaaaaaaaaaagaaaggacattgagttttaacagaagggaaaaggaaagaagaaaagatttttgcagaatttctcaaaaatcagtttgtggattccagtagtatttatattgagagaaacaaattttagtccttctaactgtgctaaaacttggatatttgtgaaaactccttaccaccatacaagcatcagaagagctctcttgttgttagcacttattgtttgcaagaacagaatacatccttttatccttttatgaaaaatgacaagtgaaggcaaaaggggaaggttatttgatctggaagatgagtgttctgatgtggtggcttttgcaaaaatctttattggtgttgaaaactggaaaaaataactcatccagaattcatattgtcttgacaagaactatggttctctgtttttagatattgtggaaaatgtttttgggcatttttctctgattttatttcttctcccccacccctttttctaaaaaacaaacaaaaaaaaaaaacacacaaaacaaaaacagaacaaaagaagagagaaggaaattttatcaattaaaaatgctgtgtgataaaatcccagcccagattgctcagctgtttgtacctgacttgccgcctgcataggagccagttctgttccttctgactagcccctcttcctccaggggagaacttccaaatgttaatttttttttttttgaaaatataaataattactattttgta

SEQ ID NO: 316101 - DNA, 2458 bp, Homo sapiens
ttgacttgtaactatgaacctgttggttaagcaagcaggctgttccggtcggaatcccgggcgttgtggatccaagctgtcggtcaagcgcaggcggacggtgaccatcagctgtcgccgacggatctcaggtatgaagagtgaagagcagattatcattgatggacctccttgtacgtatagagagaatcgtcgctagaaacacgtacaatatgtgtgacgagtgtcagagagagttgccagagtctcatccgaccatccggacagctaatgtcgagctggcccgctgtaggctagagagtgggagctactacacatcaaggtagtgaaattctcctacatgtggaccatcaataactttagcttttgccgggaggaaatgggtgaagtcattaaaagttctacattttcatcaggagcaaatgataaactgaaatggtgtttgcgagtaaaccccaaagggttagatgaagaaagcaaagattacctgtcactttacctgttactggtcagctgtccaaagagtgaagttcgggcaaaattcaaattctccatcctgaatgccaagggagaagaaaccaaagctatggagagtcaacgggcatataggtttgtgcaaggcaaagactggggattcaagaaattcatccgtagagattttcttttggatgaggccaacgggcttctccctgatgacaagcttaccctcttctgcgaggtgagtgttgtgcaagattctgtcaacatttctggccagaataccatgaacatggtaaaggttcctgagtgccggctggcagatgagttaggaggactgtgggagaattcccggttcacagactgctgcttgtgtgttgccggccaggaattccaggctcacaaggctatcttagcagctcgttctccggtttttagtgccatgtttgaacatgaaatggaggagagcaaaaagaatcgagttgaaatcaatgatgtggagcctgaagtttttaaggaaatgatgtgcttcatttacacggggaaggctccaaacctcgacaaaatggctgatgatttgctggcagctgctgacaagtatgccctggagcgcttaaaggtcatgtgtgaggatgccctctgcagtaacctgtccgtggagaacgctgcagaaattctcatcctggccgacctccacagtgcagatcagttgaaaactcaggcagtggatttcatcaactatcatgcttcggatgtcttggagacctctgggtggaagtcaatggtggtgtcacatccccacttggtggctgaggcataccgctctctggcttcagcacagtgcccttttctgggacccccacgcaaacgcctgaagcaatcctaagatcctgcttgttgtaagactccgtttaatttccagaagcagcagccactgttgctgccactgaccaccaggtagacagcgcaatctgtggagcttttactctgttgtgaggggaagagactgcattgtggccccagacttttaaaacagcactaaataacttgggggaaacggggggagggaaaatgaaatgaaaaccctgttgctgcgtcactgtgttccctttggcctggctgagtttgatactgtggggattcagtttaggcgctggcccgaggatatcccagcggtggtacttcggagacacctgtctgcatctgactgagcagaacaaatcgtcaggtgcctggagcaaaaaggaaaaaaaaaaaagaaaggacattgagttttaacagaagggaaaaggaaagaagaaaagatttttgcagaatttctcaaaaatcagtttgtggattccagtagtatttatattgagagaaacaaattttagtccttctaactgtgctaaaacttggatatttgtgaaaactccttaccaccatacaagcatcagaagagctctcttgttgttagcacttattgtttgcaagaacagaatacatccttttatccttttatgaaaaatgacaagtgaaggcaaaaggggaaggttatttgatctggaagatgagtgttctgatgtggtggcttttgcaaaaatctttattggtgttgaaaactggaaaaaataactcatccagaattcatattgtcttgacaagaactatggttctctgtttttagatattgtggaaaatgtttttgggcatttttctctgattttatttcttctcccccacccctttttctaaaaaacaaacaaaaaaaaaaaacacacaaaacaaaaacagaacaaaagaagagagaaggaaattttatcaattaaaaatgctgtgtgataaaatcccagcccagattgctcagctgtttgtacctgacttgccgcctgcataggagccagttctgttccttctgactagcccctcttcctccaggggagaacttccaaatgttaatttttttttttttgaaaatataaataattactattttgta

SEQ ID NO: 316102 - DNA, 2281 bp, Homo sapiens
gaaacccagggaggggaggggaggagaagggagtaatggggaggaggccgcgcggggtggggtctggcggtacgcgctggctgcgtcgacgtgctgacgccatgacgccccggctggtgtgtgtcggtgtgtatgtgtgtgtgtgagtgtgcgcgctccgagtgtgtgtgtatttgtgtatcggcggtcccgcaggtcccggatgttgcggacagtatgaggcaagcgcagggggacggggaccagcagctgtcgccgccgctctcagggtgaagagggaacagaaatctttgccccctgactttggaaatctcgtttaaccttcaaactggcgatgtcaagggttccaagtcctccacctccggcagaaatgtcgagtggccccgtagctgagagttggtgctacacacagatcaggagcaaatgataaactgaaatggtgtttgcgagtaaaccccaaagggttagatgaagaaagcaaagattacctgtcactttacctgttactggtcagctgtccaaagagtgaagttcgggcaaaattcaaattctccatcctgaatgccaagggagaagaaaccaaagctatggagagtcaacgggcatataggtttgtgcaaggcaaagactggggattcaagaaattcatccgtagagattttcttttggatgaggccaacgggcttctccctgatgacaagcttaccctcttctgcgagctcgttctccggtttttagtgccatgtttgaacatgaaatggaggagagcaaaaagaatcgagttgaaatcaatgatgtggagcctgaagtttttaaggaaatgatgtgcttcatttacacggggaaggctccaaacctcgacaaaatggctgatgatttgctggcagctgctgacaagtatgccctggagcgcttaaaggtcatgtgtgaggatgccctctgcagtaacctgtccgtggagaacgctgcagaaattctcatcctggccgacctccacagtgcagatcagttgaaaactcaggcagtggatttcatcaactatcatgcttcggatgtcttggagacctctgggtggaagtcaatggtggtgtcacatccccacttggtggctgaggcataccgctctctggcttcagcacagtgcccttttctgggacccccacgcaaacgcctgaagcaatcctaagatcctgcttgttgtaagactccgtttaatttccagaagcagcagccactgttgctgccactgaccaccaggtagacagcgcaatctgtggagcttttactctgttgtgaggggaagagactgcattgtggccccagacttttaaaacagcactaaataacttgggggaaacggggggagggaaaatgaaatgaaaaccctgttgctgcgtcactgtgttccctttggcctggctgagtttgatactgtggggattcagtttaggcgctggcccgaggatatcccagcggtggtacttcggagacacctgtctgcatctgactgagcagaacaaatcgtcaggtgcctggagcaaaaaggaaaaaaaaaaaagaaaggacattgagttttaacagaagggaaaaggaaagaagaaaagatttttgcagaatttctcaaaaatcagtttgtggattccagtagtatttatattgagagaaacaaattttagtccttctaactgtgctaaaacttggatatttgtgaaaactccttaccaccatacaagcatcagaagagctctcttgttgttagcacttattgtttgcaagaacagaatacatccttttatccttttatgaaaaatgacaagtgaaggcaaaaggggaaggttatttgatctggaagatgagtgttctgatgtggtggcttttgcaaaaatctttattggtgttgaaaactggaaaaaataactcatccagaattcatattgtcttgacaagaactatggttctctgtttttagatattgtggaaaatgtttttgggcatttttctctgattttatttcttctcccccacccctttttctaaaaaacaaacaaaaaaaaaaaacacacaaaacaaaaacagaacaaaagaagagagaaggaaattttatcaattaaaaatgctgtgtgataaaatcccagcccagattgctcagctgtttgtacctgacttgccgcctgcataggagccagttctgttccttctgactagcccctcttcctccaggggagaacttccaaatgttaatttttttttttttgaaaatataaataattactattttgta

SEQ ID NO: 316103 - DNA, 2100 bp, Homo sapiens
gaagctgactatgaccagttcagtttgagcggcgctggtgacaccaaggtatggatagaagtgtagatcattggtgttcagtagactgttttctcatagggtagaatctcgtgtgttcatgattaatgtgtggattcttatcaataataaatgctccgtgtgtgcataacagatgggtgtcatgaagtaaactacaagattggtatgtgatgagcgtcataactgtgagtcgtatcaaagtagtgagttgcatgacaggagacgtactagtatcaatataatgcacgcgctgatcatccacacagttttgggtgagggtatttagacatatatgtttttactcagaaaactgaggaaaagaaaggtgaaaaaatcgaagagttgttttgctgttatgtttaagaaaacaaagatggaacatgtgatggacgaaaaggctattataatcaagccgggcaaagaaattttccattaatgttaggttttaaatgatacaaagttctctcctcactagagcttaaaatcatgaaaatagtttagtttagggattttgttctgttggaatgtttctcatattcagtttttctggcatagaatcgagttgaaatcaatgatgtggagcctgaagtttttaaggaaatgatgtgcttcatttacacggggaaggctccaaacctcgacaaaatggctgatgatttgctggcagctgctgacaagtatgccctggagcgcttaaaggtcatgtgtgaggatgccctctgcagtaacctgtccgtggagaacgctgcagaaattctcatcctggccgacctccacagtgcagatcagttgaaaactcaggcagtggatttcatcaactatcatgcttcggatgtcttggagacctctgggtggaagtcaatggtggtgtcacatccccacttggtggctgaggcataccgctctctggcttcagcacagtgcccttttctgggacccccacgcaaacgcctgaagcaatcctaagatcctgcttgttgtaagactccgtttaatttccagaagcagcagccactgttgctgccactgaccaccaggtagacagcgcaatctgtggagcttttactctgttgtgaggggaagagactgcattgtggccccagacttttaaaacagcactaaataacttgggggaaacggggggagggaaaatgaaatgaaaaccctgttgctgcgtcactgtgttccctttggcctggctgagtttgatactgtggggattcagtttaggcgctggcccgaggatatcccagcggtggtacttcggagacacctgtctgcatctgactgagcagaacaaatcgtcaggtgcctggagcaaaaaggaaaaaaaaaaaagaaaggacattgagttttaacagaagggaaaaggaaagaagaaaagatttttgcagaatttctcaaaaatcagtttgtggattccagtagtatttatattgagagaaacaaattttagtccttctaactgtgctaaaacttggatatttgtgaaaactccttaccaccatacaagcatcagaagagctctcttgttgttagcacttattgtttgcaagaacagaatacatccttttatccttttatgaaaaatgacaagtgaaggcaaaaggggaaggttatttgatctggaagatgagtgttctgatgtggtggcttttgcaaaaatctttattggtgttgaaaactggaaaaaataactcatccagaattcatattgtcttgacaagaactatggttctctgtttttagatattgtggaaaatgtttttgggcatttttctctgattttatttcttctcccccacccctttttctaaaaaacaaacaaaaaaaaaaaacacacaaaacaaaaacagaacaaaagaagagagaaggaaattttatcaattaaaaatgctgtgtgataaaatcccagcccagattgctcagctgtttgtacctgacttgccgcctgcataggagccagttctgttccttctgactagcccctcttcctccaggggagaacttccaaatgttaatttttttttttttgaaaatataaataattactattttgta

SEQ ID NO: 316104 - DNA, 1780 bp, Homo sapiens
gaagggcagaccattgagttgccctgttgacgtgaagcagactgatgcctcactgtaattgtaagtggtgaaggtttaagaacaactttcatcacagtcaggaggagagtaaacttcaggatgcagatctaccctgtaattgccatttttctaataggtagactttagaactctaatggcagctttccaagttactttagctgtttacatttcaagcttaaacatctaaccttcagaaatggttatgttttatcattgcagtagtagcttttcatggtctgtgcagttctattcaagtatctagttaatatgatggtacagctaaagaaaacagcttcagtagtggtcagcccagaactattgctgctctgatgacagcagtgcttgtgttttacagtatgccctggagcgcttaaaggtcatgtgtgaggatgccctctgcagtaacctgtccgtggagaacgctgcagaaattctcatcctggccgacctccacagtgcagatcagttgaaaactcaggcagtggatttcatcaactatcatgcttcggatgtcttggagacctctgggtggaagtcaatggtggtgtcacatccccacttggtggctgaggcataccgctctctggcttcagcacagtgcccttttctgggacccccacgcaaacgcctgaagcaatcctaagatcctgcttgttgtaagactccgtttaatttccagaagcagcagccactgttgctgccactgaccaccaggtagacagcgcaatctgtggagcttttactctgttgtgaggggaagagactgcattgtggccccagacttttaaaacagcactaaataacttgggggaaacggggggagggaaaatgaaatgaaaaccctgttgctgcgtcactgtgttccctttggcctggctgagtttgatactgtggggattcagtttaggcgctggcccgaggatatcccagcggtggtacttcggagacacctgtctgcatctgactgagcagaacaaatcgtcaggtgcctggagcaaaaaggaaaaaaaaaaaagaaaggacattgagttttaacagaagggaaaaggaaagaagaaaagatttttgcagaatttctcaaaaatcagtttgtggattccagtagtatttatattgagagaaacaaattttagtccttctaactgtgctaaaacttggatatttgtgaaaactccttaccaccatacaagcatcagaagagctctcttgttgttagcacttattgtttgcaagaacagaatacatccttttatccttttatgaaaaatgacaagtgaaggcaaaaggggaaggttatttgatctggaagatgagtgttctgatgtggtggcttttgcaaaaatctttattggtgttgaaaactggaaaaaataactcatccagaattcatattgtcttgacaagaactatggttctctgtttttagatattgtggaaaatgtttttgggcatttttctctgattttatttcttctcccccacccctttttctaaaaaacaaacaaaaaaaaaaaacacacaaaacaaaaacagaacaaaagaagagagaaggaaattttatcaattaaaaatgctgtgtgataaaatcccagcccagattgctcagctgtttgtacctgacttgccgcctgcataggagccagttctgttccttctgactagcccctcttcctccaggggagaacttccaaatgttaatttttttttttttgaaaatataaataattactattttgta

SEQ ID NO: 316105 - DNA, 1905 bp, Homo sapiens
gaaacccagggaggggaggggaggagaagggagtaatggggaggaggccgcgcggggtggggtctggcggtacgcgctggctgcgtcgacgtgctgacgccatgacgccccggctggtgtgtgtcggtgtgtatgtgtgtgtgtgagtgtgcgcgctccgagtgtgtgtgtatttgtgtatcggcggtcccgcaggtcccggatgttgcggacagtatgaggcaagcgcagggggacggggaccagcagctgtcgccgccgctctcagggtgaagagggaacagaaatctttgccccctgactttggaaatctcgtttaaccttcaaactggcgatgtcaagggttccaagtcctccacctccggcagaaatgtcgagtggccccgtagctgagagttggtgctacacacagatcaaggtagtgaaattctcctacatgtggaccatcaataactttagcttttgccgggaggaaatgggtgaagtcattaaaagttctacattttcatcaggagcaaatgataaactgaaatggtgtttgcgagtaaaccccaaagggttagatgaagaaagcaaagattacctgtcactttacctgttactggtcagctgtccaaagagtgaagttcgggcaaaattcaaattctccatcctgaatgccaagggagaagaaaccaaagctatggagagtcaacgggcatataggtttgtgcaaggcaaagactggggattcaagaaattcatccgtagagattttcttttggatgaggccaacgggcttctccctgatgacaagcttaccctcttctgcgaggtgagtgttgtgcaagattctgtcaacatttctggccagaataccatgaacatggtaaaggttcctgagtgccggctggcagatgagttaggaggactgtgggagaattcccggttcacagactgctgcttgtgtgttgccggccaggaattccaggctcacaaggctatcttagcagctcgttctccggtttttagtgccatgtttgaacatgaaatggaggagagcaaaaagaatcgagttgaaatcaatgatgtggagcctgaagtttttaaggaaatgatgtgcttcatttacacggggaaggctccaaacctcgacaaaatggctgatgatttgctggcagctgctgacaaggtaagataagaatagaaaaataatcaggactaggagttattgtgacttcttgtgtttcatgaacaggattctatgttgcattgtgggtaaaatgagcatatatcttggtttggccaagacggtcctggtttacacatattattccaacacaattattaatagcacactttttattctcaaaagtgtcctgttttgaatagtaaactatatgatcacctaactatgggaaagaaggataagtttgacttctacctctcctcttttttccatctcaaatttaaccacagtgatagtaaagattcaaataatactaacatttggattgtgctttataatttacaaaatgtttttgagtttattaatgtatttaaactttatcagtaaaacagccctttgtatccatgtggactcaaccaatctcagatcacaaatatttgagaaaaaagaaacaagaggccaggcacagtggctcatgcctgtaatcccagcacttatcggaggccgaggcaggtggatcacctgagctcaggagtttgagaccagcctgggcaacgtggcgaaaccccatctctactaaaaaatacaagaattagctaggcatgatggtgcacacttgtagtcccagctactcaggaggctgaggcaagaggatcgcttgaacccaggaggcagagtttgcagtgagctgagatcgtgccactccagcctgggcaacagagcaagactctgtctcc

SEQ ID NO: 316106 - DNA, 1340 bp, Homo sapiens
gaaacccagggaggggaggggaggagaagggagtaatggggaggaggccgcgcggggtggggtctggcggtacgcgctggctgcgtcgacgtgctgacgccatgacgccccggctggtgtgtgtcggtgtgtatgtgtgtgtgtgagtgtgcgcgctccgagtgtgtgtgtatttgtgtatcggcggtcccgcaggtcccggatgttgcggacagtatgaggcaagcgcagggggacggggaccagcagctgtcgccgccgctctcagggtgaagagggaacagaaatctttgccccctgactttggaaatctcgtttaaccttcaaactggcgatgtcaagggttccaagtcctccacctccggcagaaatgtcgagtggccccgtagctgagagttggtgctacacacagatcaaggtagtgaaattctcctacatgtggaccatcaataactttagcttttgccgggaggaaatgggtgaagtcattaaaagttctacattttcatcaggagcaaatgataaactgaaatggtgtttgcgagtaaaccccaaagggttagatgaagaaagcaaagattacctgtcactttacctgttactggtcagctgtccaaagagtgaagttcgggcaaaattcaaattctccatcctgaatgccaagggagaagaaaccaaagctatggagagtcaacgggcatataggtttgtgcaaggcaaagactggggattcaagaaattcatccgtagagattttcttttggatgaggccaacgggcttctccctgatgacaagcttaccctcttctgcgaggtgagtgttgtgcaagattctgtcaacatttctggccagaataccatgaacatggtaaaggttcctgagtgccggctggcagatgagttaggaggactgtgggagaattcccggttcacagactgctgcttgtgtgttgccggccaggaattccaggctcacaaggctatcttagcagctcgttctccggtttttagtgccatgtttgaacatgaaatggaggagagcaaaaagaatcgagttgaaatcaatgatgtggagccgcaccacagaggaggctctccatgccagccacggcttcattgtggtacacgtaggccctgtgcccttccggcccaacctggaatcccttgccccgttccccactggggaacgggaactaaaatcgtctctggcaagaccaaaaataaacaactataacataaatagaacacacaagaacaaaaaaagatacataaaaacacaaagatatatatatatcgacaaaacacaaatgacatctgggggtacgcactctaaatatact

SEQ ID NO: 316107 - DNA, 937 bp, Homo sapiens
gaaacccagggaggggaggggaggagaagggagtaatggggaggaggccgcgcggggtggggtctggcggtacgcgctggctgcgtcgacgtgctgacgccatgacgccccggctggtgtgtgtcggtgtgtatgtgtgtgtgtgagtgtgcgcgctccgagtgtgtgtgtatttgtgtatcggcggtcccgcaggtcccggatgttgcggacagtatgaggcaagcgcagggggacggggaccagcagctgtcgccgccgctctcagggtgaagagggaacagaaatctttgccccctgactttggaaatctcgtttaaccttcaaactggcgatgtcaagggttccaagtcctccacctccggcagaaatgtcgagtggccccgtagctgagagttggtgctacacacagatcaaggtagtgaaattctcctacatgtggaccatcaataactttagcttttgccgggaggaaatgggtgaagtcattaaaagttctacattttcatcaggagcaaatgataaactgaaatggtgtttgcgagtaaaccccaaagggttagatgaagaaagcaaagattacctgtcactttacctgttactggtcagctgtccaaagagtgaagttcgggcaaaattcaaattctccatcctgaatgccaagggagaagaaaccaaagctatggagagtcaacgggcatataggtttgtgcaaggcaaagactggggattcaagaaattcatccgtagagattttcttttggatgaggcaagggtttcctgataaaggtactctttggagggaggtggcaatctggacatttggcgatcctagtgggaggctgatcggtggcaatttagagggggaaacggcacaaggtgtgtcgggaaagcaaggttaaggtcgtatgcggcggagggaggggctggttgggcc

SEQ ID NO: 316108 - DNA, 1130 bp, Homo sapiens
  misc_feature (979)..(979): n is a, c, g, or t
  misc_feature (987)..(987): n is a, c, g, or t
  misc_feature (995)..(995): n is a, c, g, or t
  misc_feature (997)..(997): n is a, c, g, or t
  misc_feature (1007)..(1007): n is a, c, g, or t
  misc_feature (1010)..(1010): n is a, c, g, or t
aactaggctagtacgaggctggtgtggaatcggccgagggtcggtgtgtatgtgtgtgtgtgagtgtgcgcgctccgagtgtgtgtgtatttgtgtatcggcggtcccgcaggtcccggatgttgcggacagtatgaggcaagcgcagggggacggggaccagcagctgtcgccgccgctctcagagatttcctgttagacaagacaaattagagttttcctactgacttaacttgggtgaagagggaacagaaatctttgccccctgactttggaaatctcgtttaaccttcaaactggcgatgtcaagggttccaagtcctccacctccggcagaaatgtcgagtggccccgtagctgagagttggtgctacacacagatcaaggtagtgaaattctcctacatgtggaccatcaataactttagcttttgccgggaggaaatgggtgaagtcattaaaagttctacattttcatcaggagcaaatgataaactgaaatggtgtttgcgagtaaaccccaaagggttagatgaagaaagcaaagattacctgtcactttacctgttactggtcagctgtccaaagagtgaagttcgggcaaaattcaaattctccatcctgaatgccaagggagaagaaaccaaagctatggagagtcaacgggcatataggtttgtgcaaggcaaagactggggattcaagaaattcatccgtagagattttcttttggatgaggccaacgggcttctccctgatgacaagcttaccctcttctgcgaggtgagtgttgtgcaagattctgtcaacatttctggccagaataccatgaacatggtaaaggttcctgagtgccggctggcagatgagttaggaggactgtgggagaattcccggttcacagactgctgcttgtgtgttgccggccaggaattccaggctcacaaggctatcttagcagtcgtcccggtttagtgccngttgactnaatggggngnccaagatccntgnacacggtggccccagtttaagaaaaaggccctcacaggagccacctcccaagtgggtttgcgcgaaatctcgcgcaatgtgaccccccggaaaaatgcccaaaacgcgaaatattgggga

SEQ ID NO: 316109 - DNA, 282 bp, Homo sapiens
gaaaaagagatttgtggggctctcttcctattgtcctgagatggtatagaataagtctgattgtgacagaaaaggagttacttgatccggggctaaagccttgatttgtggaggtggtttcaagataatatgattaatattagtatctgaatgtactacagcagttaggtaaaagtcgtctatctgctggcaaaaaaattcctggtaacaaaagcttggcttgtgtttccttgtctttcacagtgagtgttgtgcaagattctgtcaacatttctggccaga

SEQ ID NO: 316110 - DNA, 684 bp, Homo sapiens
gggaggtggaggttgcagtgggctgagatcgctccactgcactccagcctggctaacagagctgagatttcatctcaaaaaaaaggagaaccagcttggatttttctgacttccatttctaagtataatatttttttgagagatgactaagaaatagagcattcagagctagtgagataaaggaatggtaatttttttgtttgttttttttgagagagtatcactctgtcacccagactggagtgcggtggcatgattttgaggtcaccggaatctctgccctgccctgcgtgtccctcctccaccgggttcaagcaattcttgtgcctcagcctcctaagtaactgggactacagtcgtgcaccaccatgcctggctaattttttgtatttttggttgaggcaggatttcaccatgatgccaggctggtcttgaacttctggcctcaagtgatccacccaccttggcctaagaatggtaattttgactagtaaatttttactagtcatttcttctttcatatatcacctgcttttgtgagatttttcctttttaggaatagacaaagtaagtaaagacttgtatgagattcagaatctagttaagtctgattcatattctctatttccaacaagatttcctgttagacaagacaaattagagttttcctactgacttaacttg

SEQ ID NO: 316111 - DNA, 4099 bp, Homo sapiens
actaggtcgagcggcctggttttatcggcgagggcagatggacgcgggatttttccgcggaacaagtgcagaacaggataatcggttcagcaacaaacagaagaaactactgaagcagctgaaatttgcagaatgcctagaaaaaaaggtggacatgagcaaagtaaatttggaggttataaagccttggataacaaaaagagtaacggaaatccttgggtttgaagatgatgttgtgattgagtttatattcaaccagctggaagtgaagaatccagactccaaaatgatgcaaatcaacctgactggatttttgaatggaaaaaatgctcgagaatttatgggagaactgtggcccctgctgctaagtgcacaagaaaacatcgcgggaatcccttctgctttcctagaactgaagaaagaagaaataaaacaaagacagattgaacaagaaaaactggcatctatgaaaaagcaagatgaagacaaagataaaagagataaggaagaaaaagaaagcagcagagaaaaaagggagcggtctcgtagcccaagaagacgcaaatccagatctccttcccctagaagacgatcttcccctgtcaggagagagagaaagcgcagtcattctcgatctccccgtcacagaaccaagagccggagtccttcccctgctccagaaaagaaggaaaaaactccagagctcccagaaccttcagtgaaagtaaaagaaccttcagtacaagaggctacttctactagtgacattctgaaagttcccaaacctgaacctataccagagcctaaagaaccttctccggaaaaaaattccaaaaaagaaaaggagaaggagaagacccgaccacgatctcggtcacgctccaaatcaagatcccggacgcggtcccgctctccttctcacactcgacctagacggcgccatagatcccgatcaagatcgtattcacctagaaggcggccaagcccaagaaggcggccatctcctcgaagaagaactccgccaagaagaatgcctcctccaccaaggcatagaaggagtagatctccagtaagacgaagaagacgttcgtcagcatccttgtctgggagtagctcatcatcctcttcatctcgttcacggtcaccaccaaagaagcctcccaagaggacatccagcccccctcggaaaactcgtaggttatctccttcagcaagtcctccaaggcgaaggcacaggccatcacctcctgcaactccaccacccaaaactcggcattcccctacaccccagcagtcaaaccgtacaagaaaaagtcgtgtttctgtgtctccagggagaacttcaggtaaagtgacaaaacataaaggtactgagaaaagagaatccccttcaccagcaccgaagcctagaaaagtagagttatctgaatcggaagaagataaaggtggcaaaatggctgcagcagattctgtgcagcagagacgccaatacagacgacaaaaccagcagtcttcatctgactctggctcctcctcctcctcagaagatgaacgacccaagagatcccatgtgaagaatggtgaggttggcaggcggcggagacattccccttcccggagtgcttctccatcaccacgaaagcgccaaaaagagacttcccctcgtggtagacggaggagaagtccatccccaccacccaccagaaggcgacggtctccttctcccgcccctcctcctcgacggcgcaggactcccacaccaccaccacgacgaaggactccttctcctcccccacgtcggcgctcaccttctcctagaagatactctcctccaatacagaggagatactctccttctccacctccaaagagaagaacggcttcacctcctccccctcctaaacgaagagcatcaccatctccaccaccaaagcggcgggtctcccattctccacctcccaaacaaagaagctccccagtcaccaagagacgttcaccttcattatcatccaagcataggaaagggtcttccccaagccgctctacccgggaggcccgatcaccacaaccaaacaaacggcattcgccctcaccacggcctcgagctcctcagacctcctcaagtcctccacccgttcgaagaggagcgtcgtcatcaccccaaagaaggcagtccccgtctccaagtactaggcccattaggagagtctccaggactccggaacctaaaaagataaaaaaggctgcttccccaagcccacagtctgtaagaagggtctcatcctcccgatctgtctccgggtctcctgagccagcagctaaaaagcccccagcacctccatcccccgtccagtctcagtcaccgtctacaaactggtcaccagctgtaccggtcaaaaaggccaaaagcccaacaccgagcccatcaccgccaagaaattcagatcaggaaggaggtggaaagaaaaagaagaaaaagaaggacaagaaacacaaaaaggataagaagcacaagaagcacaaaaaacacaagaaggaaaaggctgtggctgcagctgctgcagctgctgtgacccctgcagccattgcagctgccacaaccacattagcacaggaagagccagtggcagcgccagagccgaagaaggagactgaaagtgaagctgaagataaccttgatgatttagaaaagcacctgcgtgaaaaggccctgagatcaatgaggaaggcccaagtgtccccacagtcttagggggaaatgtttgttatgatgtaaattttatttggtttgtacgcagttcaatttcaaaattgctaaaatgtgtttgagctttagactataacatttgttgtaataattgctaggttgaagttcaacatgtaaaaaaagggggcatggatttacattgcaaaaggtgtccacagtgtattagtgacattctttcattgacagctgacataattcattgagtgaaatattttaagccaaaaaaaaattccctttttaaaaaagggggtttaaatactgttggcatttttatggttcctttaaatgccctagctattcccagaggggtttttttgtttgtttttttggttttgattttctttttgtttttctttcttcttcttatttttttcatttgagtcttagctcccatttaagttatgcttctgaccttgtatggtctgtaagcttgcccagaaataagaccactgttttgaactaccacaaaagtataaatgaatattttaatgccacaatctttcctgttgcctgtggagtctctgctgaaatgaatcaggattcgagctctaggatgagacagaaaatgaaagcatgttgtttgccaggacactgtgggtttatattgatgtgtaacaagttgatttggaacactggactctcattctgttattctggttttgttttttttgttttgttttttttcttttgtaaaggcaatgagctagtcccagaaaggatccttcagttacatacaatttgtttaatgaaatgtcatggctctgttcatatttttgtcttgttcttccaattggtatatacaactttcagagcctcttgtatttggaaggctggaagggcccagactttggaatagtgtcttggtttcactgtttttgttttgattttttttttgttttgattttttttaaactaaagctatataaagcttgtggattaaacagaataaatttctaaatttaaaaaaaaaaaaaaaaaaaaaaaaaaacaaaaaaaaaaaaaaaaatgcgcaaaaaaacaaaaaaaaaaaaaaacaaagtagtgtggggggcgacgcgccgcgcagaaagacgttacaacacaacgagggggggggggggggcaccaagtagtagtaaaaaacacggtggacgtaaagaggttgttcaaccaagaagacacgcgtcgtgagcacaaacaatacgggggggggtgctccccccaagaataaaaaagcacgcgggggggggagacaaggcggtgtttgagaagaccaccccggggggagggcctggagagcggcaagagggatactaaaaaaagggaggcgtgaaaggggtgttaataaatcgg

SEQ ID NO: 316112 - DNA, 972 bp, Homo sapiens
cggggagtttagggcctgacagaagcccgcccccgctggcgctcgtgcgcacgcgtggcgggctctcggcgcactgagcaggcgcggcctcgtgtcggccggagggggcgggcgcaacgacgcgcgctgcgtcccggcgctcggctttccctccgccggtcccgccctccgtcgcggcggcgcggtgtaccctgggatagggagcgatctccgagcgaggcggcaagatggacgcgggatttttccgcggaacaagtgcagaacaggataatcggttcagcaacaaacagaagaaactactgaagcagctgaaatttgcagaatgcctagaaaaaaaggtggacatgagcaaagtaaatttggaggttataaagccttggataacaaaaagagtaacggaaatccttgggtttgaagatgatgttgtgattgagtttatattcaaccagctggaagtgaagaatccagactccaaaatgatgcaaatcaacctgactggatttttgaatggaaaaaatgctcgagaatttatgggagaactgtggcccctgctgctaagtgcacaagaaaacatcgcgggaatcccttctgctttcctagaactgaagaaagaagaaataaaacaaagacagattgaacaagaaaaactggcatctatgaaaaagcaagatgaagacaaagataaaagagataaggaagaaaaagaaagcagtgaaaatttggcagaatgcctagaaaaaaacaggtggacattgagccacaagttacattctggaggttaattaaagcctgggttaaccaaaaagaagtacgggaaactcctggggttgaagatgactgttgcgactcggaattatattcaacccgtggaagtgaagaatccgatcccaaatggtgcgatcaccgatgggtttgacgggcacatgtccgcaatttggggaatggcgccccggtaagccgcaaaacggggcc

SEQ ID NO: 316113 - DNA, 678 bp, Homo sapiens
agaatagatagaggattatggggctttagccaccctctgggaaacataggtaatgtaaattggatatatgttagttgaatcaaccagcaatctaagtggtatatttgaaattcataacctggttgtacagtgtagttggtggttttctcatgtgaagagagatggctgttctcaatgctgaatgttttttcctttttgtctagggctgcttccccaagcccacagtctgtaagaagggtctcatcctcccgatctgtctccgggtctcctgagccagcagctaaaaagcccccagcacctccatcccccgtccagtctcagtcaccgtctacaaactggtcaccagctgtaccggtcaaaaaggccaaaagcccaacaccgagcccatcaccgccaagaaattcagatcaggaaggaggtggaaagaaaaagaagaaaaagaaggacaagaaacacaaaaaggataagaagcacaagaagcacaaaaaacacaagaaggaaaaggctgtggctgcagctgctgcagctgctgtgacccctgcagccattgcagctgccacaaccacattagcacaggaagagccagtggcagcgccagagccgaagaaggaggtggaaagaaaaagaagaaaaagaaggacaagaaacacaaaaaggataagaagcacaagaagcaca

SEQ ID NO: 316114 - DNA, 542 bp, Homo sapiens
cggggagtttagggcctgacagaagcccgcccccgctggcgctcgtgcgcacgcgtggcgggctctcggcgcactgagcaggcgcggcctcgtgtcggccggagggggcgggcgcaacgacgcgcgctgcgtcccggcgctcggctttccctccgccggtcccgccctccgtcgcggcggcgcggtgtaccctgggatagggagcgatctccgagcgaggcggcaagatggacgcgggatttttccgcggaacaagtgcagaacaggataatcggttcagcaacaaacagaagaaactactgaagcagctgaaatttgcagaatgcctagaaaaaaaggtggacatgagcaaagtaaatttggaggttataaagccttggataacaaaaagagtaacggaaatccttgggtttgaagatgatgttgtgattgagtttatattcaaccagctggaagtgaaggtactaatatacaaatggctcttgtttctgaatatgtgatataatttgtgaatctttggaaactgaattttttctatggag

SEQ ID NO: 316115 - DNA, 3965 bp, Homo sapiens
cggggagtttagggcctgacagaagcccgcccccgctggcgctcgtgcgcacgcgtggcgggctctcggcgcactgagcaggcgcggcctcgtgtcggccggagggggcgggcgcaacgacgcgcgctgcgtcccggcgctcggctttccctccgccggtcccgccctccgtcgcggcggcgcggtgtaccctgggatagggagcgatctccgagcgaggcggcaagatggacgcgggatttttccgcggaacaagtgcagaacaggataatcggttcagcaacaaacagaagaaactactgaagcagctgaaatttgcagaatgcctagaaaaaaaggtggacatgagcaaagtaaatttggaggttataaagccttggataacaaaaagagtaacggaaatccttgggtttgaagatgatgttgtgattgagtttatattcaaccagctggaagtgaagaatccagactccaaaatgatgcaaatcaacctgactggatttttgaatggaaaaaatgctcgagaatttatgggagaactgtggcccctgctgctaagtgcacaagaaaacatcgcgggaatcccttctgctttcctagaactgaagaaagaagaaataaaacaaagacagattgaacaagaaaaactggcatctatgaaaaagcaagatgaagacaaagataaaagagataaggaagaaaaagaaagcagcagagaaaaaagggagcggtctcgtagcccaagaagacgcaaatccagatctccttcccctagaagacgatcttcccctgtcaggagagagagaaagcgcagtcattctcgatctccccgtcacagaaccaagagccggagtccttcccctgctccagaaaagaaggaaaaaactccagagctcccagaaccttcagtgaaagtaaaagaaccttcagtacaagaggctacttctactagtgacattctgaaagttcccaaacctgaacctataccagagcctaaagaaccttctccggaaaaaaattccaaaaaagaaaaggagaaggagaagacccgaccacgatctcggtcacgctccaaatcaagatcccggacgcggtcccgctctccttctcacactcgacctagacggcgccatagatcccgatcaagatcgtattcacctagaaggcggccaagcccaagaaggcggccatctcctcgaagaagaactccgccaagaagaatgcctcctccaccaaggcatagaaggagtagatctccagtaagacgaagaagacgttcgtcagcatccttgtctgggagtagctcatcatcctcttcatctcgttcacggtcaccaccaaagaagcctcccaagaggacatccagcccccctcggaaaactcgtaggttatctccttcagcaagtcctccaaggcgaaggcacaggccatcacctcctgcaactccaccacccaaaactcggcattcccctacaccccagcagtcaaaccgtacaagaaaaagtcgtgtttctgtgtctccagggagaacttcaggtaaagtgacaaaacataaaggtactgagaaaagagaatccccttcaccagcaccgaagcctagaaaagtagagttatctgaatcggaagaagataaaggtggcaaaatggctgcagcagattctgtgcagcagagacgccaatacagacgacaaaaccagcagtcttcatctgactctggctcctcctcctcctcagaagatgaacgacccaagagatcccatgtgaagaatggtgaggttggcaggcggcggagacattccccttcccggagtgcttctccatcaccacgaaagcgccaaaaagagacttcccctcggatgcagatgggaaagcgatggcaatcgccagtgactaaaagtggtagacggaggagaagtccatccccaccacccaccagaaggcgacggtctccttctcccgcccctcctcctcgacggcgcaggactcccacaccaccaccacgacgaaggactccttctcctcccccacgtcggcgctcaccttctcctagaagatactctcctccaatacagaggagatactctccttctccacctccaaagagaagaacggcttcacctcctccccctcctaaacgaagagcatcaccatctccaccaccaaagcggcgggtctcccattctccacctcccaaacaaagaagctccccagtcaccaagagacgttcaccttcattatcatccaagcataggaaagggtcttccccaagccgctctacccgggaggcccgatcaccacaaccaaacaaacggcattcgccctcaccacggcctcgagctcctcagacctcctcaagtcctccacccgttcgaagaggagcgtcgtcatcaccccaaagaaggcagtccccgtctccaagtactaggcccattaggagagtctccaggactccggaacctaaaaagataaaaaaggctgcttccccaagcccacagtctgtaagaagggtctcatcctcccgatctgtctccgggtctcctgagccagcagctaaaaagcccccagcacctccatcccccgtccagtctcagtcaccgtctacaaactggtcaccagctgtaccggtcaaaaaggccaaaagcccaacaccgagcccatcaccgccaagaaattcagatcaggaaggaggtggaaagaaaaagaagaaaaagaaggacaagaaacacaaaaaggataagaagcacaagaagcacaaaaaacacaagaaggaaaaggctgtggctgcagctgctgcagctgctgtgacccctgcagccattgcagctgccacaaccacattagcacaggaagagccagtggcagcgccagagccgaagaaggagactgaaagtgaagctgaagataaccttgatgatttagaaaagcacctgcgtgaaaaggccctgagatcaatgaggaaggcccaagtgtccccacagtcttagggggaaatgtttgttatgatgtaaattttatttggtttgtacgcagttcaatttcaaaattgctaaaatgtgtttgagctttagactataacatttgttgtaataattgctaggttgaagttcaacatgtaaaaaaagggggcatggatttacattgcaaaaggtgtccacagtgtattagtgacattctttcattgacagctgacataattcattgagtgaaatattttaagccaaaaaaaaattccctttttaaaaaagggggtttaaatactgttggcatttttatggttcctttaaatgccctagctattcccagaggggtttttttgtttgtttttttggttttgattttctttttgtttttctttcttcttcttatttttttcatttgagtcttagctcccatttaagttatgcttctgaccttgtatggtctgtaagcttgcccagaaataagaccactgttttgaactaccacaaaagtataaatgaatattttaatgccacaatctttcctgttgcctgtggagtctctgctgaaatgaatcaggattcgagctctaggatgagacagaaaatgaaagcatgttgtttgccaggacactgtgggtttatattgatgtgtaacaagttgatttggaacactggactctcattctgttattctggttttgttttttttgttttgttttttttcttttgtaaaggcaatgagctagtcccagaaaggatccttcagttacatacaatttgtttaatgaaatgtcatggctctgttcatatttttgtcttgttcttccaattggtatatacaactttcagagcctcttgtatttggaaggctggaagggcccagactttggaatagtgtcttggtttcactgtttttgttttgattttttttttgttttgattttttttaaactaaagctatataaagcttgtggattaaacagaataaatttctaaatttaaaaa

SEQ ID NO: 316116 - DNA, 3805 bp, Homo sapiens
cggggagtttagggcctgacagaagcccgcccccgctggcgctcgtgcgcacgcgtggcgggctctcggcgcactgagcaggcgcggcctcgtgtcggccggagggggcgggcgcaacgacgcgcgctgcgtcccggcgctcggctttccctccgccggtcccgccctccgtcgcggcggcgcggtgtaccctgggatagggagcgatctccgagcgaggcggcaagatggacgcgggatttttccgcggaacaagtgcagaacaggataatcggttcagcaacaaacagaagaaactactgaagcagctgaaatttgcagaatgcctagaaaaaaaggtggacatgagcaaagtaaatttggaggttataaagccttggataacaaaaagagtaacggaaatccttgggtttgaagatgatgttgtgattgagtttatattcaaccagctggaagtgaagaatccagactccaaaatgatgcaaatcaacctgactggatttttgaatggaaaaaatgctcgagaatttatgggagaactgtggcccctgctgctaagtgcacaagaaaacatcgcgggaatcccttctgctttcctagaactgaagaaagaagaaataaaacaaagacagattgaacaagaaaaactggcatctatgaaaaagcaagatgaagacaaagataaaagagataaggaagaaaaagaaagcagcagagaaaaaagggagcggtctcgtagcccaagaagacgcaaatccagatctccttcccctagaagacgatcttcccctgtcaggagagagagaaagcgcagtcattctcgatctccccgtcacagaaccaagagccggagtccttcccctgctccagaaaagaaggaaaaaactccagagctcccagaaccttcagtgaaagtaaaagaaccttcagtacaagaggctacttctactagtgacattctgaaagttcccaaacctgaacctataccagagcctaaagaaccttctccggaaaaaaattccaaaaaagaaaaggagaaggagaagacccgaccacgatctcggtcacgctccaaatcaagatcccggacgcggtcccgctctccttctcacactcgacctagacggcgccatagatcccgatcaagatcgtattcacctagaaggcggccaagcccaagaaggcggccatctcctcgaagaagaactccgccaagaagaatgcctcctccaccaaggcatagaaggagtagatctccagtaagacgaagaagacgttcgtcagcatccttgtctgggagtagctcatcatcctcttcatctcgttcacggtcaccaccaaagaagcctcccaagaggacatccagcccccctcggaaaactcgtaggttatctccttcagcaagtcctccaaggcgaaggcacaggccatcacctcctgcaactccaccacccaaaactcggcattcccctacaccccagcagtcaaaccgtacaagaaaaagtcgtgtttctgtgtctccagggagaacttcaggtaaagtgacaaaacataaaggtactgagaaaagagaatccccttcaccagcaccgaagcctagaaaagtagagttatctgaatcggaagaagataaaggtggcaaaatggctgcagcagattctgtgcagcagagacgccaatacagacgacaaaaccagcagtcttcatctgactctggctcctcctcctcctcagaagatgaacgacccaagagatcccatgtgaagaatggtgaggttggcgacggtctccttctcccgcccctcctcctcgacggcgcaggactcccacaccaccaccacgacgaaggactccttctcctcccccacgtcggcgctcaccttctcctagaagatactctcctccaatacagaggagatactctccttctccacctccaaagagaagaacggcttcacctcctccccctcctaaacgaagagcatcaccatctccaccaccaaagcggcgggtctcccattctccacctcccaaacaaagaagctccccagtcaccaagagacgttcaccttcattatcatccaagcataggaaagggtcttccccaagccgctctacccgggaggcccgatcaccacaaccaaacaaacggcattcgccctcaccacggcctcgagctcctcagacctcctcaagtcctccacccgttcgaagaggagcgtcgtcatcaccccaaagaaggcagtccccgtctccaagtactaggcccattaggagagtctccaggactccggaacctaaaaagataaaaaaggctgcttccccaagcccacagtctgtaagaagggtctcatcctcccgatctgtctccgggtctcctgagccagcagctaaaaagcccccagcacctccatcccccgtccagtctcagtcaccgtctacaaactggtcaccagctgtaccggtcaaaaaggccaaaagcccaacaccgagcccatcaccgccaagaaattcagatcaggaaggaggtggaaagaaaaagaagaaaaagaaggacaagaaacacaaaaaggataagaagcacaagaagcacaaaaaacacaagaaggaaaaggctgtggctgcagctgctgcagctgctgtgacccctgcagccattgcagctgccacaaccacattagcacaggaagagccagtggcagcgccagagccgaagaaggagactgaaagtgaagctgaagataaccttgatgatttagaaaagcacctgcgtgaaaaggccctgagatcaatgaggaaggcccaagtgtccccacagtcttagggggaaatgtttgttatgatgtaaattttatttggtttgtacgcagttcaatttcaaaattgctaaaatgtgtttgagctttagactataacatttgttgtaataattgctaggttgaagttcaacatgtaaaaaaagggggcatggatttacattgcaaaaggtgtccacagtgtattagtgacattctttcattgacagctgacataattcattgagtgaaatattttaagccaaaaaaaaattccctttttaaaaaagggggtttaaatactgttggcatttttatggttcctttaaatgccctagctattcccagaggggtttttttgtttgtttttttggttttgattttctttttgtttttctttcttcttcttatttttttcatttgagtcttagctcccatttaagttatgcttctgaccttgtatggtctgtaagcttgcccagaaataagaccactgttttgaactaccacaaaagtataaatgaatattttaatgccacaatctttcctgttgcctgtggagtctctgctgaaatgaatcaggattcgagctctaggatgagacagaaaatgaaagcatgttgtttgccaggacactgtgggtttatattgatgtgtaacaagttgatttggaacactggactctcattctgttattctggttttgttttttttgttttgttttttttcttttgtaaaggcaatgagctagtcccagaaaggatccttcagttacatacaatttgtttaatgaaatgtcatggctctgttcatatttttgtcttgttcttccaattggtatatacaactttcagagcctcttgtatttggaaggctggaagggcccagactttggaatagtgtcttggtttcactgtttttgttttgattttttttttgttttgattttttttaaactaaagctatataaagcttgtggattaaacagaataaatttctaaatttaaaaa

SEQ ID NO: 316117 - DNA, 4517 bp, Homo sapiens
agatagattttattggagaaatgctttactgatgtgtattttagtgcattttaaaaacctaagtatctggtagtattccccttgtagtgagcatgagattaaagtttagaactttttaagacaattctttttttgtggttgtgtactcattattgcttgttcgtcttttgcaatttagataaatgatataacattaaactcaaggtggttgagttgcagtagggagtcggaagcaagccaagggaacatctttctctacaggggacttggcgattccaaacccccaaggttccaagaagaaactgaagacacctggaatctgtacttgctttgtgctattgagctgtgcttgttatacagaccttgttgcttgaccaacggatttagcatttaaaaacccaattatttttgagaaatcttgacctcttagcactttgtggacagttgagaatttgaggcattgttataatagattttccttatataaaactcaggcctttagcttagccctcagaagttacagactgcatgcataacttgttagttttcataactggacaatagatattttatgcaaagctatctgtagtgttagggagcagtttatgtactttttccgtttctcattgggggaaaatttccaggcaagcaaatacttttcttgttagtaaatactagaatttgtggatgtttcatgatggtttttaaagttaataaatgtaaggcccactaacagccacagagtctaaaaatacttacgaaatccacaaaggattaacaggctgctctgatgcttttggtagagtgagagagaatttggtaatctgttagagattatattgctgagaagctactagggaagactatttgtaaaatagtaaggactatatatatgtctaagcccctatggtagacttaaaaaatactaatttaaatgagttttaggttggttgatttgttggttggttggttttgaagtaacctgtttttcttcctgtcgtgtctttttgcagaatccagactccaaaatgatgcaaatcaacctgactggatttttgaatggaaaaaatgctcgagaatttatgggagaactgtggcccctgctgctaagtgcacaagaaaacatcgcgggaatcccttctgctttcctagaactgaagaaagaagaaataaaacaaagacagattgaacaagaaaaactggcatctatgaaaaagcaagatgaagacaaagataaaagagataaggaagaaaaagaaagcagcagagaaaaaagggagcggtctcgtagcccaagaagacgcaaatccagatctccttcccctagaagacgatcttcccctgtcaggagagagagaaagcgcagtcattctcgatctccccgtcacagaaccaagagccggagtccttcccctgctccagaaaagaaggaaaaaactccagagctcccagaaccttcagtgaaagtaaaagaaccttcagtacaagaggctacttctactagtgacattctgaaagttcccaaacctgaacctataccagagcctaaagaaccttctccggaaaaaaattccaaaaaagaaaaggagaaggagaagacccgaccacgatctcggtcacgctccaaatcaagatcccggacgcggtcccgctctccttctcacactcgacctagacggcgccatagatcccgatcaagatcgtattcacctagaaggcggccaagcccaagaaggcggccatctcctcgaagaagaactccgccaagaagaatgcctcctccaccaaggcatagaaggagtagatctccagtaagacgaagaagacgttcgtcagcatccttgtctgggagtagctcatcatcctcttcatctcgttcacggtcaccaccaaagaagcctcccaagaggacatccagcccccctcggaaaactcgtaggttatctccttcagcaagtcctccaaggcgaaggcacaggccatcacctcctgcaactccaccacccaaaactcggcattcccctacaccccagcagtcaaaccgtacaagaaaaagtcgtgtttctgtgtctccagggagaacttcaggtaaagtgacaaaacataaaggtactgagaaaagagaatccccttcaccagcaccgaagcctagaaaagtagagttatctgaatcggaagaagataaaggtggcaaaatggctgcagcagattctgtgcagcagagacgccaatacagacgacaaaaccagcagtcttcatctgactctggctcctcctcctcctcagaagatgaacgacccaagagatcccatgtgaagaatggtgaggttggcaggcggcggagacattccccttcccggagtgcttctccatcaccacgaaagcgccaaaaagagacttcccctcggatgcagatgggaaagcgatggcaatcgccagtgactaaaagtggtagacggaggagaagtccatccccaccacccaccagaaggcgacggtctccttctcccgcccctcctcctcgacggcgcaggactcccacaccaccaccacgacgaaggactccttctcctcccccacgtcggcgctcaccttctcctagaagatactctcctccaatacagaggagatactctccttctccacctccaaagagaagaacggcttcacctcctccccctcctaaacgaagagcatcaccatctccaccaccaaagcggcgggtctcccattctccacctcccaaacaaagaagctccccagtcaccaagagacgttcaccttcattatcatccaagcataggaaagggtcttccccaagccgctctacccgggaggcccgatcaccacaaccaaacaaacggcattcgccctcaccacggcctcgagctcctcagacctcctcaagtcctccacccgttcgaagaggagcgtcgtcatcaccccaaagaaggcagtccccgtctccaagtactaggcccattaggagagtctccaggactccggaacctaaaaagataaaaaaggctgcttccccaagcccacagtctgtaagaagggtctcatcctcccgatctgtctccgggtctcctgagccagcagctaaaaagcccccagcacctccatcccccgtccagtctcagtcaccgtctacaaactggtcaccagctgtaccggtcaaaaaggccaaaagcccaacaccgagcccatcaccgccaagaaattcagatcaggaaggaggtggaaagaaaaagaagaaaaagaaggacaagaaacacaaaaaggataagaagcacaagaagcacaaaaaacacaagaaggaaaaggctgtggctgcagctgctgcagctgctgtgacccctgcagccattgcagctgccacaaccacattagcacaggaagagccagtggcagcgccagagccgaagaaggagactgaaagtgaagctgaagataaccttgatgatttagaaaagcacctgcgtgaaaaggccctgagatcaatgaggaaggcccaagtgtccccacagtcttagggggaaatgtttgttatgatgtaaattttatttggtttgtacgcagttcaatttcaaaattgctaaaatgtgtttgagctttagactataacatttgttgtaataattgctaggttgaagttcaacatgtaaaaaaagggggcatggatttacattgcaaaaggtgtccacagtgtattagtgacattctttcattgacagctgacataattcattgagtgaaatattttaagccaaaaaaaaattccctttttaaaaaagggggtttaaatactgttggcatttttatggttcctttaaatgccctagctattcccagaggggtttttttgtttgtttttttggttttgattttctttttgtttttctttcttcttcttatttttttcatttgagtcttagctcccatttaagttatgcttctgaccttgtatggtctgtaagcttgcccagaaataagaccactgttttgaactaccacaaaagtataaatgaatattttaatgccacaatctttcctgttgcctgtggagtctctgctgaaatgaatcaggattcgagctctaggatgagacagaaaatgaaagcatgttgtttgccaggacactgtgggtttatattgatgtgtaacaagttgatttggaacactggactctcattctgttattctggttttgttttttttgttttgttttttttcttttgtaaaggcaatgagctagtcccagaaaggatccttcagttacatacaatttgtttaatgaaatgtcatggctctgttcatatttttgtcttgttcttccaattggtatatacaactttcagagcctcttgtatttggaaggctggaagggcccagactttggaatagtgtcttggtttcactgtttttgttttgattttttttttgttttgattttttttaaactaaagctatataaagcttgtggattaaacagaataaatttctaaatttaaaaa

SEQ ID NO: 316118 - DNA, 3902 bp, Homo sapiens
cggggagtttagggcctgacagaagcccgcccccgctggcgctcgtgcgcacgcgtggcgggctctcggcgcactgagcaggcgcggcctcgtgtcggccggagggggcgggcgcaacgacgcgcgctgcgtcccggcgctcggctttccctccgccggtcccgccctccgtcgcggcggcgcggtgtaccctgggatagggagcgatctccgagcgaggcggcaagatggacgcgggatttttccgcggaacaagtgcagaacaggataatcggttcagcaacaaacagaagaaactactgaagcagctgaaatttgcagaatgcctagaaaaaaaggtggacatgagcaaagtaaatttggaggttataaagccttggataacaaaaagagtaacggaaatccttgggtttgaagatgatgttgtgattgagtttatattcaaccagctggaagtgaagaatccagactccaaaatgatgcaaatcaacctgactggatttttgaatggaaaaaatgctcgagaatttatgggagaactgtggcccctgctgctaagtgcacaagaaaacatcgcgggaatcccttctgctttcctagaactgaagaaagaagaaataaaacaaagacagattgaacaagaaaaactggcatctatgaaaaagcaagatgaagacaaagataaaagagataaggaagaaaaagaaagcagcagagaaaaaagggagcggtctcgtagcccaagaagacgcaaatccagatctccttcccctagaagacgatcttcccctgtcaggagagagagaaagcgcagtcattctcgatctccccgtcacagaaccaagagccggagtccttcccctgctccagaaaagaaggaaaaaactccagagctcccagaaccttcagtgaaagtaaaagaaccttcagtacaagaggctacttctactagtgacattctgaaagttcccaaacctgaacctataccagagcctaaagaaccttctccggaaaaaaattccaaaaaagaaaaggagaaggagaagacccgaccacgatctcggtcacgctccaaatcaagatcccggacgcggtcccgctctccttctcacactcgacctagacggcgccatagatcccgatcaagatcgtattcacctagaaggcggccaagcccaagaaggcggccatctcctcgaagaagaactccgccaagaagaatgcctcctccaccaaggcatagaaggagtagatctccagtaagacgaagaagacgttcgtcagcatccttgtctgggagtagctcatcatcctcttcatctcgttcacggtcaccaccaaagaagcctcccaagaggacatccagcccccctcggaaaactcgtaggttatctccttcagcaagtcctccaaggcgaaggcacaggccatcacctcctgcaactccaccacccaaaactcggcattcccctacaccccagcagtcaaaccgtacaagaaaaagtcgtgtttctgtgtctccagggagaacttcaggtaaagtgacaaaacataaaggtactgagaaaagagaatccccttcaccagcaccgaagcctagaaaagtagagttatctgaatcggaagaagataaaggtggcaaaatggctgcagcagattctgtgcagcagagacgccaatacagacgacaaaaccagcagtcttcatctgactctggctcctcctcctcctcagaagatgaacgacccaagagatcccatgtgaagaatggtgaggttggcaggcggcggagacattccccttcccggagtgcttctccatcaccacgaaagcgccaaaaagagacttcccctcggatgcagatgggaaagcgatggcaatcgccagtgactaaaagtggtagacggaggagaagtccatccccaccacccaccagaaggcgacggtctccttctcccgcccctcctcctcgacggcgcaggactcccacaccaccaccacgacgaaggactccttctcctcccccacgtcggcgctcaccttctcctagaagatactctcctccaatacagaggagatactctccttctccacctccaaagagaagaacggcttcacctcctccccctcctaaacgaagagcatcaccatctccaccaccaaagcggcgggtctcccattctccacctcccaaacaaagaagctccccagtcaccaagagacgttcaccttcattatcatccaagcataggaaagggtcttccccaagccgctctacccgggaggcccgatcaccacaaccaaacaaacggcattcgccctcaccacggcctcgagctcctcagacctcctcaagtcctccacccgttcgaagaggagcgtcgtcatcaccccaaagaaggcagtccccgtctccaagtactaggcccattaggagagtctccaggactccggaacctaaaaagataaaaaaggctgcttccccaagcccacagtctgtaagaagggtctcatcctcccgatctgtctccgggtctcctgagccagcagctaaaaagcccccagcacctccatcccccgtccagtctcagtcaccgtctacaaactggtcaccagctgtaccggtcaaaaaggccaaaagcccaacaccgagcccatcaccgccaagaaattcagatcaggaaggaggtggaaagaaaaagaagaaaaagaaggacaagaaacacaaaaaggataagaagcaccctgcagccattgcagctgccacaaccacattagcacaggaagagccagtggcagcgccagagccgaagaaggagactgaaagtgaagctgaagataaccttgatgatttagaaaagcacctgcgtgaaaaggccctgagatcaatgaggaaggcccaagtgtccccacagtcttagggggaaatgtttgttatgatgtaaattttatttggtttgtacgcagttcaatttcaaaattgctaaaatgtgtttgagctttagactataacatttgttgtaataattgctaggttgaagttcaacatgtaaaaaaagggggcatggatttacattgcaaaaggtgtccacagtgtattagtgacattctttcattgacagctgacataattcattgagtgaaatattttaagccaaaaaaaaattccctttttaaaaaagggggtttaaatactgttggcatttttatggttcctttaaatgccctagctattcccagaggggtttttttgtttgtttttttggttttgattttctttttgtttttctttcttcttcttatttttttcatttgagtcttagctcccatttaagttatgcttctgaccttgtatggtctgtaagcttgcccagaaataagaccactgttttgaactaccacaaaagtataaatgaatattttaatgccacaatctttcctgttgcctgtggagtctctgctgaaatgaatcaggattcgagctctaggatgagacagaaaatgaaagcatgttgtttgccaggacactgtgggtttatattgatgtgtaacaagttgatttggaacactggactctcattctgttattctggttttgttttttttgttttgttttttttcttttgtaaaggcaatgagctagtcccagaaaggatccttcagttacatacaatttgtttaatgaaatgtcatggctctgttcatatttttgtcttgttcttccaattggtatatacaactttcagagcctcttgtatttggaaggctggaagggcccagactttggaatagtgtcttggtttcactgtttttgttttgattttttttttgttttgattttttttaaactaaagctatataaagcttgtggattaaacagaataaatttctaaatttaaaaa

SEQ ID NO: 316119 - DNA, 3666 bp, Homo sapiens
cggcacgaggtttgtcctaaacccgtgtttgccttccatcatgctaacttcccacaatatgtaatggatgtgttgatggatcagcactttacagtaacggaaatccttgggtttgaagatgatgttgtgattgagtttatattcaaccagctggaagtgaagaatccagactccaaaatgatgcaaatcaacctgactggatttttgaatggaaaaaatgctcgagaatttatgggagaactgtggcccctgctgctaagtgcacaagaaaacatcgcgggaatcccttctgctttcctagaactgaagaaagaagaaataaaacaaagacagattgaacaagaaaaactggcatctatgaaaaagcaagatgaagacaaagataaaagagataaggaagaaaaagaaagcagcagagaaaaaagggagcggtctcgtagcccaagaagacgcaaatccagatctccttcccctagaagacgatcttcccctgtcaggagagagagaaagcgcagtcattctcgatctccccgtcacagaaccaagagccggagtccttcccctgctccagaaaagaaggaaaaaactccagagctcccagaaccttcagtgaaagtaaaagaaccttcagtacaagaggctacttctactagtgacattctgaaagttcccaaacctgaacctataccagagcctaaagaaccttctccggaaaaaaattccaaaaaagaaaaggagaaggagaagacccgaccacgatctcggtcacgctccaaatcaagatcccggacgcggtcccgctctccttctcacactcgacctagacggcgccatagatcccgatcaagatcgtattcacctagaaggcggccaagcccaagaaggcggccatctcctcgaagaagaactccgccaagaagaatgcctcctccaccaaggcatagaaggagtagatctccagtaagacgaagaagacgttcgtcagcatccttgtctgggagtagctcatcatcctcttcatctcgttcacggtcaccaccaaagaagcctcccaagaggacatccagcccccctcggaaaactcgtaggttatctccttcagcaagtcctccaaggcgaaggcacaggccatcacctcctgcaactccaccacccaaaactcggcattcccctacaccccagcagtcaaaccgtacaagaaaaagtcgtgtttctgtgtctccagggagaacttcaggtaaagtgacaaaacataaaggtactgagaaaagagaatccccttcaccagcaccgaagcctagaaaagtagagttatctgaatcggaagaagataaaggtggcaaaatggctgcagcagattctgtgcagcagagacgccaatacagacgacaaaaccagcagtcttcatctgactctggctcctcctcctcctcagaagatgaacgacccaagagatcccatgtgaagaatggtgaggttggcaggcggcggagacattccccttcccggagtgcttctccatcaccacgaaagcgccaaaaagagacttcccctcggatgcagatgggaaagcgatggcaatcgccagtgactaaaagtggtagacggaggagaagtccatccccaccacccaccagaaggcgacggtctccttctcccgcccctcctcctcgacggcgcaggactcccacaccaccaccacgacgaaggactccttctcctcccccacgtcggcgctcaccttctcctagaagatactctcctccaatacagaggagatactctccttctccacctccaaagagaagaacggcttcacctcctccccctcctaaacgaagagcatcaccatctccaccaccaaagcggcgggtctcccattctccacctcccaaacaaagaagctccccagtcaccaagagacgttcaccttcattatcatccaagcataggaaagggtcttccccaagccgctctacccgggaggcccgatcaccacaaccaaacaaacggcattcgccctcaccacggcctcgagctcctcagacctcctcaagtcctccacccgttcgaagaggagcgtcgtcatcaccccaaagaaggcagtccccgtctccaagtactaggcccattaggagagtctccaggactccggaacctaaaaagataaaaaaggctgcttccccaagcccacagtctgtaagaagggtctcatcctcccgatctgtctccgggtctcctgagccagcagctaaaaagcccccagcacctccatcccccgtccagtctcagtcaccgtctacaaactggtcaccagctgtaccggtcaaaaaggccaaaagcccaacaccgagcccatcaccgccaagaaattcagatcaggaaggaggtggaaagaaaaagaagaaaaagaaggacaagaaacacaaaaaggataagaagcacaagaagcacaaaaaacacaagaaggaaaaggctgtggctgcagctgctgcagctgctgtgacccctgcagccattgcagctgccacaaccacattagcacaggaagagccagtggcagcgccagagccgaagaaggagactgaaagtgaagctgaagataaccttgatgatttagaaaagcacctgcgtgaaaaggccctgagatcaatgaggaaggcccaagtgtccccacagtcttagggggaaatgtttgttatgatgtaaattttatttggtttgtacgcagttcaatttcaaaattgctaaaatgtgtttgagctttagactataacatttgttgtaataattgctaggttgaagttcaacatgtaaaaaaagggggcatggatttacattgcaaaaggtgtccacagtgtattagtgacattctttcattgacagctgacataattcattgagtgaaatattttaagccaaaaaaaaattccctttttaaaaaagggggtttaaatactgttggcatttttatggttcctttaaatgccctagctattcccagaggggtttttttgtttgtttttttggttttgattttctttttgtttttctttcttcttcttatttttttcatttgagtcttagctcccatttaagttatgcttctgaccttgtatggtctgtaagcttgcccagaaataagaccactgttttgaactaccacaaaagtataaatgaatattttaatgccacaatctttcctgttgcctgtggagtctctgctgaaatgaatcaggattcgagctctaggatgagacagaaaatgaaagcatgttgtttgccaggacactgtgggtttatattgatgtgtaacaagttgatttggaacactggactctcattctgttattctggttttgttttttttgttttgttttttttcttttgtaaaggcaatgagctagtcccagaaaggatccttcagttacatacaatttgtttaatgaaatgtcatggctctgttcatatttttgtcttgttcttccaattggtatatacaactttcagagcctcttgtatttggaaggctggaagggcccagactttggaatagtgtcttggtttcactgtttttgttttgattttttttttgttttgattttttttaaactaaagctatataaagcttgtggattaaacagaataaatttctaaatttaaaaa

SEQ ID NO: 316120 - DNA, 3788 bp, Homo sapiens
  misc_feature (48)..(48): n is a, c, g, or t
  misc_feature (65)..(65): n is a, c, g, or t
cggacgcgtgggtcgacccacgcgtccggttctagatcgcgagcggcnagatggacgcgggattnttccgcggaacaagtgcagaacaggataatcggttcagcaacaaacagaagaaactactgaagcagctgaaatttgcagaatgcctagaaaaaaaggtggacatgagcaaagtaaatttggaggttataaagccttggataacaaaaagagtaacggaaatccttgggtttgaagatgatgttgtgattgagtttatattcaaccagctggaagtgaagaatccagactccaaaatgatgcaaatcaacctgactggatttttgaatggaaaaaatgctcgagaatttatgggagaactgtggcccctgctgctaagtgcacaagaaaacatcgcgggaatcccttctgctttcctagaactgaagaaagaagaaataaaacaaagacagattgaacaagaaaaactggcatctatgaaaaagcaagatgaagacaaagataaaagagataaggaagaaaaagaaagcagcagagaaaaaagggagcggtctcgtagcccaagaagacgcaaatccagatctccttcccctagaagacgatcttcccctgtcaggagagagagaaagcgcagtcattctcgatctccccgtcacagaaccaagagccggagtccttcccctgctccagaaaagaaggaaaaaactccagagctcccagaaccttcagtgaaagtaaaagaaccttcagtacaagaggctacttctactagtgacattctgaaagttcccaaacctgaacctataccagagcctaaagaaccttctccggaaaaaaattccaaaaaagaaaaggagaaggagaagacccgaccacgatctcggtcacgctccaaatcaagatcccggacgcggtcccgctctccttctcacactcgacctagacggcgccatagatcccgatcaagatcgtattcacctagaaggcggccaagcccaagaaggcggccatctcctcgaagaagaactccgccaagaagaatgcctcctccaccaaggcatagaaggagtagatctccagtaagacgaagaagacgttcgtcagcatccttgtctgggagtagctcatcatcctcttcatctcgttcacggtcaccaccaaagaagcctcccaagaggacatccagcccccctcggaaaactcgtaggttatctccttcagcaagtcctccaaggcgaaggcacaggccatcacctcctgcaactccaccacccaaaactcggcattcccctacaccccagcagtcaaaccgtacaagaaaaagtcgtgtttctgtgtctccagggagaacttcaggtaaagtgacaaaacataaaggtactgagaaaagagaatccccttcaccagcaccgaagcctagaaaagtagagttatctgaatcggaagaagataaaggtggcaaaatggctgcagcagattctgtgcagcagagacgccaatacagacgacaaaaccagcagtcttcatctgactctggctcctcctcctcctcagaagatgaacgacccaagagatcccatgtgaagaatggtgaggttggcaggcggcggagacattccccttcccggagtgcttctccatcaccacgaaagcgccaaaaagagacttcccctcggatgcagatgggaaagcgatggcaatcgccagtgactaaaagtggtagacggaggagaagtccatccccaccacccaccagaaggcgacggtctccttctcccgcccctcctcctcgacggcgcaggactcccacaccaccaccacgacgaaggactccttctcctcccccacgtcggcgctcaccttctcctagaagatactctcctccaatacagaggagatactctccttctccacctccaaagagaagaacggcttcacctcctccccctcctaaacgaagagcatcaccatctccaccaccaaagcggcgggtctcccattctccacctcccaaacaaagaagctccccagtcaccaagagacgttcaccttcattatcatccaagcataggaaagggtcttccccaagccgctctacccgggaggcccgatcaccacaaccaaacaaacggcattcgccctcaccacggcctcgagctcctcagacctcctcaagtcctccacccgttcgaagaggagcgtcgtcatcaccccaaagaaggcagtccccgtctccaagtactaggcccattaggagagtctccaggactccggaacctaaaaagataaaaaaggctgcttccccaagcccacagtctgtaagaagggtctcatcctcccgatctgtctccgggtctcctgagccagcagctaaaaagcccccagcacctccatcccccgtccagtctcagtcaccgtctacaaactggtcaccagctgtaccggtcaaaaaggccaaaagcccaacaccgagcccatcaccgccaagaaattcagatcaggaaggaggtggaaagaaaaagaagaaaaagaaggacaagaaacacaaaaaggataagaagcacaagaagcacaaaaaacacaagaaggaaaaggctgtggctgcagctgctgcagctgctgtgacccctgcagccattgcagctgccacaaccacattagcacaggaagagccagtggcagcgccagagccgaagaaggagactgaaagtgaagctgaagataaccttgatgatttagaaaagcacctgcgtgaaaaggccctgagatcaatgaggaaggcccaagtgtccccacagtcttagggggaaatgtttgttatgatgtaaattttatttggtttgtacgcagttcaatttcaaaattgctaaaatgtgtttgagctttagactataacatttgttgtaataattgctaggttgaagttcaacatgtaaaaaaagggggcatggatttacattgcaaaaggtgtccacagtgtattagtgacattctttcattgacagctgacataattcattgagtgaaatattttaagccaaaaaaaaattccctttttaaaaaagggggtttaaatactgttggcatttttatggttcctttaaatgccctagctattcccagaggggtttttttgtttgtttttttggttttgattttctttttgtttttctttcttcttcttatttttttcatttgagtcttagctcccatttaagttatgcttctgaccttgtatggtctgtaagcttgcccagaaataagaccactgttttgaactaccacaaaagtataaatgaatattttaatgccacaatctttcctgttgcctgtggagtctctgctgaaatgaatcaggattcgagctctaggatgagacagaaaatgaaagcatgttgtttgccaggacactgtgggtttatattgatgtgtaacaagttgatttggaacactggactctcattctgttattctggttttgttttttttgttttgttttttttcttttgtaaaggcaatgagctagtcccagaaaggatccttcagttacatacaatttgtttaatgaaatgtcatggctctgttcatatttttgtcttgttcttccaattggtatatacaactttcagagcctcttgtatttggaaggctggaagggcccagactttggaatagtgtcttggtttcactgtttttgttttgattttttttttgttttgattttttttaaactaaagctatataaagcttgtggattaaacagaataaatttctaaatttaaaaa

SEQ ID NO: 316121 - DNA, 4095 bp, Homo sapiens
cggggagtttagggcctgacagaagcccgcccccgctggcgctcgtgcgcacgcgtggcgggctctcggcgcactgagcaggcgcggcctcgtgtcggccggagggggcgggcgcaacgacgcgcgctgcgtcccggcgctcggctttccctccgccggtcccgccctccgtcgcggcggcgcggtgtaccctgggatagggagcgatctccgagcgaggcggcaagatggacgcgggatttttccgcggaacaagtgcagaacaggataatcggttcagcaacaaacagaagaaactactgaagcagctgaaatttgcagaatgcctagaaaaaaaggtggacatgagcaaagtaaatttggaggttataaagccttggataacaaaaagagtaacggaaatccttgggtttgaagatgatgttgtgattgagtttatattcaaccagctggaagtgaaggcctgaaccaaaatggaagttattccttgcgtctgaagtatagcaccatcaccttattaggtcacagcagagtgagtgtcccaatgtcgctctgacccaactcccttgatgatgcagtgtgtgtttggagaatccagactccaaaatgatgcaaatcaacctgactggatttttgaatggaaaaaatgctcgagaatttatgggagaactgtggcccctgctgctaagtgcacaagaaaacatcgcgggaatcccttctgctttcctagaactgaagaaagaagaaataaaacaaagacagattgaacaagaaaaactggcatctatgaaaaagcaagatgaagacaaagataaaagagataaggaagaaaaagaaagcagcagagaaaaaagggagcggtctcgtagcccaagaagacgcaaatccagatctccttcccctagaagacgatcttcccctgtcaggagagagagaaagcgcagtcattctcgatctccccgtcacagaaccaagagccggagtccttcccctgctccagaaaagaaggaaaaaactccagagctcccagaaccttcagtgaaagtaaaagaaccttcagtacaagaggctacttctactagtgacattctgaaagttcccaaacctgaacctataccagagcctaaagaaccttctccggaaaaaaattccaaaaaagaaaaggagaaggagaagacccgaccacgatctcggtcacgctccaaatcaagatcccggacgcggtcccgctctccttctcacactcgacctagacggcgccatagatcccgatcaagatcgtattcacctagaaggcggccaagcccaagaaggcggccatctcctcgaagaagaactccgccaagaagaatgcctcctccaccaaggcatagaaggagtagatctccagtaagacgaagaagacgttcgtcagcatccttgtctgggagtagctcatcatcctcttcatctcgttcacggtcaccaccaaagaagcctcccaagaggacatccagcccccctcggaaaactcgtaggttatctccttcagcaagtcctccaaggcgaaggcacaggccatcacctcctgcaactccaccacccaaaactcggcattcccctacaccccagcagtcaaaccgtacaagaaaaagtcgtgtttctgtgtctccagggagaacttcaggtaaagtgacaaaacataaaggtactgagaaaagagaatccccttcaccagcaccgaagcctagaaaagtagagttatctgaatcggaagaagataaaggtggcaaaatggctgcagcagattctgtgcagcagagacgccaatacagacgacaaaaccagcagtcttcatctgactctggctcctcctcctcctcagaagatgaacgacccaagagatcccatgtgaagaatggtgaggttggcaggcggcggagacattccccttcccggagtgcttctccatcaccacgaaagcgccaaaaagagacttcccctcggatgcagatgggaaagcgatggcaatcgccagtgactaaaagtggtagacggaggagaagtccatccccaccacccaccagaaggcgacggtctccttctcccgcccctcctcctcgacggcgcaggactcccacaccaccaccacgacgaaggactccttctcctcccccacgtcggcgctcaccttctcctagaagatactctcctccaatacagaggagatactctccttctccacctccaaagagaagaacggcttcacctcctccccctcctaaacgaagagcatcaccatctccaccaccaaagcggcgggtctcccattctccacctcccaaacaaagaagctccccagtcaccaagagacgttcaccttcattatcatccaagcataggaaagggtcttccccaagccgctctacccgggaggcccgatcaccacaaccaaacaaacggcattcgccctcaccacggcctcgagctcctcagacctcctcaagtcctccacccgttcgaagaggagcgtcgtcatcaccccaaagaaggcagtccccgtctccaagtactaggcccattaggagagtctccaggactccggaacctaaaaagataaaaaaggctgcttccccaagcccacagtctgtaagaagggtctcatcctcccgatctgtctccgggtctcctgagccagcagctaaaaagcccccagcacctccatcccccgtccagtctcagtcaccgtctacaaactggtcaccagctgtaccggtcaaaaaggccaaaagcccaacaccgagcccatcaccgccaagaaattcagatcaggaaggaggtggaaagaaaaagaagaaaaagaaggacaagaaacacaaaaaggataagaagcacaagaagcacaaaaaacacaagaaggaaaaggctgtggctgcagctgctgcagctgctgtgacccctgcagccattgcagctgccacaaccacattagcacaggaagagccagtggcagcgccagagccgaagaaggagactgaaagtgaagctgaagataaccttgatgatttagaaaagcacctgcgtgaaaaggccctgagatcaatgaggaaggcccaagtgtccccacagtcttagggggaaatgtttgttatgatgtaaattttatttggtttgtacgcagttcaatttcaaaattgctaaaatgtgtttgagctttagactataacatttgttgtaataattgctaggttgaagttcaacatgtaaaaaaagggggcatggatttacattgcaaaaggtgtccacagtgtattagtgacattctttcattgacagctgacataattcattgagtgaaatattttaagccaaaaaaaaattccctttttaaaaaagggggtttaaatactgttggcatttttatggttcctttaaatgccctagctattcccagaggggtttttttgtttgtttttttggttttgattttctttttgtttttctttcttcttcttatttttttcatttgagtcttagctcccatttaagttatgcttctgaccttgtatggtctgtaagcttgcccagaaataagaccactgttttgaactaccacaaaagtataaatgaatattttaatgccacaatctttcctgttgcctgtggagtctctgctgaaatgaatcaggattcgagctctaggatgagacagaaaatgaaagcatgttgtttgccaggacactgtgggtttatattgatgtgtaacaagttgatttggaacactggactctcattctgttattctggttttgttttttttgttttgttttttttcttttgtaaaggcaatgagctagtcccagaaaggatccttcagttacatacaatttgtttaatgaaatgtcatggctctgttcatatttttgtcttgttcttccaattggtatatacaactttcagagcctcttgtatttggaaggctggaagggcccagactttggaatagtgtcttggtttcactgtttttgttttgattttttttttgttttgattttttttaaactaaagctatataaagcttgtggattaaacagaataaatttctaaatttaaaaa

SEQ ID NO: 316122 - DNA, 3781 bp, Homo sapiens
gaaaaatcccgcgtccatcttgccgcctcgctcggagatcgctccctatcccagggtacaccgcggaacaagtgcagaacaggataatcggttcagcaacaaacagaagaaactactgaagcagctgaaatttgcagaatgcctagaaaaaaaggtggacatgagcaaagtaaatttggaggttataaagccttggataacaaaaagagtaacggaaatccttgggtttgaagatgatgttgtgattgagtttatattcaaccagctggaagtgaagaatccagactccaaaatgatgcaaatcaacctgactggatttttgaatggaaaaaatgctcgagaatttatgggagaactgtggcccctgctgctaagtgcacaagaaaacatcgcgggaatcccttctgctttcctagaactgaagaaagaagaaataaaacaaagacagattgaacaagaaaaactggcatctatgaaaaagcaagatgaagacaaagataaaagagataaggaagaaaaagaaagcagcagagaaaaaagggagcggtctcgtagcccaagaagacgcaaatccagatctccttcccctagaagacgatcttcccctgtcaggagagagagaaagcgcagtcattctcgatctccccgtcacagaaccaagagccggagtccttcccctgctccagaaaagaaggaaaaaactccagagctcccagaaccttcagtgaaagtaaaagaaccttcagtacaagaggctacttctactagtgacattctgaaagttcccaaacctgaacctataccagagcctaaagaaccttctccggaaaaaaattccaaaaaagaaaaggagaaggagaagacccgaccacgatctcggtcacgctccaaatcaagatcccggacgcggtcccgctctccttctcacactcgacctagacggcgccatagatcccgatcaagatcgtattcacctagaaggcggccaagcccaagaaggcggccatctcctcgaagaagaactccgccaagaagaatgcctcctccaccaaggcatagaaggagtagatctccagtaagacgaagaagacgttcgtcagcatccttgtctgggagtagctcatcatcctcttcatctcgttcacggtcaccaccaaagaagcctcccaagaggacatccagcccccctcggaaaactcgtaggttatctccttcagcaagtcctccaaggcgaaggcacaggccatcacctcctgcaactccaccacccaaaactcggcattcccctacaccccagcagtcaaaccgtacaagaaaaagtcgtgtttctgtgtctccagggagaacttcaggtaaagtgacaaaacataaaggtactgagaaaagagaatccccttcaccagcaccgaagcctagaaaagtagagttatctgaatcggaagaagataaaggtggcaaaatggctgcagcagattctgtgcagcagagacgccaatacagacgacaaaaccagcagtcttcatctgactctggctcctcctcctcctcagaagatgaacgacccaagagatcccatgtgaagaatggtgaggttggcaggcggcggagacattccccttcccggagtgcttctccatcaccacgaaagcgccaaaaagagacttcccctcggatgcagatgggaaagcgatggcaatcgccagtgactaaaagtggtagacggaggagaagtccatccccaccacccaccagaaggcgacggtctccttctcccgcccctcctcctcgacggcgcaggactcccacaccaccaccacgacgaaggactccttctcctcccccacgtcggcgctcaccttctcctagaagatactctcctccaatacagaggagatactctccttctccacctccaaagagaagaacggcttcacctcctccccctcctaaacgaagagcatcaccatctccaccaccaaagcggcgggtctcccattctccacctcccaaacaaagaagctccccagtcaccaagagacgttcaccttcattatcatccaagcataggaaagggtcttccccaagccgctctacccgggaggcccgatcaccacaaccaaacaaacggcattcgccctcaccacggcctcgagctcctcagacctcctcaagtcctccacccgttcgaagaggagcgtcgtcatcaccccaaagaaggcagtccccgtctccaagtactaggcccattaggagagtctccaggactccggaacctaaaaagataaaaaaggctgcttccccaagcccacagtctgtaagaagggtctcatcctcccgatctgtctccgggtctcctgagccagcagctaaaaagcccccagcacctccatcccccgtccagtctcagtcaccgtctacaaactggtcaccagctgtaccggtcaaaaaggccaaaagcccaacaccgagcccatcaccgccaagaaattcagatcaggaaggaggtggaaagaaaaagaagaaaaagaaggacaagaaacacaaaaaggataagaagcacaagaagcacaaaaaacacaagaaggaaaaggctgtggctgcagctgctgcagctgctgtgacccctgcagccattgcagctgccacaaccacattagcacaggaagagccagtggcagcgccagagccgaagaaggagactgaaagtgaagctgaagataaccttgatgatttagaaaagcacctgcgtgaaaaggccctgagatcaatgaggaaggcccaagtgtccccacagtcttagggggaaatgtttgttatgatgtaaattttatttggtttgtacgcagttcaatttcaaaattgctaaaatgtgtttgagctttagactataacatttgttgtaataattgctaggttgaagttcaacatgtaaaaaaagggggcatggatttacattgcaaaaggtgtccacagtgtattagtgacattctttcattgacagctgacataattcattgagtgaaatattttaagccaaaaaaaaattccctttttaaaaaagggggtttaaatactgttggcatttttatggttcctttaaatgccctagctattcccagaggggtttttttgtttgtttttttggttttgattttctttttgtttttctttcttcttcttatttttttcatttgagtcttagctcccatttaagttatgcttctgaccttgtatggtctgtaagcttgcccagaaataagaccactgttttgaactaccacaaaagtataaatgaatattttaatgccacaatctttcctgttgcctgtggagtctctgctgaaatgaatcaggattcgagctctaggatgagacagaaaatgaaagcatgttgtttgccaggacactgtgggtttatattgatgtgtaacaagttgatttggaacactggactctcattctgttattctggttttgttttttttgttttgttttttttcttttgtaaaggcaatgagctagtcccagaaaggatccttcagttacatacaatttgtttaatgaaatgtcatggctctgttcatatttttgtcttgttcttccaattggtatatacaactttcagagcctcttgtatttggaaggctggaagggcccagactttggaatagtgtcttggtttcactgtttttgttttgattttttttttgttttgattttttttaaactaaagctatataaagcttgtggattaaacagaataaatttctaaatttaaaaa

SEQ ID NO: 316123 - DNA, 3907 bp, Homo sapiens
cggggagtttagggcctgacagaagcccgcccccgctggcgctcgtgcgcacgcgtggcgggctctcggcgcactgagcaggcgcggcctcgtgtcggccggagggggcgggcgcaacgacgcgcgctgcgtcccggcgctcggctttccctccgccggtcccgccctccgtcgcggcggcgcggtgtaccctgggatagggagcgatctccgagcgaggcggcaagatggacgcgggatttttccgcggaacaagtgcagaacaggataatcggttcagcaacaaacagaagaaactactgaagcagctgaaatttgcagaatgcctagaaaaaaaggtggacatgagcaaagtaaatttggaggttataaagccttggataacaaaaagagtaacggaaatccttgggtttgaagatgatgttgtgattgagtttatattcaaccagctggaagtgaagaatccagactccaaaatgatgcaaatcaacctgactggatttttgaatggaaaaaatgctcgagaatttatgggagaactgtggcccctgctgctaagtgcacaagaaaacatcgcgggaatcccttctgctttcctagaactgaagaaagaagaaataaaacaaagacagattgaacaagaaaaactggcatctatgaaaaagcaagatgaagacaaagataaaagagataaggaagaaaaagaaagcagcagagaaaaaagggagcggtctcgtagcccaagaagacgcaaatccagatctccttcccctagaagacgatcttcccctgtcaggagagagagaaagcgcagtcattctcgatctccccgtcacagaaccaagagccggagtccttcccctgctccagaaaagaaggaaaaaactccagagctcccagaaccttcagtgaaagtaaaagaaccttcagtacaagaggctacttctactagtgacattctgaaagttcccaaacctgaacctataccagagcctaaagaaccttctccggaaaaaaattccaaaaaagaaaaggagaaggagaagacccgaccacgatctcggtcacgctccaaatcaagatcccggacgcggtcccgctctccttctcacactcgacctagacggcgccatagatcccgatcaagatcgtattcacctagaaggcggccaagcccaagaaggcggccatctcctcgaagaagaactccgccaagaagaatgcctcctccaccaaggcatagaaggagtagatctccagtaagacgaagaagacgttcgtcagcatccttgtctgggagtagctcatcatcctcttcatctcgttcacggtcaccaccaaagaagcctcccaagaggacatccagcccccctcggaaaactcgtaggttatctccttcagcaagtcctccaaggcgaaggcacaggccatcacctcctgcaactccaccacccaaaactcggcattcccctacaccccagcagtcaaaccgtacaagaaaaagtcgtgtttctgtgtctccagggagaacttcaggtaaagtgacaaaacataaaggtactgagaaaagagaatccccttcaccagcaccgaagcctagaaaagtagagttatctgaatcggaagaagataaaggtggcaaaatggctgcagcagattctgtgcagcagagacgccaatacagacgacaaaaccagcagtcttcatctgactctggctcctcctcctcctcagaagatgaacgacccaagagatcccatgtgaagaatggtgaggttggcaggcggcggagacattccccttcccggagtgcttctccatcaccacgaaagcgccaaaaagagacttcccctcggatgcagatgggaaagcgatggcaatcgccagtgactaaaagtggtagacggaggagaagtccatccccaccacccaccagaaggcgacggtctccttctcccgcccctcctcctcgacggcgcaggactcccacaccaccaccacgacgaaggactccttctcctcccccacgtcggcgctcaccttctcctagaagatactctcctccaatacagaggagatactctccttctccacctccaaagagaagaacggcttcacctcctccccctcctaaacgaagagcatcaccatctccaccaccaaagcggcgggtctcccattctccacctcccaaacaaagaagctccccagtcaccaagagacgttcaccttcattatcatccaagcataggaaagggtcttccccaagccgctctacccgggaggcccgatcaccacaaccaaacaaacggcattcgccctcaccacggcctcgagctcctcagacctcctcaagtcctccacccgttcgaagaggagcgtcgtcatcaccccaaagaaggcagtccccgtctccaagtactaggcccattaggagagtctccaggactccggaacctaaaaagataaaaaaggctgcttccccaagcccacagtctgtaagaagggtctcatcctcccgatctgtctccgggtctcctgagccagcagctaaaaagcccccagcacctccatcccccgtccagtctcagtcaccgtctacaaactggtcaccagctgtaccggtcaaaaaggccaaaagcccaacaccgagcccatcaccgccaagaaattcagatcaggaaggaggtggaaagaaaaagaagaaaaagaaggacaagaaacacaaaaaggataagaagcacaagaagcacaaaaaacacaagaaggaaaaggctgtggctgcagctgctgcagctgctgtgacccctgcagccattgcagctgccacaaccacattagcacaggaagagccagtggcagcgccagagccgaagaaggagactgaaagtgaagctgaagataaccttgatgatttagaaaagcacctgcgtgaaaaggccctgagatcaatgaggaaggcccaagtgtccccacagtcttagggggaaatgtttgttatgatgtaaattttatttggtttgtacgcagttcaatttcaaaattgctaaaatgtgtttgagctttagactataacatttgttgtaataattgctaggttgaagttcaacatgtaaaaaaagggggcatggatttacattgcaaaaggtgtccacagtgtattagtgacattctttcattgacagctgacataattcattgagtgaaatattttaagccaaaaaaaaattccctttttaaaaaagggggtttaaatactgttggcatttttatggttcctttaaatgccctagctattcccagaggggtttttttgtttgtttttttggttttgattttctttttgtttttctttcttcttcttatttttttcatttgagtcttagctcccatttaagttatgcttctgaccttgtatggtctgtaagcttgcccagaaataagaccactgttttgaactaccacaaaagtataaatgaatattttaatgccacaatctttcctgttgcctgtggagtctctgctgaaatgaatcaggattcgagctctaggatgagacagaaaatgaaagcatgttgtttgccaggacactgtgggtttatattgattttgttttgttttttttcttttgtaaaggcaatgagctagtcccagaaaggatccttcagttacatacaatttgtttaatgaaatgtcatggctctgttcatatttttgtcttgttcttccaattggtatatacaactttcagagcctcttgtatttggaaggctggaagggcccagactttggaatagtgtcttggtttcactgtttttgttttgattttttttttgttttgattttttttaaactaaagctatataaagcttgtggattaaacagaataaatttctaaatttaaaaa

SEQ ID NO: 316124 - DNA, 3533 bp, Homo sapiens
ggagaagaccctatgaagaacagcagatggaattatagaggtatttgccctagagaaaaggcaagtccacggagtcatgattcctgttctcaaatagtctgaagacgtcacagggcagagggagcacagactgtgaagtctctgacagcagagctggtcccaacagggagggaagaagaagaagaatttccaggaggcagattgaacaagaaaaactggcatctatgaaaaagcaagatgaagacaaagataaaagagataaggaagaaaaagaaagcagcagagaaaaaagggagcggtctcgtagcccaagaagacgcaaatccagatctccttcccctagaagacgatcttcccctgtcaggagagagagaaagcgcagtcattctcgatctccccgtcacagaaccaagagccggagtccttcccctgctccagaaaagaaggaaaaaactccagagctcccagaaccttcagtgaaagtaaaagaaccttcagtacaagaggctacttctactagtgacattctgaaagttcccaaacctgaacctataccagagcctaaagaaccttctccggaaaaaaattccaaaaaagaaaaggagaaggagaagacccgaccacgatctcggtcacgctccaaatcaagatcccggacgcggtcccgctctccttctcacactcgacctagacggcgccatagatcccgatcaagatcgtattcacctagaaggcggccaagcccaagaaggcggccatctcctcgaagaagaactccgccaagaagaatgcctcctccaccaaggcatagaaggagtagatctccagtaagacgaagaagacgttcgtcagcatccttgtctgggagtagctcatcatcctcttcatctcgttcacggtcaccaccaaagaagcctcccaagaggacatccagcccccctcggaaaactcgtaggttatctccttcagcaagtcctccaaggcgaaggcacaggccatcacctcctgcaactccaccacccaaaactcggcattcccctacaccccagcagtcaaaccgtacaagaaaaagtcgtgtttctgtgtctccagggagaacttcaggtaaagtgacaaaacataaaggtactgagaaaagagaatccccttcaccagcaccgaagcctagaaaagtagagttatctgaatcggaagaagataaaggtggcaaaatggctgcagcagattctgtgcagcagagacgccaatacagacgacaaaaccagcagtcttcatctgactctggctcctcctcctcctcagaagatgaacgacccaagagatcccatgtgaagaatggtgaggttggcaggcggcggagacattccccttcccggagtgcttctccatcaccacgaaagcgccaaaaagagacttcccctcggatgcagatgggaaagcgatggcaatcgccagtgactaaaagtggtagacggaggagaagtccatccccaccacccaccagaaggcgacggtctccttctcccgcccctcctcctcgacggcgcaggactcccacaccaccaccacgacgaaggactccttctcctcccccacgtcggcgctcaccttctcctagaagatactctcctccaatacagaggagatactctccttctccacctccaaagagaagaacggcttcacctcctccccctcctaaacgaagagcatcaccatctccaccaccaaagcggcgggtctcccattctccacctcccaaacaaagaagctccccagtcaccaagagacgttcaccttcattatcatccaagcataggaaagggtcttccccaagccgctctacccgggaggcccgatcaccacaaccaaacaaacggcattcgccctcaccacggcctcgagctcctcagacctcctcaagtcctccacccgttcgaagaggagcgtcgtcatcaccccaaagaaggcagtccccgtctccaagtactaggcccattaggagagtctccaggactccggaacctaaaaagataaaaaaggctgcttccccaagcccacagtctgtaagaagggtctcatcctcccgatctgtctccgggtctcctgagccagcagctaaaaagcccccagcacctccatcccccgtccagtctcagtcaccgtctacaaactggtcaccagctgtaccggtcaaaaaggccaaaagcccaacaccgagcccatcaccgccaagaaattcagatcaggaaggaggtggaaagaaaaagaagaaaaagaaggacaagaaacacaaaaaggataagaagcacaagaagcacaaaaaacacaagaaggaaaaggctgtggctgcagctgctgcagctgctgtgacccctgcagccattgcagctgccacaaccacattagcacaggaagagccagtggcagcgccagagccgaagaaggagactgaaagtgaagctgaagataaccttgatgatttagaaaagcacctgcgtgaaaaggccctgagatcaatgaggaaggcccaagtgtccccacagtcttagggggaaatgtttgttatgatgtaaattttatttggtttgtacgcagttcaatttcaaaattgctaaaatgtgtttgagctttagactataacatttgttgtaataattgctaggttgaagttcaacatgtaaaaaaagggggcatggatttacattgcaaaaggtgtccacagtgtattagtgacattctttcattgacagctgacataattcattgagtgaaatattttaagccaaaaaaaaattccctttttaaaaaagggggtttaaatactgttggcatttttatggttcctttaaatgccctagctattcccagaggggtttttttgtttgtttttttggttttgattttctttttgtttttctttcttcttcttatttttttcatttgagtcttagctcccatttaagttatgcttctgaccttgtatggtctgtaagcttgcccagaaataagaccactgttttgaactaccacaaaagtataaatgaatattttaatgccacaatctttcctgttgcctgtggagtctctgctgaaatgaatcaggattcgagctctaggatgagacagaaaatgaaagcatgttgtttgccaggacactgtgggtttatattgatgtgtaacaagttgatttggaacactggactctcattctgttattctggttttgttttttttgttttgttttttttcttttgtaaaggcaatgagctagtcccagaaaggatccttcagttacatacaatttgtttaatgaaatgtcatggctctgttcatatttttgtcttgttcttccaattggtatatacaactttcagagcctcttgtatttggaaggctggaagggcccagactttggaatagtgtcttggtttcactgtttttgttttgattttttttttgttttgattttttttaaactaaagctatataaagcttgtggattaaacagaataaatttctaaatttaaaaa

SEQ ID NO: 316125 - DNA, 3875 bp, Homo sapiens
cggggagtttagggcctgacagaagcccgcccccgctggcgctcgtgcgcacgcgtggcgggctctcggcgcactgagcaggcgcggcctcgtgtcggccggagggggcgggcgcaacgacgcgcgctgcgtcccggcgctcggctttccctccgccggtcccgccctccgtcgcggcggcgcggtgtaccctgggatagggagcgatctccgagcgaggcggcaagatggacgcgggatttttccgcggaacaagtgcagaacaggataatcggttcagcaacaaacagaagaaactactgaagcagctgaaatttgcagaatgcctagaaaaaaaggtggacatgagcaaagtaaatttggaggttataaagccttggataacaaaaagagtaacggaaatccttgggtttgaagatgatgttgtgattgagtttatattcaaccagctggaagtgaagaatccagactccaaaatgatgcaaatcaacctgactggatttttgaatggaaaaaatgctcgagaatttatgggagaactgtggcccctgctgctaagtgcacaagaaaacatcgcgggaatcccttctgctttcctagaactgaagaaagaagaaataaaacaaagacagattgaacaagaaaaactggcatctatgaaaaagcaagatgaagacaaagataaaagagataaggaagaaaaagaaagcagcagagaaaaaagggagcggtctcgtagcccaagaagaaccaagagccggagtccttcccctgctccagaaaagaaggaaaaaactccagagctcccagaaccttcagtgaaagtaaaagaaccttcagtacaagaggctacttctactagtgacattctgaaagttcccaaacctgaacctataccagagcctaaagaaccttctccggaaaaaaattccaaaaaagaaaaggagaaggagaagacccgaccacgatctcggtcacgctccaaatcaagatcccggacgcggtcccgctctccttctcacactcgacctagacggcgccatagatcccgatcaagatcgtattcacctagaaggcggccaagcccaagaaggcggccatctcctcgaagaagaactccgccaagaagaatgcctcctccaccaaggcatagaaggagtagatctccagtaagacgaagaagacgttcgtcagcatccttgtctgggagtagctcatcatcctcttcatctcgttcacggtcaccaccaaagaagcctcccaagaggacatccagcccccctcggaaaactcgtaggttatctccttcagcaagtcctccaaggcgaaggcacaggccatcacctcctgcaactccaccacccaaaactcggcattcccctacaccccagcagtcaaaccgtacaagaaaaagtcgtgtttctgtgtctccagggagaacttcaggtaaagtgacaaaacataaaggtactgagaaaagagaatccccttcaccagcaccgaagcctagaaaagtagagttatctgaatcggaagaagataaaggtggcaaaatggctgcagcagattctgtgcagcagagacgccaatacagacgacaaaaccagcagtcttcatctgactctggctcctcctcctcctcagaagatgaacgacccaagagatcccatgtgaagaatggtgaggttggcaggcggcggagacattccccttcccggagtgcttctccatcaccacgaaagcgccaaaaagagacttcccctcggatgcagatgggaaagcgatggcaatcgccagtgactaaaagtggtagacggaggagaagtccatccccaccacccaccagaaggcgacggtctccttctcccgcccctcctcctcgacggcgcaggactcccacaccaccaccacgacgaaggactccttctcctcccccacgtcggcgctcaccttctcctagaagatactctcctccaatacagaggagatactctccttctccacctccaaagagaagaacggcttcacctcctccccctcctaaacgaagagcatcaccatctccaccaccaaagcggcgggtctcccattctccacctcccaaacaaagaagctccccagtcaccaagagacgttcaccttcattatcatccaagcataggaaagggtcttccccaagccgctctacccgggaggcccgatcaccacaaccaaacaaacggcattcgccctcaccacggcctcgagctcctcagacctcctcaagtcctccacccgttcgaagaggagcgtcgtcatcaccccaaagaaggcagtccccgtctccaagtactaggcccattaggagagtctccaggactccggaacctaaaaagataaaaaaggctgcttccccaagcccacagtctgtaagaagggtctcatcctcccgatctgtctccgggtctcctgagccagcagctaaaaagcccccagcacctccatcccccgtccagtctcagtcaccgtctacaaactggtcaccagctgtaccggtcaaaaaggccaaaagcccaacaccgagcccatcaccgccaagaaattcagatcaggaaggaggtggaaagaaaaagaagaaaaagaaggacaagaaacacaaaaaggataagaagcacaagaagcacaaaaaacacaagaaggaaaaggctgtggctgcagctgctgcagctgctgtgacccctgcagccattgcagctgccacaaccacattagcacaggaagagccagtggcagcgccagagccgaagaaggagactgaaagtgaagctgaagataaccttgatgatttagaaaagcacctgcgtgaaaaggccctgagatcaatgaggaaggcccaagtgtccccacagtcttagggggaaatgtttgttatgatgtaaattttatttggtttgtacgcagttcaatttcaaaattgctaaaatgtgtttgagctttagactataacatttgttgtaataattgctaggttgaagttcaacatgtaaaaaaagggggcatggatttacattgcaaaaggtgtccacagtgtattagtgacattctttcattgacagctgacataattcattgagtgaaatattttaagccaaaaaaaaattccctttttaaaaaagggggtttaaatactgttggcatttttatggttcctttaaatgccctagctattcccagaggggtttttttgtttgtttttttggttttgattttctttttgtttttctttcttcttcttatttttttcatttgagtcttagctcccatttaagttatgcttctgaccttgtatggtctgtaagcttgcccagaaataagaccactgttttgaactaccacaaaagtataaatgaatattttaatgccacaatctttcctgttgcctgtggagtctctgctgaaatgaatcaggattcgagctctaggatgagacagaaaatgaaagcatgttgtttgccaggacactgtgggtttatattgatgtgtaacaagttgatttggaacactggactctcattctgttattctggttttgttttttttgttttgttttttttcttttgtaaaggcaatgagctagtcccagaaaggatccttcagttacatacaatttgtttaatgaaatgtcatggctctgttcatatttttgtcttgttcttccaattggtatatacaactttcagagcctcttgtatttggaaggctggaagggcccagactttggaatagtgtcttggtttcactgtttttgttttgattttttttttgttttgattttttttaaactaaagctatataaagcttgtggattaaacagaataaatttctaaatttaaaaa

SEQ ID NO: 316126 - DNA, 4427 bp, Homo sapiens
agatagattttattggagaaatgctttactgatgtgtattttagtgcattttaaaaacctaagtatctggtagtattccccttgtagtgagcatgagattaaagtttagaactttttaagacaattctttttttgtggttgtgtactcattattgcttgttcgtcttttgcaatttagataaatgatataacattaaactcaaggtggttgagttgcagtagggagtcggaagcaagccaagggaacatctttctctacaggggacttggcgattccaaacccccaaggttccaagaagaaactgaagacacctggaatctgtacttgctttgtgctattgagctgtgcttgttatacagaccttgttgcttgaccaacggatttagcatttaaaaacccaattatttttgagaaatcttgacctcttagcactttgtggacagttgagaatttgaggcattgttataatagattttccttatataaaactcaggcctttagcttagccctcagaagttacagactgcatgcataacttgttagttttcataactggacaatagatattttatgcaaagctatctgtagtgttagggagcagtttatgtactttttccgtttctcattgggggaaaatttccaggcaagcaaatacttttcttgttagtaaatactagaatttgtggatgtttcatgatggtttttaaagttaataaatgtaaggcccactaacagccacagagtctaaaaatacttacgaaatccacaaaggattaacaggctgctctgatgcttttggtagagtgagagagaatttggtaatctgttagagattatattgctgagaagctactagggaagactatttgtaaaatagtaaggactatatatatgtctaagcccctatggtagacttaaaaaatactaatttaaatgagttttaggttggttgatttgttggttggttggttttgaagtaacctgtttttcttcctgtcgtgtctttttgcagaatccagactccaaaatgatgcaaatcaacctgactggatttttgaatggaaaaaatgctcgagaatttatgggagaactgtggcccctgctgctaagtgcacaagaaaacatcgcgggaatcccttctgctttcctagaactgaagaaagaagaaataaaacaaagacagattgaacaagaaaaactggcatctatgaaaaagcaagatgaagacaaagataaaagagataaggaagaaaaagaaagcagcagagaaaaaagggagcggtctcgtagcccaagaagaaccaagagccggagtccttcccctgctccagaaaagaaggaaaaaactccagagctcccagaaccttcagtgaaagtaaaagaaccttcagtacaagaggctacttctactagtgacattctgaaagttcccaaacctgaacctataccagagcctaaagaaccttctccggaaaaaaattccaaaaaagaaaaggagaaggagaagacccgaccacgatctcggtcacgctccaaatcaagatcccggacgcggtcccgctctccttctcacactcgacctagacggcgccatagatcccgatcaagatcgtattcacctagaaggcggccaagcccaagaaggcggccatctcctcgaagaagaactccgccaagaagaatgcctcctccaccaaggcatagaaggagtagatctccagtaagacgaagaagacgttcgtcagcatccttgtctgggagtagctcatcatcctcttcatctcgttcacggtcaccaccaaagaagcctcccaagaggacatccagcccccctcggaaaactcgtaggttatctccttcagcaagtcctccaaggcgaaggcacaggccatcacctcctgcaactccaccacccaaaactcggcattcccctacaccccagcagtcaaaccgtacaagaaaaagtcgtgtttctgtgtctccagggagaacttcaggtaaagtgacaaaacataaaggtactgagaaaagagaatccccttcaccagcaccgaagcctagaaaagtagagttatctgaatcggaagaagataaaggtggcaaaatggctgcagcagattctgtgcagcagagacgccaatacagacgacaaaaccagcagtcttcatctgactctggctcctcctcctcctcagaagatgaacgacccaagagatcccatgtgaagaatggtgaggttggcaggcggcggagacattccccttcccggagtgcttctccatcaccacgaaagcgccaaaaagagacttcccctcggatgcagatgggaaagcgatggcaatcgccagtgactaaaagtggtagacggaggagaagtccatccccaccacccaccagaaggcgacggtctccttctcccgcccctcctcctcgacggcgcaggactcccacaccaccaccacgacgaaggactccttctcctcccccacgtcggcgctcaccttctcctagaagatactctcctccaatacagaggagatactctccttctccacctccaaagagaagaacggcttcacctcctccccctcctaaacgaagagcatcaccatctccaccaccaaagcggcgggtctcccattctccacctcccaaacaaagaagctccccagtcaccaagagacgttcaccttcattatcatccaagcataggaaagggtcttccccaagccgctctacccgggaggcccgatcaccacaaccaaacaaacggcattcgccctcaccacggcctcgagctcctcagacctcctcaagtcctccacccgttcgaagaggagcgtcgtcatcaccccaaagaaggcagtccccgtctccaagtactaggcccattaggagagtctccaggactccggaacctaaaaagataaaaaaggctgcttccccaagcccacagtctgtaagaagggtctcatcctcccgatctgtctccgggtctcctgagccagcagctaaaaagcccccagcacctccatcccccgtccagtctcagtcaccgtctacaaactggtcaccagctgtaccggtcaaaaaggccaaaagcccaacaccgagcccatcaccgccaagaaattcagatcaggaaggaggtggaaagaaaaagaagaaaaagaaggacaagaaacacaaaaaggataagaagcacaagaagcacaaaaaacacaagaaggaaaaggctgtggctgcagctgctgcagctgctgtgacccctgcagccattgcagctgccacaaccacattagcacaggaagagccagtggcagcgccagagccgaagaaggagactgaaagtgaagctgaagataaccttgatgatttagaaaagcacctgcgtgaaaaggccctgagatcaatgaggaaggcccaagtgtccccacagtcttagggggaaatgtttgttatgatgtaaattttatttggtttgtacgcagttcaatttcaaaattgctaaaatgtgtttgagctttagactataacatttgttgtaataattgctaggttgaagttcaacatgtaaaaaaagggggcatggatttacattgcaaaaggtgtccacagtgtattagtgacattctttcattgacagctgacataattcattgagtgaaatattttaagccaaaaaaaaattccctttttaaaaaagggggtttaaatactgttggcatttttatggttcctttaaatgccctagctattcccagaggggtttttttgtttgtttttttggttttgattttctttttgtttttctttcttcttcttatttttttcatttgagtcttagctcccatttaagttatgcttctgaccttgtatggtctgtaagcttgcccagaaataagaccactgttttgaactaccacaaaagtataaatgaatattttaatgccacaatctttcctgttgcctgtggagtctctgctgaaatgaatcaggattcgagctctaggatgagacagaaaatgaaagcatgttgtttgccaggacactgtgggtttatattgatgtgtaacaagttgatttggaacactggactctcattctgttattctggttttgttttttttgttttgttttttttcttttgtaaaggcaatgagctagtcccagaaaggatccttcagttacatacaatttgtttaatgaaatgtcatggctctgttcatatttttgtcttgttcttccaattggtatatacaactttcagagcctcttgtatttggaaggctggaagggcccagactttggaatagtgtcttggtttcactgtttttgttttgattttttttttgttttgattttttttaaactaaagctatataaagcttgtggattaaacagaataaatttctaaatttaaaaa

SEQ ID NO: 316127 - DNA, 3828 bp, Homo sapiens
cggggagtttagggcctgacagaagcccgcccccgctggcgctcgtgcgcacgcgtggcgggctctcggcgcactgagcaggcgcggcctcgtgtcggccggagggggcgggcgcaacgacgcgcgctgcgtcccggcgctcggctttccctccgccggtcccgccctccgtcgcggcggcgcggtgtaccctgggatagggagcgatctccgagcgaggcggcaagatggacgcgggatttttccgcggaacaagtgcagaacaggataatcggttcagcaacaaacagaagaaactactgaagcagctgaaatttgcagaatgcctagaaaaaaaggtggacatgagcaaagtaaatttggaggttataaagccttggataacaaaaagagtaacggaaatccttgggtttgaagatgatgttgtgattgagtttatattcaaccagctggaagtgaagaatccagactccaaaatgatgcaaatcaacctgactggatttttgaatggaaaaaatgctcgagaatttatgggagaactgtggcccctgctataaggaagaaaaagaaagcagcagagaaaaaagggagcggtctcgtagcccaagaagacgcaaatccagatctccttcccctagaagacgatcttcccctgtcaggagagagagaaagcgcagtcattctcgatctccccgtcacagaaccaagagccggagtccttcccctgctccagaaaagaaggaaaaaactccagagctcccagaaccttcagtgaaagtaaaagaaccttcagtacaagaggctacttctactagtgacattctgaaagttcccaaacctgaacctataccagagcctaaagaaccttctccggaaaaaaattccaaaaaagaaaaggagaaggagaagacccgaccacgatctcggtcacgctccaaatcaagatcccggacgcggtcccgctctccttctcacactcgacctagacggcgccatagatcccgatcaagatcgtattcacctagaaggcggccaagcccaagaaggcggccatctcctcgaagaagaactccgccaagaagaatgcctcctccaccaaggcatagaaggagtagatctccagtaagacgaagaagacgttcgtcagcatccttgtctgggagtagctcatcatcctcttcatctcgttcacggtcaccaccaaagaagcctcccaagaggacatccagcccccctcggaaaactcgtaggttatctccttcagcaagtcctccaaggcgaaggcacaggccatcacctcctgcaactccaccacccaaaactcggcattcccctacaccccagcagtcaaaccgtacaagaaaaagtcgtgtttctgtgtctccagggagaacttcaggtaaagtgacaaaacataaaggtactgagaaaagagaatccccttcaccagcaccgaagcctagaaaagtagagttatctgaatcggaagaagataaaggtggcaaaatggctgcagcagattctgtgcagcagagacgccaatacagacgacaaaaccagcagtcttcatctgactctggctcctcctcctcctcagaagatgaacgacccaagagatcccatgtgaagaatggtgaggttggcaggcggcggagacattccccttcccggagtgcttctccatcaccacgaaagcgccaaaaagagacttcccctcggatgcagatgggaaagcgatggcaatcgccagtgactaaaagtggtagacggaggagaagtccatccccaccacccaccagaaggcgacggtctccttctcccgcccctcctcctcgacggcgcaggactcccacaccaccaccacgacgaaggactccttctcctcccccacgtcggcgctcaccttctcctagaagatactctcctccaatacagaggagatactctccttctccacctccaaagagaagaacggcttcacctcctccccctcctaaacgaagagcatcaccatctccaccaccaaagcggcgggtctcccattctccacctcccaaacaaagaagctccccagtcaccaagagacgttcaccttcattatcatccaagcataggaaagggtcttccccaagccgctctacccgggaggcccgatcaccacaaccaaacaaacggcattcgccctcaccacggcctcgagctcctcagacctcctcaagtcctccacccgttcgaagaggagcgtcgtcatcaccccaaagaaggcagtccccgtctccaagtactaggcccattaggagagtctccaggactccggaacctaaaaagataaaaaaggctgcttccccaagcccacagtctgtaagaagggtctcatcctcccgatctgtctccgggtctcctgagccagcagctaaaaagcccccagcacctccatcccccgtccagtctcagtcaccgtctacaaactggtcaccagctgtaccggtcaaaaaggccaaaagcccaacaccgagcccatcaccgccaagaaattcagatcaggaaggaggtggaaagaaaaagaagaaaaagaaggacaagaaacacaaaaaggataagaagcacaagaagcacaaaaaacacaagaaggaaaaggctgtggctgcagctgctgcagctgctgtgacccctgcagccattgcagctgccacaaccacattagcacaggaagagccagtggcagcgccagagccgaagaaggagactgaaagtgaagctgaagataaccttgatgatttagaaaagcacctgcgtgaaaaggccctgagatcaatgaggaaggcccaagtgtccccacagtcttagggggaaatgtttgttatgatgtaaattttatttggtttgtacgcagttcaatttcaaaattgctaaaatgtgtttgagctttagactataacatttgttgtaataattgctaggttgaagttcaacatgtaaaaaaagggggcatggatttacattgcaaaaggtgtccacagtgtattagtgacattctttcattgacagctgacataattcattgagtgaaatattttaagccaaaaaaaaattccctttttaaaaaagggggtttaaatactgttggcatttttatggttcctttaaatgccctagctattcccagaggggtttttttgtttgtttttttggttttgattttctttttgtttttctttcttcttcttatttttttcatttgagtcttagctcccatttaagttatgcttctgaccttgtatggtctgtaagcttgcccagaaataagaccactgttttgaactaccacaaaagtataaatgaatattttaatgccacaatctttcctgttgcctgtggagtctctgctgaaatgaatcaggattcgagctctaggatgagacagaaaatgaaagcatgttgtttgccaggacactgtgggtttatattgatgtgtaacaagttgatttggaacactggactctcattctgttattctggttttgttttttttgttttgttttttttcttttgtaaaggcaatgagctagtcccagaaaggatccttcagttacatacaatttgtttaatgaaatgtcatggctctgttcatatttttgtcttgttcttccaattggtatatacaactttcagagcctcttgtatttggaaggctggaagggcccagactttggaatagtgtcttggtttcactgtttttgttttgattttttttttgttttgattttttttaaactaaagctatataaagcttgtggattaaacagaataaatttctaaatttaaaaa

SEQ ID NO: 316128 - DNA, 3371 bp, Homo sapiens
cacacaaattagccgggcatggttggcacatgcctatagtcccagctactcaggaggatcacttgagcctgggaggttgaagctgcagtgagccaaaatcatgccagtacactccagcctgagtgacaagagtgagaccctgtctcagaagaagaaaagaaaatgtacatggttggaattattagttgctctctgggtttcagtgataggtacatacatacttatgtgtcttttggagatagagacaagtctgtgaattttgaaaagttttagaaatactttattacatcattgtgtaatgatttagaaggctgagtacaagaaggcaaaaaaaaaaaaaaagcttttgtttccacagtgacattctgaaagttcccaaacctgaacctataccagagcctaaagaaccttctccggaaaaaaattccaaaaaagaaaaggagaaggagaagacccgaccacgatctcggtcacgctccaaatcaagatcccggacgcggtcccgctctccttctcacactcgacctagacggcgccatagatcccgatcaagatcgtattcacctagaaggcggccaagcccaagaaggcggccatctcctcgaagaagaactccgccaagaagaatgcctcctccaccaaggcatagaaggagtagatctccagtaagacgaagaagacgttcgtcagcatccttgtctgggagtagctcatcatcctcttcatctcgttcacggtcaccaccaaagaagcctcccaagaggacatccagcccccctcggaaaactcgtaggttatctccttcagcaagtcctccaaggcgaaggcacaggccatcacctcctgcaactccaccacccaaaactcggcattcccctacaccccagcagtcaaaccgtacaagaaaaagtcgtgtttctgtgtctccagggagaacttcaggtaaagtgacaaaacataaaggtactgagaaaagagaatccccttcaccagcaccgaagcctagaaaagtagagttatctgaatcggaagaagataaaggtggcaaaatggctgcagcagattctgtgcagcagagacgccaatacagacgacaaaaccagcagtcttcatctgactctggctcctcctcctcctcagaagatgaacgacccaagagatcccatgtgaagaatggtgaggttggcaggcggcggagacattccccttcccggagtgcttctccatcaccacgaaagcgccaaaaagagacttcccctcggatgcagatgggaaagcgatggcaatcgccagtgactaaaagtggtagacggaggagaagtccatccccaccacccaccagaaggcgacggtctccttctcccgcccctcctcctcgacggcgcaggactcccacaccaccaccacgacgaaggactccttctcctcccccacgtcggcgctcaccttctcctagaagatactctcctccaatacagaggagatactctccttctccacctccaaagagaagaacggcttcacctcctccccctcctaaacgaagagcatcaccatctccaccaccaaagcggcgggtctcccattctccacctcccaaacaaagaagctccccagtcaccaagagacgttcaccttcattatcatccaagcataggaaagggtcttccccaagccgctctacccgggaggcccgatcaccacaaccaaacaaacggcattcgccctcaccacggcctcgagctcctcagacctcctcaagtcctccacccgttcgaagaggagcgtcgtcatcaccccaaagaaggcagtccccgtctccaagtactaggcccattaggagagtctccaggactccggaacctaaaaagataaaaaaggctgcttccccaagcccacagtctgtaagaagggtctcatcctcccgatctgtctccgggtctcctgagccagcagctaaaaagcccccagcacctccatcccccgtccagtctcagtcaccgtctacaaactggtcaccagctgtaccggtcaaaaaggccaaaagcccaacaccgagcccatcaccgccaagaaattcagatcaggaaggaggtggaaagaaaaagaagaaaaagaaggacaagaaacacaaaaaggataagaagcacaagaagcacaaaaaacacaagaaggaaaaggctgtggctgcagctgctgcagctgctgtgacccctgcagccattgcagctgccacaaccacattagcacaggaagagccagtggcagcgccagagccgaagaaggagactgaaagtgaagctgaagataaccttgatgatttagaaaagcacctgcgtgaaaaggccctgagatcaatgaggaaggcccaagtgtccccacagtcttagggggaaatgtttgttatgatgtaaattttatttggtttgtacgcagttcaatttcaaaattgctaaaatgtgtttgagctttagactataacatttgttgtaataattgctaggttgaagttcaacatgtaaaaaaagggggcatggatttacattgcaaaaggtgtccacagtgtattagtgacattctttcattgacagctgacataattcattgagtgaaatattttaagccaaaaaaaaattccctttttaaaaaagggggtttaaatactgttggcatttttatggttcctttaaatgccctagctattcccagaggggtttttttgtttgtttttttggttttgattttctttttgtttttctttcttcttcttatttttttcatttgagtcttagctcccatttaagttatgcttctgaccttgtatggtctgtaagcttgcccagaaataagaccactgttttgaactaccacaaaagtataaatgaatattttaatgccacaatctttcctgttgcctgtggagtctctgctgaaatgaatcaggattcgagctctaggatgagacagaaaatgaaagcatgttgtttgccaggacactgtgggtttatattgatgtgtaacaagttgatttggaacactggactctcattctgttattctggttttgttttttttgttttgttttttttcttttgtaaaggcaatgagctagtcccagaaaggatccttcagttacatacaatttgtttaatgaaatgtcatggctctgttcatatttttgtcttgttcttccaattggtatatacaactttcagagcctcttgtatttggaaggctggaagggcccagactttggaatagtgtcttggtttcactgtttttgttttgattttttttttgttttgattttttttaaactaaagctatataaagcttgtggattaaacagaataaatttctaaatttaaaaa

SEQ ID NO: 316129 - DNA, 3447 bp, Homo sapiens
cggggagtttagggcctgacagaagcccgcccccgctggcgctcgtgcgcacgcgtggcgggctctcggcgcactgagcaggcgcggcctcgtgtcggccggagggggcgggcgcaacgacgcgcgctgcgtcccggcgctcggctttccctccgccggtcccgccctccgtcgcggcggcgcggtgtaccctgggatagggagcgatctccgagcgaggcggcaagatggacgcgggatttttccgcggaacaagtgcagaacaggataatcggttcagcaacaaacagaagaaactactgaagcagctgaaatttgcagaatgcctagaaaaaaaggtggacatgagcaaagtaaatttggaggttataaagccttggataacaaaaagagtaacggaaatccttgggtttgaagatgatgttgtgattgagtttatattcaaccagctggaagtgaagaatccagactccaaaatgatgcaaatcaacctgactggatttttgaatggaaaaaatgctcgagaatttatgggagaactgtggcccctgctgctaagtgcacaagaaaacatcgcgggaatcccttctgctttcctagaactgaagaaagaagaaataaaacaaagacagattgaacaagaaaaactggcatctatgaaaaagcaagatgaagacaaagataaaagagataaggaagaaaaagaaagcagcagagaaaaaagggagcggtctcgtagcccaagaagacgcaaatccagatctccttcccctagaagacgatcttcccctgtcaggagagagagaaagcgcagtcattctcgatctccccgtcacagaaccaagagccggagtccttcccctgctccagaaaagaaggaaaaaactccagagctcccagaaccttcagtgaaagtaaaagaaccttcagtacaagaggctacttctactagtgacattctgaaagttcccaaacctgaacctataccagagcctaaagaaccttctccggaaaaaaattccaaaaaagaaaaggagaaggagaagacccgaccacgatctcggtcacgctccaaatcaagatcccggacgcggtcccgctctccttctcacactcgacctagacggcgccatagatcccgatcaagatcgtattcacctagaaggcggccaagcccaagaaggcggccatctcctcgaagaagaactccgccaagaagaatgcctcctccaccaaggcatagaaggagtagatctccagtaagacgaagaagacgttcgtcagcatccttgtctgggagtagctcatcatcctcttcatctcgttcacggtcaccaccaaagaagcctcccaagaggacatccagcccccctcggaaaactcgtaggttatctccttcagcaagtcctccaaggcgaaggcacaggccatcacctcctgcaactccaccacccaaaactcggcattcccctacaccccagcagtcaaaccgtacaagaaaaagtcgtgtttctgtgtctccagggagaacttcaggtaaagtgacaaaacataaaggtactgagaaaagagaatccccttcaccagcaccgaagcctagaaaagtagagttatctgaatcggaagaagataaaggtggcaaaatggctgcagcagattctgtgcagcagagacgccaatacagacgacaaaaccagcagtcttcatctgactctggctcctcctcctcctcagaagatgaacgacccaagagatcccatgtgaagaatggtgaggttggcaggcggcggagacattccccttcccggagtgcttctccatcaccacgaaagcgccaaaaagagacttcccctcggatgcagatgggaaagcgatggcaatcgccagtgactaaaagtggtagacggaggagaagtccatccccaccacccaccagaaggcgacggtctccttctcccgcccctcctcctcgacggcgcaggactcccacaccaccaccacgacgaaggactccttctcctcccccacgtcggcgctcaccttctcctagaagatactctcctccaatacagaggagatactctccttctccacctccaaagagaagaacggcttcacctcctccccctcctaaacgaagagcatcaccataattcagatcaggaaggaggtggaaagaaaaagaagaaaaagaaggacaagaaacacaaaaaggataagaagcacaagaagcacaaaaaacacaagaaggaaaaggctgtggctgcagctgctgcagctgctgtgacccctgcagccattgcagctgccacaaccacattagcacaggaagagccagtggcagcgccagagccgaagaaggagactgaaagtgaagctgaagataaccttgatgatttagaaaagcacctgcgtgaaaaggccctgagatcaatgaggaaggcccaagtgtccccacagtcttagggggaaatgtttgttatgatgtaaattttatttggtttgtacgcagttcaatttcaaaattgctaaaatgtgtttgagctttagactataacatttgttgtaataattgctaggttgaagttcaacatgtaaaaaaagggggcatggatttacattgcaaaaggtgtccacagtgtattagtgacattctttcattgacagctgacataattcattgagtgaaatattttaagccaaaaaaaaattccctttttaaaaaagggggtttaaatactgttggcatttttatggttcctttaaatgccctagctattcccagaggggtttttttgtttgtttttttggttttgattttctttttgtttttctttcttcttcttatttttttcatttgagtcttagctcccatttaagttatgcttctgaccttgtatggtctgtaagcttgcccagaaataagaccactgttttgaactaccacaaaagtataaatgaatattttaatgccacaatctttcctgttgcctgtggagtctctgctgaaatgaatcaggattcgagctctaggatgagacagaaaatgaaagcatgttgtttgccaggacactgtgggtttatattgatgtgtaacaagttgatttggaacactggactctcattctgttattctggttttgttttttttgttttgttttttttcttttgtaaaggcaatgagctagtcccagaaaggatccttcagttacatacaatttgtttaatgaaatgtcatggctctgttcatatttttgtcttgttcttccaattggtatatacaactttcagagcctcttgtatttggaaggctggaagggcccagactttggaatagtgtcttggtttcactgtttttgttttgattttttttttgttttgattttttttaaactaaagctatataaagcttgtggattaaacagaataaatttctaaatttaaaaa

SEQ ID NO: 316130 - DNA, 2907 bp, Homo sapiens
ggtgactacgatcttgatcgggatctatgtgcgccgtctaggtcgagtgtgagaaggagagcgggaccgcgtccgggatcttgatttagatcgtattcacctagaaggcggccaagcccaagaaggcggccatctcctcgaagaagaactccgccaagaagaatgcctcctccaccaaggcatagaaggagtagatctccagtaagacgaagaagacgttcgtcagcatccttgtctgggagtagctcatcatcctcttcatctcgttcacggtcaccaccaaagaagcctcccaagaggacatccagcccccctcggaaaactcgtaggttatctccttcagcaagtcctccaaggcgaaggcacaggccatcacctcctgcaactccaccacccaaaactcggcattcccctacaccccagcagtcaaaccgtacaagaaaaagtcgtgtttctgtgtctccagggagaacttcaggtaaagtgacaaaacataaaggtactgagaaaagagaatccccttcaccagcaccgaagcctagaaaagtagagttatctgaatcggaagaagataaaggtggcaaaatggctgcagcagattctgtgcagcagagacgccaatacagacgacaaaaccagcagtcttcatctgactctggctcctcctcctcctcagaagatgaacgacccaagagatcccatgtgaagaatggtgaggttggcaggcggcggagacattccccttcccggagtgcttctccatcaccacgaaagcgccaaaaagagacttcccctcggatgcagatgggaaagcgatggcaatcgccagtgactaaaagtggtagacggaggagaagtccatccccaccacccaccagaaggcgacggtctccttctcccgcccctcctcctcgacggcgcaggactcccacaccaccaccacgacgaaggactccttctcctcccccacgtcggcgctcaccttctcctagaagatactctcctccaatacagaggagatactctccttctccacctccaaagagaagaacggcttcacctcctccccctcctaaacgaagagcatcaccatctccaccaccaaagcggcgggtctcccattctccacctcccaaacaaagaagctccccagtcaccaagagacgttcaccttcattatcatccaagcataggaaagggtcttccccaagccgctctacccgggaggcccgatcaccacaaccaaacaaacggcattcgccctcaccacggcctcgagctcctcagacctcctcaagtcctccacccgttcgaagaggagcgtcgtcatcaccccaaagaaggcagtccccgtctccaagtactaggcccattaggagagtctccaggactccggaacctaaaaagataaaaaaggctgcttccccaagcccacagtctgtaagaagggtctcatcctcccgatctgtctccgggtctcctgagccagcagctaaaaagcccccagcacctccatcccccgtccagtctcagtcaccgtctacaaactggtcaccagctgtaccggtcaaaaaggccaaaagcccaacaccgagcccatcaccgccaagaaattcagatcaggaaggaggtggaaagaaaaagaagaaaaagaaggacaagaaacacaaaaaggataagaagcacaagaagcacaaaaaacacaagaaggaaaaggctgtggctgcagctgctgcagctgctgtgacccctgcagccattgcagctgccacaaccacattagcacaggaagagccagtggcagcgccagagccgaagaaggagactgaaagtgaagctgaagataaccttgatgatttagaaaagcacctgcgtgaaaaggccctgagatcaatgaggaaggcccaagtgtccccacagtcttagggggaaatgtttgttatgatgtaaattttatttggtttgtacgcagttcaatttcaaaattgctaaaatgtgtttgagctttagactataacatttgttgtaataattgctaggttgaagttcaacatgtaaaaaaagggggcatggatttacattgcaaaaggtgtccacagtgtattagtgacattctttcattgacagctgacataattcattgagtgaaatattttaagccaaaaaaaaattccctttttaaaaaagggggtttaaatactgttggcatttttatggttcctttaaatgccctagctattcccagaggggtttttttgtttgtttttttggttttgattttctttttgtttttctttcttcttcttatttttttcatttgagtcttagctcccatttaagttatgcttctgaccttgtatggtctgtaagcttgcccagaaataagaccactgttttgaactaccacaaaagtataaatgaatattttaatgccacaatctttcctgttgcctgtggagtctctgctgaaatgaatcaggattcgagctctaggatgagacagaaaatgaaagcatgttgtttgccaggacactgtgggtttatattgatgtgtaacaagttgatttggaacactggactctcattctgttattctggttttgttttttttgttttgttttttttcttttgtaaaggcaatgagctagtcccagaaaggatccttcagttacatacaatttgtttaatgaaatgtcatggctctgttcatatttttgtcttgttcttccaattggtatatacaactttcagagcctcttgtatttggaaggctggaagggcccagactttggaatagtgtcttggtttcactgtttttgttttgattttttttttgttttgattttttttaaactaaagctatataaagcttgtggattaaacagaataaatttctaaatttaaaaa

SEQ ID NO: 316131 - DNA, 2209 bp, Homo sapiens
cggggagtttagggcctgacagaagcccgcccccgctggcgctcgtgcgcacgcgtggcgggctctcggcgcactgagcaggcgcggcctcgtgtcggccggagggggcgggcgcaacgacgcgcgctgcgtcccggcgctcggctttccctccgccggtcccgccctccgtcgcggcggcgcggtgtaccctgggatagggagcgatctccgagcgaggcggcaagatggacgcgggatttttccgcggaacaagtgcagaacaggataatcggttcagcaacaaacagaagaaactactgaagcagctgaaatttgcagaatgcctagaaaaaaagctccaaagagaagaacggcttcacctcctccccctcctaaacgaagagcatcaccatctccaccaccaaagcggcgggtctcccattctccacctcccaaacaaagaagctccccagtcaccaagagacgttcaccttcattatcatccaagcataggaaagggtcttccccaagccgctctacccgggaggcccgatcaccacaaccaaacaaacggcattcgccctcaccacggcctcgagctcctcagacctcctcaagtcctccacccgttcgaagaggagcgtcgtcatcaccccaaagaaggcagtccccgtctccaagtactaggcccattaggagagtctccaggactccggaacctaaaaagataaaaaaggctgcttccccaagcccacagtctgtaagaagggtctcatcctcccgatctgtctccgggtctcctgagccagcagctaaaaagcccccagcacctccatcccccgtccagtctcagtcaccgtctacaaactggtcaccagctgtaccggtcaaaaaggccaaaagcccaacaccgagcccatcaccgccaagaaattcagatcaggaaggaggtggaaagaaaaagaagaaaaagaaggacaagaaacacaaaaaggataagaagcacaagaagcacaaaaaacacaagaaggaaaaggctgtggctgcagctgctgcagctgctgtgacccctgcagccattgcagctgccacaaccacattagcacaggaagagccagtggcagcgccagagccgaagaaggagactgaaagtgaagctgaagataaccttgatgatttagaaaagcacctgcgtgaaaaggccctgagatcaatgaggaaggcccaagtgtccccacagtcttagggggaaatgtttgttatgatgtaaattttatttggtttgtacgcagttcaatttcaaaattgctaaaatgtgtttgagctttagactataacatttgttgtaataattgctaggttgaagttcaacatgtaaaaaaagggggcatggatttacattgcaaaaggtgtccacagtgtattagtgacattctttcattgacagctgacataattcattgagtgaaatattttaagccaaaaaaaaattccctttttaaaaaagggggtttaaatactgttggcatttttatggttcctttaaatgccctagctattcccagaggggtttttttgtttgtttttttggttttgattttctttttgtttttctttcttcttcttatttttttcatttgagtcttagctcccatttaagttatgcttctgaccttgtatggtctgtaagcttgcccagaaataagaccactgttttgaactaccacaaaagtataaatgaatattttaatgccacaatctttcctgttgcctgtggagtctctgctgaaatgaatcaggattcgagctctaggatgagacagaaaatgaaagcatgttgtttgccaggacactgtgggtttatattgatgtgtaacaagttgatttggaacactggactctcattctgttattctggttttgttttttttgttttgttttttttcttttgtaaaggcaatgagctagtcccagaaaggatccttcagttacatacaatttgtttaatgaaatgtcatggctctgttcatatttttgtcttgttcttccaattggtatatacaactttcagagcctcttgtatttggaaggctggaagggcccagactttggaatagtgtcttggtttcactgtttttgttttgattttttttttgttttgattttttttaaactaaagctatataaagcttgtggattaaacagaataaatttctaaatttaaaaa

SEQ ID NO: 316132 - DNA, 2948 bp, Homo sapiens
cggggagtttagggcctgacagaagcccgcccccgctggcgctcgtgcgcacgcgtggcgggctctcggcgcactgagcaggcgcggcctcgtgtcggccggagggggcgggcgcaacgacgcgcgctgcgtcccggcgctcggctttccctccgccggtcccgccctccgtcgcggcggcgcggtgtaccctgggatagggagcgatctccgagcgaggcggcaagatggacgcgggatttttccgcggaacaagtgcagaacaggataatcggttcagcaacaaacagaagaaactactgaagcagctgaaatttgcagaatgcctagaaaaaaaggtggacatgagcaaagtaaatttggaggttataaagccttggataacaaaaagagtaacggaaatccttgggtttgaagatgatgttgtgattgagtttatattcaaccagctggaagtgaagaatccagactccaaaatgatgcaaatcaacctgactggatttttgaatggaaaaaatgctcgagaatttatgggagaactgtggcccctgctgctaagtgcacaagaaaacatcgcgggaatcccttctgctttcctagaactgaagaaagaagaaataaaacaaagacagattgaacaagaaaaactggcatctatgaaaaagcaagatgaagacaaagataaaagagataaggaagaaaaagaaagcagcagagaaaaaagggagcggtctcgtagcccaagaagacgcaaatccagatctccttcccctagaagacgatcttcccctgtcaggagagagagaaagcgcagtcattctcgatctccccgtcacagaaccaagagccggagtccttcccctgctccagaaaagaaggaaaaaactccagagctcccagaaccttcagtgaaagtaaaagaaccttcagtacaagaggctacttctactagtgacattctgaaagttcccaaacctgaacctataccagagcctaaagaaccttctccggaaaaaaattccaaaaaagaaaaggagaaggagaagacccgaccacgatctcggtcacgctccaaatcaagatcccggacgcggtcccgctctccttctcacactcgacctagacggcgccatagatcccgatcaagatcgtattcacctagaaggcggccaagcccaagaaggcggccatctcctcgaagaagaactccgccaagaagaatgcctcctccaccaaggcatagaaggagtagatctccagtaagacgaagaagacgttcgtcagcatccttgtctgggagtagctcatcatcctcttcatctcgttcacggtcaccaccaaagaagcctcccaagaggacatccagcccccctcggaaaactcgtaggttatctccttcagcaagtcctccaaggcgaaggcacaggccatcacctcctgcaactccaccacccaaaactcggcattcccctacaccccagcagtcaaaccgtacaagaaaaagtcgtgtttctgtgtctccagggagaacttcaggtaaagtgacaaaacataaaggtactgagaaaagagaatccccttcaccagcaccgaagcctagaaaagtagagttatctgaatcggaagaagataaaggtggcaaaatggctgcagcagattctgtgcagcagagacgccaatacagacgacaaaaccagcagtcttcatctgactctggctcctcctcctcctcagaagatgaacgacccaagagatcccatgtgaagaatggtgaggttggcaggcggcggagacattccccttcccggagtgcttctccatcaccacgaaagcgccaaaaagagacttcccctcggatgcagatgggaaagcgatggcaatcgccagtgactaaaagtggtagacggaggagaagtccatccccaccacccaccagaaggcgacggtctccttctcccgcccctcctcctcgacggcgcaggactcccacaccaccaccacgacgaaggactccttctcctcccccacgtcggcgctcaccttctcctagaagatactctcctccaatacagaggagatactctccttctccacctccaaagagaagaacggcttcacctcctccccctcctaaacgaagagcatcaccatctccaccaccaaagcggcgggtctcccattctccacctcccaaacaaagaagctccccagtcaccaagagacgttcaccttcattatcatccaagcataggaaagggtcttccccaagccgctctacccgggaggcccgatcaccacaaccaaacaaacggcattcgccctcaccacggcctcgagctcctcagacctcctcaagtcctccacccgttcgaagaggagcgtcgtcatcaccccaaagaaggcagtccccgtctccaagtactaggcccattaggagagtctccaggactccggaacctaaaaagataaaaaaggctgcttccccaagcccacagtctgtaagaagggtctcatcctcccgatctgtctccgggtctcctgagccagcagctaaaaagcccccagcacctccatcccccgtccagtctcagtcaccgtctacaaactggtcaccagctgtaccggtcaaaaaggccaaaagcccaacaccgagcccatcaccgccaagaaattcagatcaggaaggaggtggaaagaaaaagaagaaaaagaaggacaagaaacacaaaaaggataagaagcacaagaagcacaaaaaacacaagaaggaaaaggctgtggctgcagctgctgcagctgctgtgacccctgcagccattgcagctgccacaaccacattagcacaggaagagccagtggcagcgccagagccgaagaaggaggtggaaagaaaaagaagaaaaagaaggacaagaaacacaaaaaggataagaagcacaagaagcaca

SEQ ID NO: 316133 - DNA, 2900 bp, Homo sapiens
cggggagtttagggcctgacagaagcccgcccccgctggcgctcgtgcgcacgcgtggcgggctctcggcgcactgagcaggcgcggcctcgtgtcggccggagggggcgggcgcaacgacgcgcgctgcgtcccggcgctcggctttccctccgccggtcccgccctccgtcgcggcggcgcggtgtaccctgggatagggagcgatctccgagcgaggcggcaagatggacgcgggatttttccgcggaacaagtgcagaacaggataatcggttcagcaacaaacagaagaaactactgaagcagctgaaatttgcagaatgcctagaaaaaaaggtggacatgagcaaagtaaatttggaggttataaagccttggataacaaaaagagtaacggaaatccttgggtttgaagatgatgttgtgattgagtttatattcaaccagctggaagtgaagaatccagactccaaaatgatgcaaatcaacctgactggatttttgaatggaaaaaatgctcgagaatttatgggagaactgtggcccctgctgctaagtgcacaagaaaacatcgcgggaatcccttctgctttcctagaactgaagaaagaagaaataaaacaaagacagattgaacaagaaaaactggcatctatgaaaaagcaagatgaagacaaagataaaagagataaggaagaaaaagaaagcagcagagaaaaaagggagcggtctcgtagcccaagaagacgcaaatccagatctccttcccctagaagacgatcttcccctgtcaggagagagagaaagcgcagtcattctcgatctccccgtcacagaaccaagagccggagtccttcccctgctccagaaaagaaggaaaaaactccagagctcccagaaccttcagtgaaagtaaaagaaccttcagtacaagaggctacttctactagtgacattctgaaagttcccaaacctgaacctataccagagcctaaagaaccttctccggaaaaaaattccaaaaaagaaaaggagaaggagaagacccgaccacgatctcggtcacgctccaaatcaagatcccggacgcggtcccgctctccttctcacactcgacctagacggcgccatagatcccgatcaagatcgtattcacctagaaggcggccaagcccaagaaggcggccatctcctcgaagaagaactccgccaagaagaatgcctcctccaccaaggcatagaaggagtagatctccagtaagacgaagaagacgttcgtcagcatccttgtctgggagtagctcatcatcctcttcatctcgttcacggtcaccaccaaagaagcctcccaagaggacatccagcccccctcggaaaactcgtaggttatctccttcagcaagtcctccaaggcgaaggcacaggccatcacctcctgcaactccaccacccaaaactcggcattcccctacaccccagcagtcaaaccgtacaagaaaaagtcgtgtttctgtgtctccagggagaacttcaggtaaagtgacaaaacataaaggtactgagaaaagagaatccccttcaccagcaccgaagcctagaaaagtagagttatctgaatcggaagaagataaaggtggcaaaatggctgcagcagattctgtgcagcagagacgccaatacagacgacaaaaccagcagtcttcatctgactctggctcctcctcctcctcagaagatgaacgacccaagagatcccatgtgaagaatggtgaggttggcaggcggcggagacattccccttcccggagtgcttctccatcaccacgaaagcgccaaaaagagacttcccctcggatgcagatgggaaagcgatggcaatcgccagtgactaaaagtggtagacggaggagaagtccatccccaccacccaccagaaggcgacggtctccttctcccgcccctcctcctcgacggcgcaggactcccacaccaccaccacgacgaaggactccttctcctcccccacgtcggcgctcaccttctcctagaagatactctcctccaatacagaggagatactctccttctccacctccaaagagaagaacggcttcacctcctccccctcctaaacgaagagcatcaccatctccaccaccaaagcggcgggtctcccattctccacctcccaaacaaagaagctccccagtcaccaagagacgttcaccttcattatcatccaagcataggaaagggtcttccccaagccgctctacccgggaggcccgatcaccacaaccaaacaaacggcattcgccctcaccacggcctcgagctcctcagacctcctcaagtcctccacccgttcgaagaggagcgtcgtcatcaccccaaagaaggcagtccccgtctccaagtactaggcccattaggagagtctccaggactccggaacctaaaaagataaaaaaggctgcttccccaagcccacagtctgtaagaagggtctcatcctcccgatctgtctccgggtctcctgagccagcagctaaaaagcccccagcacctccatcccccgtccagtctcagtcaccgtctacaaactggtcaccagctgtaccggtcaaaaaggccaaaagcccaacaccgagcccatcaccgccaagaaattcagatcaggaaggaggtggaaagaaaaagaagaaaaagaaggacaagaaacacaaaaaggataagaagcacaagaagcacaaaaaacacaagaaggaaaaggctgtggctgcagctgctgcagctgctgtgacccctgcagccattgcagctgccacaaccacattagcacaggaagagccagtggcagcgccagagccgaagaaggtatttatgaactctgtatat

SEQ ID NO: 316134 - DNA, 2700 bp, Homo sapiens
cggggagtttagggcctgacagaagcccgcccccgctggcgctcgtgcgcacgcgtggcgggctctcggcgcactgagcaggcgcggcctcgtgtcggccggagggggcgggcgcaacgacgcgcgctgcgtcccggcgctcggctttccctccgccggtcccgccctccgtcgcggcggcgcggtgtaccctgggatagggagcgatctccgagcgaggcggcaagatggacgcgggatttttccgcggaacaagtgcagaacaggataatcggttcagcaacaaacagaagaaactactgaagcagctgaaatttgcagaatgcctagaaaaaaaggtggacatgagcaaagtaaatttggaggttataaagccttggataacaaaaagagtaacggaaatccttgggtttgaagatgatgttgtgattgagtttatattcaaccagctggaagtgaagaatccagactccaaaatgatgcaaatcaacctgactggatttttgaatggaaaaaatgctcgagaatttatgggagaactgtggcccctgctgctaagtgcacaagaaaacatcgcgggaatcccttctgctttcctagaactgaagaaagaagaaataaaacaaagacagattgaacaagaaaaactggcatctatgaaaaagcaagatgaagacaaagataaaagagataaggaagaaaaagaaagcagcagagaaaaaagggagcggtctcgtagcccaagaagacgcaaatccagatctccttcccctagaagacgatcttcccctgtcaggagagagagaaagcgcagtcattctcgatctccccgtcacagaaccaagagccggagtccttcccctgctccagaaaagaaggaaaaaactccagagctcccagaaccttcagtgaaagtaaaagaaccttcagtacaagaggctacttctactagtgacattctgaaagttcccaaacctgaacctataccagagcctaaagaaccttctccggaaaaaaattccaaaaaagaaaaggagaaggagaagacccgaccacgatctcggtcacgctccaaatcaagatcccggacgcggtcccgctctccttctcacactcgacctagacggcgccatagatcccgatcaagatcgtattcacctagaaggcggccaagcccaagaaggcggccatctcctcgaagaagaactccgccaagaagaatgcctcctccaccaaggcatagaaggagtagatctccagtaagacgaagaagacgttcgtcagcatccttgtctgggagtagctcatcatcctcttcatctcgttcacggtcaccaccaaagaagcctcccaagaggacatccagcccccctcggaaaactcgtaggttatctccttcagcaagtcctccaaggcgaaggcacaggccatcacctcctgcaactccaccacccaaaactcggcattcccctacaccccagcagtcaaaccgtacaagaaaaagtcgtgtttctgtgtctccagggagaacttcaggtaaagtgacaaaacataaaggtactgagaaaagagaatccccttcaccagcaccgaagcctagaaaagtagagttatctgaatcggaagaagataaaggtggcaaaatggctgcagcagattctgtgcagcagagacgccaatacagacgacaaaaccagcagtcttcatctgactctggctcctcctcctcctcagaagatgaacgacccaagagatcccatgtgaagaatggtgaggttggcaggcggcggagacattccccttcccggagtgcttctccatcaccacgaaagcgccaaaaagagacttcccctcggatgcagatgggaaagcgatggcaatcgccagtgactaaaagtggtagacggaggagaagtccatccccaccacccaccagaaggcgacggtctccttctcccgcccctcctcctcgacggcgcaggactcccacaccaccaccacgacgaaggactccttctcctcccccacgtcggcgctcaccttctcctagaagatactctcctccaatacagaggagatactctccttctccacctccaaagagaagaacggcttcacctcctccccctcctaaacgaagagcatcaccatctccaccaccaaagcggcgggtctcccattctccacctcccaaacaaagaagctccccagtcaccaagagacgttcaccttcattatcatccaagcataggaaagggtcttccccaagccgctctacccgggaggcccgatcaccacaaccaaacaaacggcattcgccctcaccacggcctcgagctcctcagacctcctcaagtcctccacccgttcgaagaggagcgtcgtcatcaccccaaagaaggcagtccccgtctccaagtactaggcccattaggagagtctccaggactccggaacctaaaaagataaaaaaggctgcttccccaagcccacagtctgtaagaagggtctcatcctcccgatctgtctccgggtctcctgagccagcagctaaaaagcccccagcacctccatcccccgtccagtctcagtcaccgtctacaaactggtcaccagctgtaccggtcaaaaaggccaaaagcccaaccttaggaacgcaatcagaattaaagtatcttcttgaaaaacaagaacaagaaa

SEQ ID NO: 316135 - DNA, 2709 bp, Homo sapiens
  misc_feature (2700)..(2700): n is a, c, g, or t
cggggagtttagggcctgacagaagcccgcccccgctggcgctcgtgcgcacgcgtggcgggctctcggcgcactgagcaggcgcggcctcgtgtcggccggagggggcgggcgcaacgacgcgcgctgcgtcccggcgctcggctttccctccgccggtcccgccctccgtcgcggcggcgcggtgtaccctgggatagggagcgatctccgagcgaggcggcaagatggacgcgggatttttccgcggaacaagtgcagaacaggataatcggttcagcaacaaacagaagaaactactgaagcagctgaaatttgcagaatgcctagaaaaaaaggtggacatgagcaaagtaaatttggaggttataaagccttggataacaaaaagagtaacggaaatccttgggtttgaagatgatgttgtgattgagtttatattcaaccagctggaagtgaagaatccagactccaaaatgatgcaaatcaacctgactggatttttgaatggaaaaaatgctcgagaatttatgggagaactgtggcccctgctgctaagtgcacaagaaaacatcgcgggaatcccttctgctttcctagaactgaagaaagaagaaataaaacaaagacagattgaacaagaaaaactggcatctatgaaaaagcaagatgaagacaaagataaaagagataaggaagaaaaagaaagcagcagagaaaaaagggagcggtctcgtagcccaagaagacgcaaatccagatctccttcccctagaagacgatcttcccctgtcaggagagagagaaagcgcagtcattctcgatctccccgtcacagaaccaagagccggagtccttcccctgctccagaaaagaaggaaaaaactccagagctcccagaaccttcagtgaaagtaaaagaaccttcagtacaagaggctacttctactagtgacattctgaaagttcccaaacctgaacctataccagagcctaaagaaccttctccggaaaaaaattccaaaaaagaaaaggagaaggagaagacccgaccacgatctcggtcacgctccaaatcaagatcccggacgcggtcccgctctccttctcacactcgacctagacggcgccatagatcccgatcaagatcgtattcacctagaaggcggccaagcccaagaaggcggccatctcctcgaagaagaactccgccaagaagaatgcctcctccaccaaggcatagaaggagtagatctccagtaagacgaagaagacgttcgtcagcatccttgtctgggagtagctcatcatcctcttcatctcgttcacggtcaccaccaaagaagcctcccaagaggacatccagcccccctcggaaaactcgtaggttatctccttcagcaagtcctccaaggcgaaggcacaggccatcacctcctgcaactccaccacccaaaactcggcattcccctacaccccagcagtcaaaccgtacaagaaaaagtcgtgtttctgtgtctccagggagaacttcaggtaaagtgacaaaacataaaggtactgagaaaagagaatccccttcaccagcaccgaagcctagaaaagtagagttatctgaatcggaagaagataaaggtggcaaaatggctgcagcagattctgtgcagcagagacgccaatacagacgacaaaaccagcagtcttcatctgactctggctcctcctcctcctcagaagatgaacgacccaagagatcccatgtgaagaatggtgaggttggcaggcggcggagacattccccttcccggagtgcttctccatcaccacgaaagcgccaaaaagagacttcccctcggatgcagatgggaaagcgatggcaatcgccagtgactaaaagtggtagacggaggagaagtccatccccaccacccaccagaaggcgacggtctccttctcccgcccctcctcctcgacggcgcaggactcccacaccaccaccacgacgaaggactccttctcctcccccacgtcggcgctcaccttctcctagaagatactctcctccaatacagaggagatactctccttctccacctccaaagagaagaacggcttcacctcctccccctcctaaacgaagagcatcaccatctccaccaccaaagcggcgggtctcccattctccacctcccaaacaaagaagctccccagtcaccaagagacgttcaccttcattatcatccaagcataggaaagggtcttccccaagccgctctacccgggaggcccgatcaccacaaccaaacaaacggcattcgccctcaccacggcctcgagctcctcagacctcctcaagtcctccacccgttcgaagaggagcgtcgtcatcaccccaaagaaggcagtccccgtctccaagtactaggcccattaggagagtctccaggactccggaacctaaaaagataaaaaaggctgcttccccaagcccacagtctgtaagaagggtctcatcctcccgatctgtctccgggtctcctgagccagcagctaaaaagcccccagcacctccatcctgatctgaatttcttggcggtgatgggctcggtgttgggcttttggcctttttgaccggtacagctggtgaccagtttgtagacggtgacttgaagacttggaacctccgttgcccgaatttcnatgcaagct

SEQ ID NO: 316136 - DNA, 2680 bp, Homo sapiens
  misc_feature (2667)..(2667): n is a, c, g, or t
cggggagtttagggcctgacagaagcccgcccccgctggcgctcgtgcgcacgcgtggcgggctctcggcgcactgagcaggcgcggcctcgtgtcggccggagggggcgggcgcaacgacgcgcgctgcgtcccggcgctcggctttccctccgccggtcccgccctccgtcgcggcggcgcggtgtaccctgggatagggagcgatctccgagcgaggcggcaagatggacgcgggatttttccgcggaacaagtgcagaacaggataatcggttcagcaacaaacagaagaaactactgaagcagctgaaatttgcagaatgcctagaaaaaaaggtggacatgagcaaagtaaatttggaggttataaagccttggataacaaaaagagtaacggaaatccttgggtttgaagatgatgttgtgattgagtttatattcaaccagctggaagtgaagaatccagactccaaaatgatgcaaatcaacctgactggatttttgaatggaaaaaatgctcgagaatttatgggagaactgtggcccctgctgctaagtgcacaagaaaacatcgcgggaatcccttctgctttcctagaactgaagaaagaagaaataaaacaaagacagattgaacaagaaaaactggcatctatgaaaaagcaagatgaagacaaagataaaagagataaggaagaaaaagaaagcagcagagaaaaaagggagcggtctcgtagcccaagaagacgcaaatccagatctccttcccctagaagacgatcttcccctgtcaggagagagagaaagcgcagtcattctcgatctccccgtcacagaaccaagagccggagtccttcccctgctccagaaaagaaggaaaaaactccagagctcccagaaccttcagtgaaagtaaaagaaccttcagtacaagaggctacttctactagtgacattctgaaagttcccaaacctgaacctataccagagcctaaagaaccttctccggaaaaaaattccaaaaaagaaaaggagaaggagaagacccgaccacgatctcggtcacgctccaaatcaagatcccggacgcggtcccgctctccttctcacactcgacctagacggcgccatagatcccgatcaagatcgtattcacctagaaggcggccaagcccaagaaggcggccatctcctcgaagaagaactccgccaagaagaatgcctcctccaccaaggcatagaaggagtagatctccagtaagacgaagaagacgttcgtcagcatccttgtctgggagtagctcatcatcctcttcatctcgttcacggtcaccaccaaagaagcctcccaagaggacatccagcccccctcggaaaactcgtaggttatctccttcagcaagtcctccaaggcgaaggcacaggccatcacctcctgcaactccaccacccaaaactcggcattcccctacaccccagcagtcaaaccgtacaagaaaaagtcgtgtttctgtgtctccagggagaacttcaggtaaagtgacaaaacataaaggtactgagaaaagagaatccccttcaccagcaccgaagcctagaaaagtagagttatctgaatcggaagaagataaaggtggcaaaatggctgcagcagattctgtgcagcagagacgccaatacagacgacaaaaccagcagtcttcatctgactctggctcctcctcctcctcagaagatgaacgacccaagagatcccatgtgaagaatggtgaggttggcaggcggcggagacattccccttcccggagtgcttctccatcaccacgaaagcgccaaaaagagacttcccctcggatgcagatgggaaagcgatggcaatcgccagtgactaaaagtggtagacggaggagaagtccatccccaccacccaccagaaggcgacggtctccttctcccgcccctcctcctcgacggcgcaggactcccacaccaccaccacgacgaaggactccttctcctcccccacgtcggcgctcaccttctcctagaagatactctcctccaatacagaggagatactctccttctccacctccaaagagaagaacggcttcacctcctccccctcctaaacgaagagcatcaccatctccaccaccaaagcggcgggtctcccattctccacctcccaaacaaagaagctccccagtcaccaagagacgttcaccttcattatcatccaagcataggaaagggtcttccccaagccgctctacccgggaggcccgatcaccacaaccaaacaaacggcattcgccctcaccacggcctcgagctcctcagacctcctcaagtcctccacccgttcgaagaggagcgtcgtcatcaccccaaagaaggcagtccccgtctccaagtagtcagcagcatgagtgcataagagggccgtaacctcttcccccttgtcccaaactcaaagtgctgggatgcagaaaggaccacaaatagctgtaccttgtttgaacattagtgtattaatccagctgggtagccattatttgtttcaaaacagaatttagagccatcctagaagctgagaatggtattttcgaaggtagcccagttgactaaaattgttctgtgttggttttgtcttctctccccncgagtattgcggt

SEQ ID NO: 316137 - DNA, 1771 bp, Homo sapiens
  misc_feature (1)..(1): n is a, c, g, or t
  misc_feature (20)..(20): n is a, c, g, or t
  misc_feature (81)..(81): n is a, c, g, or t
  misc_feature (100)..(100): n is a, c, g, or t
ntacttgctgaaggaagatnaacctacgagttttccgaagggggctggaatgttcctcttgggaggcttctttggtggtgnaccgtgaacgagatgaaanaggatgatgagctactcccagacaaggatgctgacgaacgtcttcttcgtcttactggagatctactccttctatgccttggtggaggaggcattcttcttggcggagttcttcttcgaggagatgactaggcccattaggagagtctccaggactccggaacctaaaaagataaaaaaggctgcttccccaagcccacagtctgtaagaagggtctcatcctcccgatctgtctccgggtctcctgagccagcagctaaaaagcccccagcacctccatcccccgtccagtctcagtcaccgtctacaaactggtcaccagctgtaccggtcaaaaaggccaaaagcccaacaccgagcccatcaccgccaagaaattcagatcaggaaggaggtggaaagaaaaagaagaaaaagaaggacaagaaacacaaaaaggataagaagcacaagaagcacaaaaaacacaagaaggaaaaggctgtggctgcagctgctgcagctgctgtgacccctgcagccattgcagctgccacaaccacattagcacaggaagagccagtggcagcgccagagccgaagaaggagactgaaagtgaagctgaagataaccttgatgatttagaaaagcacctgcgtgaaaaggccctgagatcaatgaggaaggcccaagtgtccccacagtcttagggggaaatgtttgttatgatgtaaattttatttggtttgtacgcagttcaatttcaaaattgctaaaatgtgtttgagctttagactataacatttgttgtaataattgctaggttgaagttcaacatgtaaaaaaagggggcatggatttacattgcaaaaggtgtccacagtgtattagtgacattctttcattgacagctgacataattcattgagtgaaatattttaagccaaaaaaaaattccctttttaaaaaagggggtttaaatactgttggcatttttatggttcctttaaatgccctagctattcccagaggggtttttttgtttgtttttttggttttgattttctttttgtttttctttcttcttcttatttttttcatttgagtcttagctcccatttaagttatgcttctgaccttgtatggtctgtaagcttgcccagaaataagaccactgttttgaactaccacaaaagtataaatgaatattttaatgccacaatctttcctgttgcctgtggagtctctgctgaaatgaatcaggattcgagctctaggatgagacagaaaatgaaagcatgttgtttgccaggacactgtgggtttatattgatgtgtaacaagttgatttggaacactggactctcattctgttattctggttttgttttttttgttttgttttttttcttttgtaaaggcaatgagctagtcccagaaaggatccttcagttacatacaatttgtttaatgaaatgtcatggctctgttcatatttttgtcttgttcttccaattggtatatacaactttcagagcctcttgtatttggaaggctggaagggcccagactttggaatagtgtcttggtttcactgtttttgttttgattttttttttgttttgattttttttaaactaaagctatataaagcttgtggattaaacagaataaatttctaaatttaaaaa

SEQ ID NO: 316138 - DNA, 1695 bp, Homo sapiens
agaatagatagaggattatggggctttagccaccctctgggaaacataggtaatgtaaattggatatatgttagttgaatcaaccagcaatctaagtggtatatttgaaattcataacctggttgtacagtgtagttggtggttttctcatgtgaagagagatggctgttctcaatgctgaatgttttttcctttttgtctagggctgcttccccaagcccacagtctgtaagaagggtctcatcctcccgatctgtctccgggtctcctgagccagcagctaaaaagcccccagcacctccatcccccgtccagtctcagtcaccgtctacaaactggtcaccagctgtaccggtcaaaaaggccaaaagcccaacaccgagcccatcaccgccaagaaattcagatcaggaaggaggtggaaagaaaaagaagaaaaagaaggacaagaaacacaaaaaggataagaagcacaagaagcacaaaaaacacaagaaggaaaaggctgtggctgcagctgctgcagctgctgtgacccctgcagccattgcagctgccacaaccacattagcacaggaagagccagtggcagcgccagagccgaagaaggagactgaaagtgaagctgaagataaccttgatgatttagaaaagcacctgcgtgaaaaggccctgagatcaatgaggaaggcccaagtgtccccacagtcttagggggaaatgtttgttatgatgtaaattttatttggtttgtacgcagttcaatttcaaaattgctaaaatgtgtttgagctttagactataacatttgttgtaataattgctaggttgaagttcaacatgtaaaaaaagggggcatggatttacattgcaaaaggtgtccacagtgtattagtgacattctttcattgacagctgacataattcattgagtgaaatattttaagccaaaaaaaaattccctttttaaaaaagggggtttaaatactgttggcatttttatggttcctttaaatgccctagctattcccagaggggtttttttgtttgtttttttggttttgattttctttttgtttttctttcttcttcttatttttttcatttgagtcttagctcccatttaagttatgcttctgaccttgtatggtctgtaagcttgcccagaaataagaccactgttttgaactaccacaaaagtataaatgaatattttaatgccacaatctttcctgttgcctgtggagtctctgctgaaatgaatcaggattcgagctctaggatgagacagaaaatgaaagcatgttgtttgccaggacactgtgggtttatattgatgtgtaacaagttgatttggaacactggactctcattctgttattctggttttgttttttttgttttgttttttttcttttgtaaaggcaatgagctagtcccagaaaggatccttcagttacatacaatttgtttaatgaaatgtcatggctctgttcatatttttgtcttgttcttccaattggtatatacaactttcagagcctcttgtatttggaaggctggaagggcccagactttggaatagtgtcttggtttcactgtttttgttttgattttttttttgttttgattttttttaaactaaagctatataaagcttgtggattaaacagaataaatttctaaatttaaaaa

SEQ ID NO: 316139 - DNA, 2118 bp, Homo sapiens
cggggagtttagggcctgacagaagcccgcccccgctggcgctcgtgcgcacgcgtggcgggctctcggcgcactgagcaggcgcggcctcgtgtcggccggagggggcgggcgcaacgacgcgcgctgcgtcccggcgctcggctttccctccgccggtcccgccctccgtcgcggcggcgcggtgtaccctgggatagggagcgatctccgagcgaggcggcaagatggacgcgggatttttccgcggaacaagtgcagaacaggataatcggttcagcaacaaacagaagaaactactgaagcagctgaaatttgcagaatgcctagaaaaaaaggtggacatgagcaaagtaaatttggaggttataaagccttggataacaaaaagagtaacggaaatccttgggtttgaagatgatgttgtgattgagtttatattcaaccagctggaagtgaagaatccagactccaaaatgatgcaaatcaacctgactggatttttgaatggaaaaaatgctcgagaatttatgggagaactgtggcccctgctgctaagtgcacaagaaaacatcgcgggaatcccttctgctttcctagaactgaagaaagaagaaataaaacaaagacagattgaacaagaaaaactggcatctatgaaaaagcaagatgaagacaaagataaaagagataaggaagaaaaagaaagcagcagagaaaaaagggagcggtctcgtagcccaagaagacgcaaatccagatctccttcccctagaagacgatcttcccctgtcaggagagagagaaagcgcagtcattctcgatctccccgtcacagaaccaagagccggagtccttcccctgctccagaaaagaaggaaaaaactccagagctcccagaaccttcagtgaaagtaaaagaaccttcagtacaagaggctacttctactagtgacattctgaaagttcccaaacctgaacctataccagagcctaaagaaccttctccggaaaaaaattccaaaaaagaaaaggagaaggagaagacccgaccacgatctcggtcacgctccaaatcaagatcccggacgcggtcccgctctccttctcacactcgacctagacggcgccatagatcccgatcaagatcgtattcacctagaaggcggccaagcccaagaaggcggccatctcctcgaagaagaactccgccaagaagaatgcctcctccaccaaggcatagaaggagtagatctccagtaagacgaagaagacgttcgtcagcatccttgtctgggagtagctcatcatcctcttcatctcgttcacggtcaccaccaaagaagcctcccaagaggacatccagcccccctcggaaaactcgtaggttatctccttcagcaagtcctccaaggcgaaggcacaggccatcacctcctgcaactccaccacccaaaactcggcattcccctacaccccagcagtcaaaccgtacaagaaaaagtcgtgtttctgtgtctccagggagaacttcaggtaaagtgacaaaacataaaggtactgagaaaagagaatccccttcaccagcaccgaagcctagaaaagtagagttatctgaatcggaagaagataaaggtggcaaaatggctgcagcagattctgtgcagcagagacgccaatacagacgacaaaaccagcagtcttcatctgactctggctcctcctcctcctcagaagatgaacgacccaagagatcccatgtgaagaatggtgaggttggcaggcggcggagacattccccttcccggagtgcttctccatcaccacgaaagcgccaaaaagagacttcccctcggtaacatctttgcttcagtgatgttcactgatgttctgtaattgtgatgaaatttgataacttgggattatttgagaatttggttaactccttcaagtatttggatgtggttggatttttgtttgctttttagggtttctgttttgttttgtttttgctttattggtggttattaataattaatttagaattggtaaattttaaaccaccatgtcatatatgtgtgcatgattagaaaaataaaccaaactattatagcagta

SEQ ID NO: 316140 - DNA, 1653 bp, Homo sapiens
tagtggctaccatattagtacaatctatagtatatcctagaatctagaaaaaaaatcaaagtttctgagtgttttattcctaggagagcccttcagtttctcacttagaaatcactatgacttatttatactagaacttttaagttcattgattacttctcctagctcatatcttataagcaacaaactagaaggtagaattctatttagaggcagagaggtttaccagcagtataaaaggtcagctaacaagagaaacagtcagattgtaaaagacagaaatactgaaaaagaagaaaaagaaggacaagaaacacaaaaaggataagaagcacaagaagcccatcaccgccaagaaattcagatcaggaaggaggtggaaagaaaaagaagaaaaagaaggacaagaaacacaaaaaggataagaagcacaagaagcacaaaaaacacaagaaggaaaaggctgtggctgcagctgctgcagctgctgtgacccctgcagccattgcagctgccacaaccacattagcacaggaagagccagtggcagcgccagagccgaagaaggagactgaaagtgaagctgaagataaccttgatgatttagaaaagcacctgcgtgaaaaggccctgagatcaatgaggaaggcccaagtgtccccacagtcttagggggaaatgtttgttatgatgtaaattttatttggtttgtacgcagttcaatttcaaaattgctaaaatgtgtttgagctttagactataacatttgttgtaataattgctaggttgaagttcaacatgtaaaaaaagggggcatggatttacattgcaaaaggtgtccacagtgtattagtgacattctttcattgacagctgacataattcattgagtgaaatattttaagccaaaaaaaaattccctttttaaaaaagggggtttaaatactgttggcatttttatggttcctttaaatgccctagctattcccagaggggtttttttgtttgtttttttggttttgattttctttttgtttttctttcttcttcttatttttttcatttgagtcttagctcccatttaagttatgcttctgaccttgtatggtctgtaagcttgcccagaaataagaccactgttttgaactaccacaaaagtataaatgaatattttaatgccacaatctttcctgttgcctgtggagtctctgctgaaatgaatcaggattcgagctctaggatgagacagaaaatgaaagcatgttgtttgccaggacactgtgggtttatattgatgtgtaacaagttgatttggaacactggactctcattctgttattctggttttgttttttttgttttgttttttttcttttgtaaaggcaatgagctagtcccagaaaggatccttcagttacatacaatttgtttaatgaaatgtcatggctctgttcatatttttgtcttgttcttccaattggtatatacaactttcagagcctcttgtatttggaaggctggaagggcccagactttggaatagtgtcttggtttcactgtttttgttttgattttttttttgttttgattttttttaaactaaagctatataaagcttgtggattaaacagaataaatttctaaatttaaaaa

SEQ ID NO: 316141 - DNA, 1280 bp, Homo sapiens
cggacgcgtgggtcgacccacgcgtccgggacaagaaacacaaaaaggataagaagcacaagaagcacaaaaaacacaagaaggaaaaggctgtggctgcagctgctgcagctgctgtgacccctgcagccattgcagctgccacaaccacattagcacaggaagagccagtggcagcgccagagccgaagaaggagactgaaagtgaagctgaagataaccttgatgatttagaaaagcacctgcgtgaaaaggccctgagatcaatgaggaaggcccaagtgtccccacagtcttagggggaaatgtttgttatgatgtaaattttatttggtttgtacgcagttcaatttcaaaattgctaaaatgtgtttgagctttagactataacatttgttgtaataattgctaggttgaagttcaacatgtaaaaaaagggggcatggatttacattgcaaaaggtgtccacagtgtattagtgacattctttcattgacagctgacataattcattgagtgaaatattttaagccaaaaaaaaattccctttttaaaaaagggggtttaaatactgttggcatttttatggttcctttaaatgccctagctattcccagaggggtttttttgtttgtttttttggttttgattttctttttgtttttctttcttcttcttatttttttcatttgagtcttagctcccatttaagttatgcttctgaccttgtatggtctgtaagcttgcccagaaataagaccactgttttgaactaccacaaaagtataaatgaatattttaatgccacaatctttcctgttgcctgtggagtctctgctgaaatgaatcaggattcgagctctaggatgagacagaaaatgaaagcatgttgtttgccaggacactgtgggtttatattgatgtgtaacaagttgatttggaacactggactctcattctgttattctggttttgttttttttgttttgttttttttcttttgtaaaggcaatgagctagtcccagaaaggatccttcagttacatacaatttgtttaatgaaatgtcatggctctgttcatatttttgtcttgttcttccaattggtatatacaactttcagagcctcttgtatttggaaggctggaagggcccagactttggaatagtgtcttggtttcactgtttttgttttgattttttttttgttttgattttttttaaactaaagctatataaagcttgtggattaaacagaataaatttctaaatttaaaaa

SEQ ID NO: 316142 - DNA, 1799 bp, Homo sapiens
cggggagtttagggcctgacagaagcccgcccccgctggcgctcgtgcgcacgcgtggcgggctctcggcgcactgagcaggcgcggcctcgtgtcggccggagggggcgggcgcaacgacgcgcgctgcgtcccggcgctcggctttccctccgccggtcccgccctccgtcgcggcggcgcggtgtaccctgggatagggagcgatctccgagcgaggcggcaagatggacgcgggatttttccgcggaacaagtgcagaacaggataatcggttcagcaacaaacagaagaaactactgaagcagctgaaatttgcagaatgcctagaaaaaaaggtggacatgagcaaagtaaatttggaggttataaagccttggataacaaaaagagtaacggaaatccttgggtttgaagatgatgttgtgattgagtttatattcaaccagctggaagtgaagaatccagactccaaaatgatgcaaatcaacctgactggatttttgaatggaaaaaatgctcgagaatttatgggagaactgtggcccctgctgctaagtgcacaagaaaacatcgcgggaatcccttctgctttcctagaactgaagaaagaagaaataaaacaaagacagattgaacaagaaaaactggcatctatgaaaaagcaagatgaagacaaagataaaagagataaggaagaaaaagaaagcagcagagaaaaaagggagcggtctcgtagcccaagaagacgcaaatccagatctccttcccctagaagacgatcttcccctgtcaggagagagagaaagcgcagtcattctcgatctccccgtcacagaaccaagagccggagtccttcccctgctccagaaaagaaggaaaaaactccagagctcccagaaccttcagtgaaagtaaaagaaccttcagtacaagaggctacttctactagtgacattctgaaagttcccaaacctgaacctataccagagcctaaagaaccttctccggaaaaaaattccaaaaaagaaaaggagaaggagaagacccgaccacgatctcggtcacgctccaaatcaagatcccggacgcggtcccgctctccttctcacactcgacctagacggcgccatagatcccgatcaagatcgtattcacctagaaggcggccaagcccaagaaggcggccatctcctcgaagaagaactccgccaagaagaatgcctcctccaccaaggcatagaaggagtagatctccagtaagacgaagaagacgttcgtcagcatccttgtctgggagtagctcatcatcctcttcatctcgttcacggtcaccaccaaagaagcctcccaagaggacatccagcccccctcggaaaactcgtaggttatctccttcagcaagtcctccaaggcgaaggcacaggccatcacctcctgcaactccaccacccaaaactcggcattcccctacaccccagcagtcaaaccgtacaagaaaaagtcgtgtttctgtgtctccagggagaacttcaggtaaagtgacaaaacataaaggtactgagaaaagagaatccccttcaccagcaccgaagcctagaaaagtagagttatctgaatcgggtaagtttgttgtttttttttgtgattttggtttgtttgtttttgtttttcttaaagctgattttgattttttgcacatttggtcatccccttctgcttgaagattaagtatagggtaagagctaagactctgaaggcagacagacttgggtggaatcccccattccagaatttaa

SEQ ID NO: 316143 - DNA, 1527 bp, Homo sapiens
cggggagtttagggcctgacagaagcccgcccccgctggcgctcgtgcgcacgcgtggcgggctctcggcgcactgagcaggcgcggcctcgtgtcggccggagggggcgggcgcaacgacgcgcgctgcgtcccggcgctcggctttccctccgccggtcccgccctccgtcgcggcggcgcggtgtaccctgggatagggagcgatctccgagcgaggcggcaagatggacgcgggatttttccgcggaacaagtgcagaacaggataatcggttcagcaacaaacagaagaaactactgaagcagctgaaatttgcagaatgcctagaaaaaaaggtggacatgagcaaagtaaatttggaggttataaagccttggataacaaaaagagtaacggaaatccttgggtttgaagatgatgttgtgattgagtttatattcaaccagctggaagtgaagaatccagactccaaaatgatgcaaatcaacctgactggatttttgaatggaaaaaatgctcgagaatttatgggagaactgtggcccctgctgctaagtgcacaagaaaacatcgcgggaatcccttctgctttcctagaactgaagaaagaagaaataaaacaaagacagattgaacaagaaaaactggcatctatgaaaaagcaagatgaagacaaagataaaagagataaggaagaaaaagaaagcagcagagaaaaaagggagcggtctcgtagcccaagaagacgcaaatccagatctccttcccctagaagacgatcttcccctgtcaggagagagagaaagcgcagtcattctcgatctccccgtcacagaaccaagagccggagtccttcccctgctccagaaaagaaggaaaaaactccagagctcccagaaccttcagtgaaagtaaaagaaccttcagtacaagaggctacttctactagtgacattctgaaagttcccaaacctgaacctataccagagcctaaagaaccttctccggaaaaaaattccaaaaaagaaaaggagaaggagaagacccgaccacgatctcggtcacgctccaaatcaagatcccggacgcggtcccgctctccttctcacactcgacctagacggcgccatagatcccgatcaagatcgtattcacctagaaggcggccaagcccaagaaggcggccatctcctcgaagaagaactccgccaagaagaatgcctcctccaccaaggcatagaaggagtagatctccagtaagacgaagaagacgttcgtcagcatccttgtctgggagtagctcatcatcctcttcatctcgttcacggtcaccaccaaagaagcctcccaagaggacatccaggtgcgtaggcgacggcgtatgcgccttgtctatgcagacaccatcaaggacctcctggccaactgcgccattcagggcgatctggagagcagagactgtagccgcatggtgccggctgagaagacccgtgcggagagtgtggagctggtcctgcctcccca

SEQ ID NO: 316144 - DNA, 1384 bp, Homo sapiens
cggggagtttagggcctgacagaagcccgcccccgctggcgctcgtgcgcacgcgtggcgggctctcggcgcactgagcaggcgcggcctcgtgtcggccggagggggcgggcgcaacgacgcgcgctgcgtcccggcgctcggctttccctccgccggtcccgccctccgtcgcggcggcgcggtgtaccctgggatagggagcgatctccgagcgaggcggcaagatggacgcgggatttttccgcggaacaagtgcagaacaggataatcggttcagcaacaaacagaagaaactactgaagcagctgaaatttgcagaatgcctagaaaaaaaggtggacatgagcaaagtaaatttggaggttataaagccttggataacaaaaagagtaacggaaatccttgggtttgaagatgatgttgtgattgagtttatattcaaccagctggaagtgaagaatccagactccaaaatgatgcaaatcaacctgactggatttttgaatggaaaaaatgctcgagaatttatgggagaactgtggcccctgctgctaagtgcacaagaaaacatcgcgggaatcccttctgctttcctagaactgaagaaagaagaaataaaacaaagacagattgaacaagaaaaactggcatctatgaaaaagcaagatgaagacaaagataaaagagataaggaagaaaaagaaagcagcagagaaaaaagggagcggtctcgtagcccaagaagacgcaaatccagatctccttcccctagaagacgatcttcccctgtcaggagagagagaaagcgcagtcattctcgatctccccgtcacagaaccaagagccggagtccttcccctgctccagaaaagaaggaaaaaactccagagctcccagaaccttcagtgaaagtaaaagaaccttcagtacaagaggctacttctactagtgacattctgaaagttcccaaacctgaacctataccagagcctaaagaaccttctccggaaaaaaattccaaaaaagaaaaggagaaggagaagacccgaccacgatctcggtcacgctccaaatcaagatcccggacgcggtcccgctctccttctcacactcgacctagacggcgccatagatcccgatcaagatcgtattcacctagaaggcggccaagcccaagaaggcggccatctcctcgaagaagaactccgccaagaagaatgcctcctccaccaaggcatagaaggagtagatctccagtaagacgaagaacgacgttcgtcagcactcctgctctgggcagctagcctcactcatcctccttcactcttcgaccttttgaccgcgctacggcgtacccgagcctcgaaattcgctaactcat

SEQ ID NO: 316145 - DNA, 979 bp, Homo sapiens
cggggagtttagggcctgacagaagcccgcccccgctggcgctcgtgcgcacgcgtggcgggctctcggcgcactgagcaggcgcggcctcgtgtcggccggagggggcgggcgcaacgacgcgcgctgcgtcccggcgctcggctttccctccgccggtcccgccctccgtcgcggcggcgcggtgtaccctgggatagggagcgatctccgagcgaggcggcaagatggacgcgggatttttccgcggaacaagtgcagaacaggataatcggttcagcaacaaacagaagaaactactgaagcagctgaaatttgcagaatgcctagaaaaaaaggtggacatgagcaaagtaaatttggaggttataaagccttggataacaaaaagagtaacggaaatccttgggtttgaagatgatgttgtgattgagtttatattcaaccagctggaagtgaaggcctgaaccaaaatggaagttattccttgcgtctgaagtatagcaccatcaccttattaggtcacagcagagtgagtgtcccaatgtcgctctgacccaactcccttgatgatgcagtgtgtgtttggaggtgagttgtgtaaagtggccaaacatcaacaacaacaacaaaaaacacaaacaggaaagagcaattgggtaaagctgtacactgctcttttaaaatactattatgagatggacatttatgtgaagcatgaggggcaattctgatttgattggatattgtttttaaaggaactaaggtctttgtagctgcatgtcagctagtcatcagttacattttagagacaggatttttgtttatacttaaacttcagacaaattggcagcatataattgttcctttatacatgagataatatgatgatataactgatgtttaagaacattcttattgtaagacagtttctgttttgccacagcaacccaaaggacagttaagatatgtaccatat

SEQ ID NO: 316146 - DNA, 205 bp, Homo sapiens
gcggaggttgcagtgagccaagatcatgccattgcactccagcctgggcgacagagtgagacgccatcacacacacacaaaaaaaagaaaaaaaattaactataattcttcttggtttagtggtagacggaggagaagtccatccccaccacccaccagaaggcgacggtctccttctcccgcccctcctcctcgacggcgcagg

SEQ ID NO: 316147 - DNA, 484 bp, Homo sapiens
atgagctagtcccagaaaggatccttcagttacatacaatttgtttaatgaaatgtcatggctctgttcatatttttgtcttgttcttccaattggtatatacaactttcagagcctcttgtatttggaaggctggaagggcccagactttggaatagtgtcttggtttcactgtttttgttttgattttttttttgttttgattttttttaaactaaagctatataaagcttgtggattaaacagaataaatttctaaatttaaaaattttgccactcttacttagtagtgcttatgtaaaccttttggtgtgttgggagttgggcaggggaaagaaaaggtgatgaaattaaggttttaccatctttatttcaataattactgtggtgagtgctataaagggaatcagcatgtgattggaacatttagaatactggtgggagaagtccaccaggcaaagagaacaggattgcagtcagacaa

SEQ ID NO: 316148 - DNA, 5277 bp, Homo sapiens
  misc_feature (1816)..(1816): n is a, c, g, or t
tttttttgtcagccgggttcaatgcgccatattgaagaggacgggtctaatagatcgctggagacacaatttaactgaaccccgcccgttgtggactgactttgatgctctgagtccctccctccttcacgccgctagcaggccctgatgtagattgcctttgtcttacttgggacgtttacctgagcgcttggtgctggtgtcgggaccgggagataggagtgtctcaggagagacctggccgaaaaccgcgagaaagaaaagtgaagcctagtgaaactgcctttgcagtgactcaagaaaaactcatcacctggagtccgtgtaagctcggcgacagccctagcagcgaggccaaaacagtttgggaagaaagaaaacctaaagtatttgccgttggtgattcaagggaatcaaacttgacgtatggagccaagaaagcccttggaaaaactggcctcatattttgtgtacacagtccctgtacagggtttctgacctgtgagtcactgaaaactaagctgcgctttcctaaagtcctgcgaactgaagccagacaacttaaacctcagaagaaaataacagcaacctatttatatacataagccactttcatacctgcctactgttgtatagacttcagagtaatgtggcctgtatcgattttccaggagtattcttttgtgtgttgttttttctcaattcctcctattttctctttacaggatgtgagacttcacaacctgctaaaaatgagctttcaggacctacccatataggaataaaccatcctagccatgagagatcagatgaaacctgagaccagagagactcatttgtttcaaaatagtttctccaaaagattttataaaagaaaaggctggggggagtgggatatgaaaggaaaatgaatcttggggcccccaaatcactaagctcaagggataagtcaagttagaaactgttcagggccaacttaccttgcattctattcaaattcacccctctgctcacttagatgcatatctgattgtaatcagaaactcaaaagaatgcagcagtttgtctctcacctatctatgacctggaagcccccttccccgtttgagtcttcctgcctttgcttcactttatccctgcctttctagactgaaccaacatacttcttagatatattgattgatgtctcatgtctccctaaaatgtataaaactaagctgggccccaaccaccttgggcacatgtcgttaggacttcctgagactgtgtcacaagtttgtgtccacaactttgacaaaataaactttttaaattaactgagacctgtcctaaatttttagggttccatcagatatgcatttctctcacctgagcatcagagggatgatttcgagttctctgtgttttttgtccacaggaatttccttgtgggcaaattctgagggagggatgtagcttttttatgtttggagctattttatttagaaataaaatgggaggcaggtttgcctgagtcagttgcctgcttgacttcctttggcttagtcattttggagtcctgagatttattttcttttcacatacctgttttatttatgatggtttatggtcattgaaccttgtaacattgattacatttcttttcactggtcttttttcttaagtagataaacttatttttaacttgggcacaagagagcataaaaattatatgaggtacatagcctgcttaaatagaatatttaaaatacgttttgtccacagagctggaattctttgtaaatgaaaaccaaattttacttaatttttagagatnggatcttggctttgtcgcctaggctagagtgctgtgggggcaatcatagcccactgcaacctcgaattcctggcttaagtgatcctcccatctcagcctcctgggtgcttggacaacagacatgacaccttacctggctagttaaaaaaaattttttttgtagagatgggctttgcctgtgtggcccaggctgctcttgaactcctaggttcaagtgatcctccagcttgggccttccgaagtgctgggattacattgcttccagctttagttttttaaatgtttaacttgtttaacttatttaacttgctgtttattatttaatggagagcttttagtgtttgtcttttgaggtgggatcttgccatgcccagactagccttgaagtcctacagtcaagtgatctttgcatctcagtctcccaagaagtagtggtagagaatttttatgttacattcctttctctgtgtatatgtttgtgggaggacatatgtccctttgtatgtttgggcatatatattttttgtgtgaaagttatgcatgttattgttgatcaatacaagaggtttagaggccagagaagagaaataaaatgggaaaaactacaaacattctacctcccatgataccatgctataatggcaatcataatatttatgtattttttacttttttgtgttcatttttaaaaattagataaaaatagtttaagctagaggcttctctctttcatctttttttttctaatttaagttttccctaagtaggaattttggtaatacttcattatattgatgtatcaagatttctttagtttctcctttgttgtctttaggttgtctacaatattttttgtcattgtgaatatgctgtcatgaacattttgatgctgattattaccagattagtgtgttgtgtcaaagttttcatcagttggattatttttcagtttagtaagtgatgcaagccaaaactaaaactctaaggcaccttctccccacccaaccagtcatctgagtagacttcctcctcagccagggcagtcatagcccactgcaaccagccagcccctttccattccagtatccctttccctttaataaaatttaaggccaaacatggtggttcaatgcctgtaatgccagcactttgggaggctgaggtgggcggatcatgaggtcaggagataaagaccattctgggaaacatggtgaaacactgtctctactaaaagtataaaaattagctggatgtggtggcatgtggctgtggtctcagctactcgggaggctgctgaggcaggagaatcgcttgaacctggggaggcagaggttgcagtgagcagagatcatgccactacactttagtctggtgacagaatgagactccatctcaaaaaaaaaaaaatgatttgtgagatgaatttgttttgaaaatattagcttgttttcagttgtgatacatttgaagttggtacagagtccattttcttttatgtgttaatgtattgacaatatagttgtgttgacaacttcttttcttatttccagttcagtctttacagaagctgacgagagatttccttgtattttatggtggtatgattggccttagagcacttcagttttgagatctctgctgtatttgtatacaagtattttggaaggtcagttgataggatgaatgaaaaacaaaaattggaagtaatggtactagtaataagtggggattttcatgtaggtaaaggaactgataagtcatagggaatccgtgagttcttaatcttactgagtttagttgtgttctttgattattttggatagctttgtttaacggtgaatgaaatgattaaaatggaaaaattaagtgcagaaaatatgtttaacattatataggatgtcttgttttaggcatttattgctagataacatatgtccattcttgtattgctataaagaaatattggatactggctaatttataaataaaagagatttattggctcatgattctgcaggctgtacaggaaatatgattctggaatccgcttggcttctggaaaggcctcaggaaacttagaatgatgacacaaggcagaggggaagcaggcacatcttacatggcaggagcagggagcaagaaagagtgaagcgggaggtgctacacacttttaataatccagatctgagtcaggcatagcagcttatgcctataatcccagcacttttgggaggccaaggcaggcagatcacctgagggtcaggagttcaaggccagcctggccaacatggtgaaacctcatgtctactaaaagtacaaaaattagctgggtgtggttgcacctgcttataatcccagctgctcaggaggctgaggcaggagaattgcttgaacccgggaggcagatgtttcagtgaaccaagattgcaccactgcactccagcctgggtgaacagagtaagactctgccttaaaagtaaaataaaattaaattaaaattaaaaaccagatcttgcaagaactcactgtcagaagaacagcaccaagggtatggtgctgaaccattcatgaaggagccatcctcaagatccagtcatctcataccaggtccacctccatctaatattgggaattacaattcatcatgagggttggtggagacatggatccaagccatgtcacatattatcctgactgtagtggtttaagataacaatttttatctcacaatttattttgaatacaggcatgatttagctgtgtcctttggttcagtatctcttcaaagctgtaatcaggtttttcatgtgtttgtcatcaactgaaagattgactgagtatggttctgagatctctcaggtgattattggcagaattaagttccttttcgattcttggtcttatttcttcacccatctactatagtgcattcttgccatgcagccctttttatggagcaagtcacaatacagcagcttgcttcattagggcaagcaagcaagacaagctgcagcaaatgcaagtaacatggaagtctttataatctaatcatggaattgacatagttaaaaacaaatcattaggtaggctccaaattgatcagaacatggttattggacaaaaccatgactgtcaggaggctgcatcatggggagccattttacaagcagcaccatgggtgttatgggggattttattacatttgttctgctcttaagagttgaaagtctttaaaaatgtgtaagtctgtcgtttgttcttgacttctgtcatgttttcaagaatgcattatgcaatgatgtagaatactgtttgtaaagtagttgtctagactctagtgaaaataattacagataatctcagttcatcaacgaatcggtatattaatgtcatatttaacagttataggaataaactaagcataataataaatgatgatttgaatgttattataattatta

SEQ ID NO: 316149 - DNA, 344 bp, Homo sapiens
tcaaactttattcttacagtttgggaagaaagaaaacctaaagtatttgccgttggtgattcaagggaatcaaacttgacgtatggagccaagaaagcccttggaaaaactggcctcatattttgtgtacacagtccctgtacagggtttctgacctgtgttcagtctttacagaagctgacgagagatttccttgtattttatggtggtatgattggccttagagcacttcagttttgagatctctgctgtatttgtatacaagtattttggaagagagcttggagataattctggtggctgtgtggagtatgtgttggaggtgagttgctagctgaagaatt

SEQ ID NO: 316150 - DNA, 10047 bp, Homo sapiens
tgaataattgaactttgtttatttctccatatttttgcagtggtaattccattataaaacctaatgaaacaatgtttttatagatggtgtggaaagacttttctgggctcagaggtgaaactgacccttgtgtatcagcagcatttctgactgactgagagagtgtagtgattaacagagttgtgatgttagttaagaaacttagatttgccattgtagcttttctaccaattagcagattgtttaactcactgaaattgtaaagtggtagacgtggacttagtcattactgggcagcttatgaattgtattcatttactcatgatgtaaaaatggttagtctccacttttaaggctctagttctagtggctaaataggtacttatttatacagtatgataactgctgtattaaaatacatgtctcaaatgtggaatagtagaagaggtgaagaaaatcatagtttgaggtagaatactgtttgctggtcttaaaaactgtggtattttggtgattccataaattaggtcagatacttccactggagggaaacagtttaaaggatatatgtgatactattaatagaatgaggaagacacaccagatatttaggagggaattagcgagcttgaaactaagagctggtttgaatgagactgggtcataagtgatttcaagtaccagattaaggcactgagattttatttttaagcactgaagtcagattttttccttttaaaagaaaggattcatgatgaaatctgctttttgttttgcagagagcttggagataattctggtggctgtgtggagtatgtgttggaggtattaaattttcacagtatatataaggcagcaattgataggcctttcacagattcttctgataactacataaagagacaaaaaaaagaaaaaagagcaaagatctgtgctgtgtcaagtatgacagccatcactcatggctctccagtaggagggaacgacagccagggccaggttcttgatggccagtctcagcatctcttccaacagaaccagacttcatcacctgattcttccaatgagaattccgtagcaactcctcctccagaggaacaagggcaaggtgatgccccaccacagcatgaagatgaagagcctgcatttccacatactgagctggcaaacctggatgacatgatcaacaggcctcgatgggtggttcctgttttgccaaaaggggaattagaagtgcttttagaagctgctattgatcttagtgtaaaaggccttgatgttaaaagtgaagcatgccaacgtttttttcgagatggactaacaatatctttcactaaaattcttatggatgaggctgtgagtggctggaagtttgaaattcatagatgtattattaacaatactcatcgcctagtggagctttgtgtggccaagttgtcccaagattggtttccacttctagaacttctcgccatggccttaaatcctcactgcaagtttcatatctacaatggtacacgtccgtgtgaattaatttcctcaaatgctcagttgcctgaagaagaattatttgctcgttcttcagatcctcgatcaccaaaaggttggctagtggatctcatcaataaatttggcacattaaatgggttccagattttgcatgatcgtttttttaatggatcagcattaaatattcaaataattgcagctcttattaaaccatttggacaatgctatgagtttctcagtcaacatacactgaaaaagtacttcattccagttatagaaatagttccacatttattggaaaacttaactgatgaagaactgaaaaaggaggcaaagaatgaagccaaaaatgatgccctttcaatgattattaaatctttgaagaacttagcttcaagaatttcaggacaagatgagactataaaaaatttggaaatttttaggttaaagatgatactcagattgttgcaaatttcctcttttaatggaaagatgaatgcactgaatgaaataaataaggttatatctagtgtatcatattatactcatcggcatagtaatcctgaggaggaagaatggctgacagctgagcgaatggcagaatggatacagcaaaataatatcttatccatagtcttgcaagacagtcttcatcaaccacaatatgtagaaaagctagagaaaattcttcgttttgtgattaaagaaaaggctcttacattacaggaccttgataatatctgggcagcacaggcaggaaaacatgaagccattgtgaagaatgtacatgatctgctagcaaagttggcttgggatttttctcctggacaacttgatcatctttttgattgctttaaggcaagttggacaaatgcaagtaaaaagcaacgtgaaaagctccttgagttgatacgccgtcttgcagaagatgataaagatggtgtgatggcacacaaagtgttgaaccttctttggaacctggctcagagtgatgatgtgcctgtagacatcatggaccttgctcttagtgcccacataaaaatactagattatagttgttcccaggatcgagatgcacagaagatccagtggatagatcactttatagaagaacttcgcacaaatgacaagtgggtaattcctgctctgaaacaaataagagaaatttgtagtttgtttggtgaagcatctcaaaatttgagtcaaactcagcgaagtccccacatattttatcgccatgatttaatcaaccagcttcaacaaaatcatgctttagttactttggtagcagaaaaccttgcaacctacatgaatagcatcagattgtatgctggagatcatgaagactatgatccacaaacagtgaggcttggaagtcgatacagtcatgttcaagaagttcaagaacgactaaacttccttagatttttactgaaggatggccaactgtggctctgtgctcctcaggcaaaacaaatatggaagtgcttagcagaaaatgcagtttatctttgtgatcgtgaagcctgttttaagtggtattccaagttaatgggggatgaaccagacttggatcctgatattaataaggacttctttgaaagtaatgtacttcagcttgatccttcccttttaactgaaaatggaatgaaatgctttgaaagatttttcaaagctgtcaattgtcgagaaaggaaactaatagcaaaaagaagatcctatatgatggatgatttggaattaattggactagactacctttggagggttgtgattcagagtagtgacgagattgctaacagagctatagatcttcttaaagagatatacacaaaccttggcccaagattaaaagccaatcaggtggttatccatgaagacttcattcagtcttgctttgatcgtttaaaagcatcatatgatacactgtgtgtttttgatggtgacaaaaacagcattaattgtgcaagacaagaagccattcgaatggttagagtattaactgttataaaagagtacattaatgaatgtgacagtgattatcacaaggaaagaatgattttacctatgtcgagagcattttgtggcaaacacctctctcttatagttcggtttccaaaccagggcagacaggttgatgagttggatatatggtctcatacgaatgacacaattggttcagtacggcgatgtattgttaatcgtattaaagccaatgtagcccacaaaaaaattgaactttttgtgggtggtgagctgatagattctgaagatgacagaaagctaattggacaattaaacttaaaagataaatctctaattacagccaaacttacacaaataaatttcaatatgccatcaagtcctgatagctcttccgattcctcaactgcatctcctggaaaccaccgtaatcattacaatgatggtcccaatctagaggtggaaagttgtttgcctggggtgataatgtcagtgcatcccagatacatctctttcctttggcaagttgcagacttaggtagcaacctgaatatgccacctcttagagatggagcaagagtacttatgaaacttatgccaccagatagaacagctgtagaaaaattacgagctgtttgtttggaccatgcaaaccttggagaaggcaaacttagtccaccccttgactcccttttctttggtccttctgcctcccaagttctatacctaacagaggtagtttatgccttgttaatgcctgctggtgtgcctctaactgatgggtcctctgactttcaagttcacttcttgaaaagtggtggcttacctcttgtactgagtatgctaataagaaataacttcttgccaaatacagatatggaaactcgaaggggtgcttatttaaatgctcttaaaatagccaaactgttgttaactgcgattggctatggccatgttcgagctgtagcagaagcttgtcagccagttgtagatggtacagaccccataacacagattaaccaagttactcatgatcaagcagtggtgctacaaagtgcccttcagagcattcctaatccctcatccgagtgcgtacttagaaatgagtccatacttcttgctcaggaaatatctaatgaggcttcaagatatatgcctgatatttgtgtaattagggctatacagaaaattatctgggcatcagcatgtggggcattaggactattttttagcccaaatgaagaaataactaaaatttatcagatgaccaccaatggaagcaataagctggaggtggaagatgaacaagtttgttgtgaagcactggaagtgatgaccttatgttttgctttacttccaacagcgttggatgcacttagtaaagaaaaagcctggcagaccttcatcattgacttattattgcactgtccaagcaaaactgttcgtcagttggcacaggagcagttctttttaatgtgcaccagatgttgcatgggacacaggcctctgcttttcttcattactttactctttaccatactggggagcacagcaagagagaagggtaaatattcaggtgattatttcacacttttacggcaccttctcaattatgcttacaatggcaatattaacatacccaatgctgaagttcttcttgtcagtgaaattgattggctcaaaaggattagggataatgttaaaaacacaggtgaaacaggtgtcgaagagccaatactggaaggccaccttggggtaacaaaagagttattggcctttcaaacttctgagaaaaagtatcactttggttgtgaaaaaggaggtgctaatctcattaaagaattaattgatgatttcatctttcccgcatccaaagtttacctgcagtatttaagaagtggagaactaccagctgagcaggctattccagtctgtagttcacccgttaccatcaatgccggttttgagctacttgtagcattagctattggctgtgtgaggaatctcaaacagatagtagactgtttgactgaaatgtattacatgggcacagcaattactacttgtgaagcacttactgagtgggaatatctgccccctgttggaccccgcccaccaaaaggatttgtgggactcaaaaatgctggtgctacgtgttacatgaactctgtgatccagcagctatacatgattccttctatcaggaacagtattcttgcaattgaaggcacaggtagtgatttacacgatgatatgttcggggatgagaagcaggacagtgagagtaatgttgatccccgagatgatgtatttggatatcctcatcaatttgaagacaagccagcattaagtaagacagaagataggaaagagtataatattggtgtcctaagacaccttcaggtcatctttggtcatttagctgcttcccaactacaatactatgtacccagaggattttggaaacagttcaggctttggggtgaacctgttaatctccgtgaacaacatgatgccttagagttttttaattctttggtggatagtttagatgaagctttaaaagctttaggacacccggctatactaagtaaagtcctaggaggctcctttgctgatcagaagatctgccagggctgcccacataggtttgaatgtgaagaatcttttacaactttgaatgtggatattagaaatcatcaaaatcttcttgactctttggaacagtatatcaaaggagatttattggaaggtgcaaatgcatatcattgtgaaaaatgtgataaaaaggttgacacagtaaagcgcctgctaattaaaaaattgcctcgggttcttgctatccaactcaaacgatttgactatgactgggaaagagaatgtgcaattaaattcaatgattattttgaatttcctcgagagctggatatgggaccttacacagtagcaggtgttgcaaacctggaaagggataatgtaaactcagaaaatgagttgattgaacagaaagagcagtctgacaatgaaactgcaggaggcacaaagtacagacttgtaggagtgcttgtacacagtggtcaagcaagcggtgggcattattattcttacatcattcaaaggaatggtaaagatgatcagacagatcactggtataaatttgatgatggagatgtaacagaatgcaaaatggatgatgatgaagaaatgaaaaatcagtgttttggtggagagtacatgggagaagtatttgatcacatgatgaagcgcatgtcatataggcgacagaagaggtggtggaatgcttacatacctttttatgaacaaatggatatgatagatgaagatgatgagatgataagatacatatcagagctaactattgcaagaccccatcagatcattatgtcaccagccattgagagaagtgtacggaaacaaaatgtgaaatttatgcataaccgattgcaatatagtttagagtattttcagtttgtgaaaaaactgcttacatgtaatggtgtttatttaaaccctgctccagggcaggattatttgttgcctgaagcagaagaaattactatgattagtattcagcttgctgctagattcctctttaccactggatttcacaccaagaaaatagttcgtggtcctgccagtgactggtatgatgcactgtgcgttcttctccgtcacagcaaaaatgtacgtttttggtttactcataatgtcctttttaatgtatcaaatcgcttctctgaatacctcctggagtgccctagtgcagaagtgaggggtgcatttgcaaaacttatagtgtttattgcacacttttccttgcaagatgggtcttgtccttctccttttgcatctccaggaccttctagtcaggcatgtgataacttgagcttgagtgaccacttactaagagccacactaaatctcttgagaagggaagtttcagagcatggacatcatttacagcaatattttaatttgtttgtaatgtatgccaatttaggtgtggcagaaaaaacacagcttctgaaattgaatgtacctgctacctttatgcttgtgtctttagacgaaggaccaggtcctccaatcaaatatcagtatgctgaattaggcaagttatattcagtagtgtctcagctgattcgttgttgcaatgtgtcatcaacaatgcagtcttcaatcaatggtaatccccctctccccaatcctttcggtgaccttaatttatcacagcctataatgccaattcagcagaatgtgttagacattttatttgtgagaacaagttatgtgaagaaaattattgaagactgcagtaactcagaggataccatcaaattacttcgcttttgctcttgggagaatcctcagttctcatctactgtcctcagcgaacttctctggcaggttgcatattcatatacctatgaacttcggccatatttagatctacttttccaaattttactgattgaggactcctggcagactcacagaattcataatgcacttaaaggaattccagatgacagagatgggctgttcgatacaatacagcgctcgaagaatcactatcaaaaacgagcatatcagtgcataaaatgtatggtagctctatttagcagttgtcctgttgcttaccagatcttacagggtaacggagatcttaaaagaaaatggacctgggcagtggaatggctaggagatgaacttgaaagaagaccatatactggcaatcctcagtatagttacaacaattggtctcctccagtacaaagcaatgaaacagcaaatggttatttcttagaaagatcacatagtgctaggatgacacttgcaaaagcttgtgaactctgtccagaagaggagccagatgaccaggatgccccagatgagcatgagccctctccatcagaagatgccccattatatcctcattcacctgcctctcagtatcaacagaataatcatgtacatggacagccatatacaggaccagcagcacatcacttgaacaaccctcagaaaacaggccaacgaacacaagaaaattatgaaggcaatgaagaagtatcctcacctcagatgaaggatcagtgaaaagcaataattaactgcttcctttatgactatgcactaaggtcttatagtccaaactttctctgtgtctggctagtattgaaaactagataaactgctccaaaccaacatggagtaaagagcatattcactggtttatttgcagtaatttgcaatttgtcagtgtataagacacatgcagggtgaagtgtacagagttttgtaacaaatgactggtcctaatctgtaaatgagaaaggtatatatactatgttaatgtctgactgttaattcttaagcaagaaactttttttgatgaaaacaagtcagatctacacagtcacacaattattttttgttgtgttcactacattgtgcaattgatattgcctgctttgagcagtttggtcaacttaccaacttccccccaaaaaagggaacataaaagagcccatctttgtcagtttacaccaatagtttcttgttaatccttctttcctggatatataaggctggtggtaacttttgaattatatggttgatgtggaaaattggcagtgtaacatttctagatacttttcattacctttttattctggtatataggctaaccactttaaagctattcttatgctgtaacagttagcatggcttcacactgtttgtgtagccaagaggacagaattacatgaatgacagtgcccagagtgacagctgtatattgctcagagcttttatttcttatacctagaataaatataaaatgggggaaaaatgtgacagacaagcagtttttcattgcacacatattcttcacatttaatgtttgatagttcaatttcttgagctgaagaatatcaaagtatcgataatacgaattttaaaatattaaaaccaatacacaaaattttcctatgtcagaatgtggtggagcataatagattgtatttggtgtgcttgcgattttttttttccatagaatttattaagtgaagtttctaaaactttgcttctcctgatcccggtgaagtgtacatcataagaatccatagtactttgaagtaccattgcaccaagatgtctgactgaattcatagtcacacttttatttgaaagaaagaattgttgtagttttttttcattattctaaaactcttgttgttagatacaagatttaattaagatctaagctcctgcttatttaatgtaattctaaggtaccattttagaaaaaacatttgttttaagattccaagaaacctgtgagttaatactatatttaaaagagaattggtaaattttgaatgtgtgtaatattttggaacctgtttaaaaaccaaatatacctgcaaatagatacagcctatcctatactatttaaatgtttggctgttttgttttatagaaattattttgctgaattcacaaataaaatttaagaagacttttgtcctg

SEQ ID NO: 316151 - DNA, 12529 bp, Homo sapiens
  misc_feature (1595)..(1595): n is a, c, g, or t
tttttttgtcagccgggttcaatgcgccatattgaagaggacgggtctaatagatcgctggagacacaatttaactgaaccccgcccgttgtggactgactttgatgctctgagtccctccctccttcacgccgctagcaggccctgatgtagattgcctttgtcttacttgggacgtttacctgagcgcttggtgctggtgtcgggaccgggagataggagtgtctcaggagagacctggccgaaaaccgcgagaaagaaaagtgaagcctagtgaaactgcctttgcagtgactcaagaaaaactcatcacctggagtccgtgtaagctcggcgacagccctagcagcgaggccaaaacagtttgggaagaaagaaaacctaaagtatttgccgttggtgattcaagggaatcaaacttgacgtatggagccaagaaagcccttggaaaaactggcctcatattttgtgtacacagtccctgtacagggtttctgacctgtggatgtgagacttcacaacctgctaaaaatgagctttcaggacctacccatataggaataaaccatcctagccatgagagatcagatgaaacctgagaccagagagactcatttgtttcaaaatagtttctccaaaagattttataaaagaaaaggctggggggagtgggatatgaaaggaaaatgaatcttggggcccccaaatcactaagctcaagggataagtcaagttagaaactgttcagggccaacttaccttgcattctattcaaattcacccctctgctcacttagatgcatatctgattgtaatcagaaactcaaaagaatgcagcagtttgtctctcacctatctatgacctggaagcccccttccccgtttgagtcttcctgcctttgcttcactttatccctgcctttctagactgaaccaacatacttcttagatatattgattgatgtctcatgtctccctaaaatgtataaaactaagctgggccccaaccaccttgggcacatgtcgttaggacttcctgagactgtgtcacaagtttgtgtccacaactttgacaaaataaactttttaaattaactgagacctgtcctaaatttttagggttccatcagatatgcatttctctcacctgagcatcagagggatgatttcgagttctctgtgttttttgtccacaggaatttccttgtgggcaaattctgagggagggatgtagcttttttatgtttggagctattttatttagaaataaaatgggaggcaggtttgcctgagtcagttgcctgcttgacttcctttggcttagtcattttggagtcctgagatttattttcttttcacatacctgttttatttatgatggtttatggtcattgaaccttgtaacattgattacatttcttttcactggtcttttttcttaagtagataaacttatttttaacttgggcacaagagagcataaaaattatatgaggtacatagcctgcttaaatagaatatttaaaatacgttttgtccacagagctggaattctttgtaaatgaaaaccaaattttacttaatttttagagatnggatcttggctttgtcgcctaggctagagtgctgtgggggcaatcatagcccactgcaacctcgaattcctggcttaagtgatcctcccatctcagcctcctgggtgcttggacaacagacatgacaccttacctggctagttaaaaaaaattttttttgtagagatgggctttgcctgtgtggcccaggctgctcttgaactcctaggttcaagtgatcctccagcttgggccttccgaagtgctgggattacattgcttccagctttagttttttaaatgtttaacttgtttaacttatttaacttgctgtttattatttaatggagagcttttagtgtttgtcttttgaggtgggatcttgccatgcccagactagccttgaagtcctacagtcaagtgatctttgcatctcagtctcccaagaagtagtggtagagaatttttatgttacattcctttctctgtgtatatgtttgtgggaggacatatgtccctttgtatgtttgggcatatatattttttgtgtgaaagttatgcatgttattgttgatcaatacaagaggtttagaggccagagaagagaaataaaatgggaaaaactacaaacattctacctcccatgataccatgctataatggcaatcataatatttatgtattttttacttttttgtgttcatttttaaaaattagataaaaatagtttaagctagaggcttctctctttcatctttttttttctaatttaagttttccctaagtaggaattttggtaatacttcattatattgatgtatcaagatttctttagtttctcctttgttgtctttaggttgtctacaatattttttgtcattgtgaatatgctgtcatgaacattttgatgctgattattaccagattagtgtgttgtgtcaaagttttcatcagttggattatttttcagtttagtaagtgatgcaagccaaaactaaaactctaaggcaccttctccccacccaaccagtcatctgagtagacttcctcctcagccagggcagtcatagcccactgcaaccagccagcccctttccattccagtatccctttccctttaataaaatttaaggccaaacatggtggttcaatgcctgtaatgccagcactttgggaggctgaggtgggcggatcatgaggtcaggagataaagaccattctgggaaacatggtgaaacactgtctctactaaaagtataaaaattagctggatgtggtggcatgtggctgtggtctcagctactcgggaggctgctgaggcaggagaatcgcttgaacctggggaggcagaggttgcagtgagcagagatcatgccactacactttagtctggtgacagaatgagactccatctcaaaaaaaaaaaaatgatttgtgagatgaatttgttttgaaaatattagcttgttttcagttgtgatacatttgaagttggtacagagtccattttcttttatgtgttaatgtattgacaatatagttgtgttgacaacttcttttcttatttccagttcagtctttacagaagctgacgagagatttccttgtattttatggtggtatgattggccttagagcacttcagttttgagatctctgctgtatttgtatacaagtattttggaagagagcttggagataattctggtggctgtgtggagtatgtgttggaggtattaaattttcacagtatatataaggcagcaattgataggcctttcacagattcttctgataactacataaagagacaaaaaaaagaaaaaagagcaaagatctgtgctgtgtcaagtatgacagccatcactcatggctctccagtaggagggaacgacagccagggccaggttcttgatggccagtctcagcatctcttccaacagaaccagacttcatcacctgattcttccaatgagaattccgtagcaactcctcctccagaggaacaagggcaaggtgatgccccaccacagcatgaagatgaagagcctgcatttccacatactgagctggcaaacctggatgacatgatcaacaggcctcgatgggtggttcctgttttgccaaaaggggaattagaagtgcttttagaagctgctattgatcttagtgtaaaaggccttgatgttaaaagtgaagcatgccaacgtttttttcgagatggactaacaatatctttcactaaaattcttatggatgaggctgtgagtggctggaagtttgaaattcatagatgtattattaacaatactcatcgcctagtggagctttgtgtggccaagttgtcccaagattggtttccacttctagaacttctcgccatggccttaaatcctcactgcaagtttcatatctacaatggtacacgtccgtgtgaattaatttcctcaaatgctcagttgcctgaagaagaattatttgctcgttcttcagatcctcgatcaccaaaaggttggctagtggatctcatcaataaatttggcacattaaatgggttccagattttgcatgatcgtttttttaatggatcagcattaaatattcaaataattgcagctcttattaaaccatttggacaatgctatgagtttctcagtcaacatacactgaaaaagtacttcattccagttatagaaatagttccacatttattggaaaacttaactgatgaagaactgaaaaaggaggcaaagaatgaagccaaaaatgatgccctttcaatgattattaaatctttgaagaacttagcttcaagaatttcaggacaagatgagactataaaaaatttggaaatttttaggttaaagatgatactcagattgttgcaaatttcctcttttaatggaaagatgaatgcactgaatgaaataaataaggttatatctagtgtatcatattatactcatcggcatagtaatcctgaggaggaagaatggctgacagctgagcgaatggcagaatggatacagcaaaataatatcttatccatagtcttgcaagacagtcttcatcaaccacaatatgtagaaaagctagagaaaattcttcgttttgtgattaaagaaaaggctcttacattacaggaccttgataatatctgggcagcacaggcaggaaaacatgaagccattgtgaagaatgtacatgatctgctagcaaagttggcttgggatttttctcctggacaacttgatcatctttttgattgctttaaggcaagttggacaaatgcaagtaaaaagcaacgtgaaaagctccttgagttgatacgccgtcttgcagaagatgataaagatggtgtgatggcacacaaagtgttgaaccttctttggaacctggctcagagtgatgatgtgcctgtagacatcatggaccttgctcttagtgcccacataaaaatactagattatagttgttcccaggatcgagatgcacagaagatccagtggatagatcactttatagaagaacttcgcacaaatgacaagtgggtaattcctgctctgaaacaaataagagaaatttgtagtttgtttggtgaagcatctcaaaatttgagtcaaactcagcgaagtccccacatattttatcgccatgatttaatcaaccagcttcaacaaaatcatgctttagttactttggtagcagaaaaccttgcaacctacatgaatagcatcagattgtatgctggagatcatgaagactatgatccacaaacagtgaggcttggaagtcgatacagtcatgttcaagaagttcaagaacgactaaacttccttagatttttactgaaggatggccaactgtggctctgtgctcctcaggcaaaacaaatatggaagtgcttagcagaaaatgcagtttatctttgtgatcgtgaagcctgttttaagtggtattccaagttaatgggggatgaaccagacttggatcctgatattaataaggacttctttgaaagtaatgtacttcagcttgatccttcccttttaactgaaaatggaatgaaatgctttgaaagatttttcaaagctgtcaattgtcgagaaaggaaactaatagcaaaaagaagatcctatatgatggatgatttggaattaattggactagactacctttggagggttgtgattcagagtagtgacgagattgctaacagagctatagatcttcttaaagagatatacacaaaccttggcccaagattaaaagccaatcaggtggttatccatgaagacttcattcagtcttgctttgatcgtttaaaagcatcatatgatacactgtgtgtttttgatggtgacaaaaacagcattaattgtgcaagacaagaagccattcgaatggttagagtattaactgttataaaagagtacattaatgaatgtgacagtgattatcacaaggaaagaatgattttacctatgtcgagagcattttgtggcaaacacctctctcttatagttcggtttccaaaccagggcagacaggttgatgagttggatatatggtctcatacgaatgacacaattggttcagtacggcgatgtattgttaatcgtattaaagccaatgtagcccacaaaaaaattgaactttttgtgggtggtgagctgatagattctgaagatgacagaaagctaattggacaattaaacttaaaagataaatctctaattacagccaaacttacacaaataaatttcaatatgccatcaagtcctgatagctcttccgattcctcaactgcatctcctggaaaccaccgtaatcattacaatgatggtcccaatctagaggtggaaagttgtttgcctggggtgataatgtcagtgcatcccagatacatctctttcctttggcaagttgcagacttaggtagcaacctgaatatgccacctcttagagatggagcaagagtacttatgaaacttatgccaccagatagaacagctgtagaaaaattacgagctgtttgtttggaccatgcaaaccttggagaaggcaaacttagtccaccccttgactcccttttctttggtccttctgcctcccaagttctatacctaacagaggtagtttatgccttgttaatgcctgctggtgtgcctctaactgatgggtcctctgactttcaagttcacttcttgaaaagtggtggcttacctcttgtactgagtatgctaataagaaataacttcttgccaaatacagatatggaaactcgaaggggtgcttatttaaatgctcttaaaatagccaaactgttgttaactgcgattggctatggccatgttcgagctgtagcagaagcttgtcagccagttgtagatggtacagaccccataacacagattaaccaagttactcatgatcaagcagtggtgctacaaagtgcccttcagagcattcctaatccctcatccgagtgcgtacttagaaatgagtccatacttcttgctcaggaaatatctaatgaggcttcaagatatatgcctgatatttgtgtaattagggctatacagaaaattatctgggcatcagcatgtggggcattaggactattttttagcccaaatgaagaaataactaaaatttatcagatgaccaccaatggaagcaataagctggaggtggaagatgaacaagtttgttgtgaagcactggaagtgatgaccttatgttttgctttacttccaacagcgttggatgcacttagtaaagaaaaagcctggcagaccttcatcattgacttattattgcactgtccaagcaaaactgttcgtcagttggcacaggagcagttctttttaatgtgcaccagatgttgcatgggacacaggcctctgcttttcttcattactttactctttaccatactggggagcacagcaagagagaagggtaaatattcaggtgattatttcacacttttacggcaccttctcaattatgcttacaatggcaatattaacatacccaatgctgaagttcttcttgtcagtgaaattgattggctcaaaaggattagggataatgttaaaaacacaggtgaaacaggtgtcgaagagccaatactggaaggccaccttggggtaacaaaagagttattggcctttcaaacttctgagaaaaagtatcactttggttgtgaaaaaggaggtgctaatctcattaaagaattaattgatgatttcatctttcccgcatccaaagtttacctgcagtatttaagaagtggagaactaccagctgagcaggctattccagtctgtagttcacccgttaccatcaatgccggttttgagctacttgtagcattagctattggctgtgtgaggaatctcaaacagatagtagactgtttgactgaaatgtattacatgggcacagcaattactacttgtgaagcacttactgagtgggaatatctgccccctgttggaccccgcccaccaaaaggatttgtgggactcaaaaatgctggtgctacgtgttacatgaactctgtgatccagcagctatacatgattccttctatcaggaacagtattcttgcaattgaaggcacaggtagtgatttacacgatgatatgttcggggatgagaagcaggacagtgagagtaatgttgatccccgagatgatgtatttggatatcctcatcaatttgaagacaagccagcattaagtaagacagaagataggaaagagtataatattggtgtcctaagacaccttcaggtcatctttggtcatttagctgcttcccaactacaatactatgtacccagaggattttggaaacagttcaggctttggggtgaacctgttaatctccgtgaacaacatgatgccttagagttttttaattctttggtggatagtttagatgaagctttaaaagctttaggacacccggctatactaagtaaagtcctaggaggctcctttgctgatcagaagatctgccagggctgcccacataggtttgaatgtgaagaatcttttacaactttgaatgtggatattagaaatcatcaaaatcttcttgactctttggaacagtatatcaaaggagatttattggaaggtgcaaatgcatatcattgtgaaaaatgtgataaaaaggttgacacagtaaagcgcctgctaattaaaaaattgcctcgggttcttgctatccaactcaaacgatttgactatgactgggaaagagaatgtgcaattaaattcaatgattattttgaatttcctcgagagctggatatgggaccttacacagtagcaggtgttgcaaacctggaaagggataatgtaaactcagaaaatgagttgattgaacagaaagagcagtctgacaatgaaactgcaggaggcacaaagtacagacttgtaggagtgcttgtacacagtggtcaagcaagcggtgggcattattattcttacatcattcaaaggaatggtaaagatgatcagacagatcactggtataaatttgatgatggagatgtaacagaatgcaaaatggatgatgatgaagaaatgaaaaatcagtgttttggtggagagtacatgggagaagtatttgatcacatgatgaagcgcatgtcatataggcgacagaagaggtggtggaatgcttacatacctttttatgaacaaatggatatgatagatgaagatgatgagatgataagatacatatcagagctaactattgcaagaccccatcagatcattatgtcaccagccattgagagaagtgtacggaaacaaaatgtgaaatttatgcataaccgattgcaatatagtttagagtattttcagtttgtgaaaaaactgcttacatgtaatggtgtttatttaaaccctgctccagggcaggattatttgttgcctgaagcagaagaaattactatgattagtattcagcttgctgctagattcctctttaccactggatttcacaccaagaaaatagttcgtggtcctgccagtgactggtatgatgcactgtgcgttcttctccgtcacagcaaaaatgtacgtttttggtttactcataatgtcctttttaatgtatcaaatcgcttctctgaatacctcctggagtgccctagtgcagaagtgaggggtgcatttgcaaaacttatagtgtttattgcacacttttccttgcaagatgggtcttgtccttctccttttgcatctccaggaccttctagtcaggcatgtgataacttgagcttgagtgaccacttactaagagccacactaaatctcttgagaagggaagtttcagagcatggacatcatttacagcaatattttaatttgtttgtaatgtatgccaatttaggtgtggcagaaaaaacacagcttctgaaattgaatgtacctgctacctttatgcttgtgtctttagacgaaggaccaggtcctccaatcaaatatcagtatgctgaattaggcaagttatattcagtagtgtctcagctgattcgttgttgcaatgtgtcatcaacaatgcagtcttcaatcaatggtaatccccctctccccaatcctttcggtgaccttaatttatcacagcctataatgccaattcagcagaatgtgttagacattttatttgtgagaacaagttatgtgaagaaaattattgaagactgcagtaactcagaggataccatcaaattacttcgcttttgctcttgggagaatcctcagttctcatctactgtcctcagcgaacttctctggcaggttgcatattcatatacctatgaacttcggccatatttagatctacttttccaaattttactgattgaggactcctggcagactcacagaattcataatgcacttaaaggaattccagatgacagagatgggctgttcgatacaatacagcgctcgaagaatcactatcaaaaacgagcatatcagtgcataaaatgtatggtagctctatttagcagttgtcctgttgcttaccagatcttacagggtaacggagatcttaaaagaaaatggacctgggcagtggaatggctaggagatgaacttgaaagaagaccatatactggcaatcctcagtatagttacaacaattggtctcctccagtacaaagcaatgaaacagcaaatggttatttcttagaaagatcacatagtgctaggatgacacttgcaaaagcttgtgaactctgtccagaagaggagccagatgaccaggatgccccagatgagcatgagccctctccatcagaagatgccccattatatcctcattcacctgcctctcagtatcaacagaataatcatgtacatggacagccatatacaggaccagcagcacatcacttgaacaaccctcagaaaacaggccaacgaacacaagaaaattatgaaggcaatgaagaagtatcctcacctcagatgaaggatcagtgaaaagcaataattaactgcttcctttatgactatgcactaaggtcttatagtccaaactttctctgtgtctggctagtattgaaaactagataaactgctccaaaccaacatggagtaaagagcatattcactggtttatttgcagtaatttgcaatttgtcagtgtataagacacatgcagggtgaagtgtacagagttttgtaacaaatgactggtcctaatctgtaaatgagaaaggtatatatactatgttaatgtctgactgttaattcttaagcaagaaactttttttgatgaaaacaagtcagatctacacagtcacacaattattttttgttgtgttcactacattgtgcaattgatattgcctgctttgagcagtttggtcaacttaccaacttccccccaaaaaagggaacataaaagagcccatctttgtcagtttacaccaatagtttcttgttaatccttctttcctggatatataaggctggtggtaacttttgaattatatggttgatgtggaaaattggcagtgtaacatttctagatacttttcattacctttttattctggtatataggctaaccactttaaagctattcttatgctgtaacagttagcatggcttcacactgtttgtgtagccaagaggacagaattacatgaatgacagtgcccagagtgacagctgtatattgctcagagcttttatttcttatacctagaataaatataaaatgggggaaaaatgtgacagacaagcagtttttcattgcacacatattcttcacatttaatgtttgatagttcaatttcttgagctgaagaatatcaaagtatcgataatacgaattttaaaatattaaaaccaatacacaaaattttcctatgtcagaatgtggtggagcataatagattgtatttggtgtgcttgcgattttttttttccatagaatttattaagtgaagtttctaaaactttgcttctcctgatcccggtgaagtgtacatcataagaatccatagtactttgaagtaccattgcaccaagatgtctgactgaattcatagtcacacttttatttgaaagaaagaattgttgtagttttttttcattattctaaaactcttgttgttagatacaagatttaattaagatctaagctcctgcttatttaatgtaattctaaggtaccattttagaaaaaacatttgttttaagattccaagaaacctgtgagttaatactatatttaaaagagaattggtaaattttgaatgtgtgtaatattttggaacctgtttaaaaaccaaatatacctgcaaatagatacagcctatcctatactatttaaatgtttggctgttttgttttatagaaattattttgctgaattcacaaataaaatttaagaagacttttgtcctg

SEQ ID NO: 316152 - DNA, 12750 bp, Homo sapiens
  misc_feature (1816)..(1816): n is a, c, g, or t
tttttttgtcagccgggttcaatgcgccatattgaagaggacgggtctaatagatcgctggagacacaatttaactgaaccccgcccgttgtggactgactttgatgctctgagtccctccctccttcacgccgctagcaggccctgatgtagattgcctttgtcttacttgggacgtttacctgagcgcttggtgctggtgtcgggaccgggagataggagtgtctcaggagagacctggccgaaaaccgcgagaaagaaaagtgaagcctagtgaaactgcctttgcagtgactcaagaaaaactcatcacctggagtccgtgtaagctcggcgacagccctagcagcgaggccaaaacagtttgggaagaaagaaaacctaaagtatttgccgttggtgattcaagggaatcaaacttgacgtatggagccaagaaagcccttggaaaaactggcctcatattttgtgtacacagtccctgtacagggtttctgacctgtgagtcactgaaaactaagctgcgctttcctaaagtcctgcgaactgaagccagacaacttaaacctcagaagaaaataacagcaacctatttatatacataagccactttcatacctgcctactgttgtatagacttcagagtaatgtggcctgtatcgattttccaggagtattcttttgtgtgttgttttttctcaattcctcctattttctctttacaggatgtgagacttcacaacctgctaaaaatgagctttcaggacctacccatataggaataaaccatcctagccatgagagatcagatgaaacctgagaccagagagactcatttgtttcaaaatagtttctccaaaagattttataaaagaaaaggctggggggagtgggatatgaaaggaaaatgaatcttggggcccccaaatcactaagctcaagggataagtcaagttagaaactgttcagggccaacttaccttgcattctattcaaattcacccctctgctcacttagatgcatatctgattgtaatcagaaactcaaaagaatgcagcagtttgtctctcacctatctatgacctggaagcccccttccccgtttgagtcttcctgcctttgcttcactttatccctgcctttctagactgaaccaacatacttcttagatatattgattgatgtctcatgtctccctaaaatgtataaaactaagctgggccccaaccaccttgggcacatgtcgttaggacttcctgagactgtgtcacaagtttgtgtccacaactttgacaaaataaactttttaaattaactgagacctgtcctaaatttttagggttccatcagatatgcatttctctcacctgagcatcagagggatgatttcgagttctctgtgttttttgtccacaggaatttccttgtgggcaaattctgagggagggatgtagcttttttatgtttggagctattttatttagaaataaaatgggaggcaggtttgcctgagtcagttgcctgcttgacttcctttggcttagtcattttggagtcctgagatttattttcttttcacatacctgttttatttatgatggtttatggtcattgaaccttgtaacattgattacatttcttttcactggtcttttttcttaagtagataaacttatttttaacttgggcacaagagagcataaaaattatatgaggtacatagcctgcttaaatagaatatttaaaatacgttttgtccacagagctggaattctttgtaaatgaaaaccaaattttacttaatttttagagatnggatcttggctttgtcgcctaggctagagtgctgtgggggcaatcatagcccactgcaacctcgaattcctggcttaagtgatcctcccatctcagcctcctgggtgcttggacaacagacatgacaccttacctggctagttaaaaaaaattttttttgtagagatgggctttgcctgtgtggcccaggctgctcttgaactcctaggttcaagtgatcctccagcttgggccttccgaagtgctgggattacattgcttccagctttagttttttaaatgtttaacttgtttaacttatttaacttgctgtttattatttaatggagagcttttagtgtttgtcttttgaggtgggatcttgccatgcccagactagccttgaagtcctacagtcaagtgatctttgcatctcagtctcccaagaagtagtggtagagaatttttatgttacattcctttctctgtgtatatgtttgtgggaggacatatgtccctttgtatgtttgggcatatatattttttgtgtgaaagttatgcatgttattgttgatcaatacaagaggtttagaggccagagaagagaaataaaatgggaaaaactacaaacattctacctcccatgataccatgctataatggcaatcataatatttatgtattttttacttttttgtgttcatttttaaaaattagataaaaatagtttaagctagaggcttctctctttcatctttttttttctaatttaagttttccctaagtaggaattttggtaatacttcattatattgatgtatcaagatttctttagtttctcctttgttgtctttaggttgtctacaatattttttgtcattgtgaatatgctgtcatgaacattttgatgctgattattaccagattagtgtgttgtgtcaaagttttcatcagttggattatttttcagtttagtaagtgatgcaagccaaaactaaaactctaaggcaccttctccccacccaaccagtcatctgagtagacttcctcctcagccagggcagtcatagcccactgcaaccagccagcccctttccattccagtatccctttccctttaataaaatttaaggccaaacatggtggttcaatgcctgtaatgccagcactttgggaggctgaggtgggcggatcatgaggtcaggagataaagaccattctgggaaacatggtgaaacactgtctctactaaaagtataaaaattagctggatgtggtggcatgtggctgtggtctcagctactcgggaggctgctgaggcaggagaatcgcttgaacctggggaggcagaggttgcagtgagcagagatcatgccactacactttagtctggtgacagaatgagactccatctcaaaaaaaaaaaaatgatttgtgagatgaatttgttttgaaaatattagcttgttttcagttgtgatacatttgaagttggtacagagtccattttcttttatgtgttaatgtattgacaatatagttgtgttgacaacttcttttcttatttccagttcagtctttacagaagctgacgagagatttccttgtattttatggtggtatgattggccttagagcacttcagttttgagatctctgctgtatttgtatacaagtattttggaagagagcttggagataattctggtggctgtgtggagtatgtgttggaggtattaaattttcacagtatatataaggcagcaattgataggcctttcacagattcttctgataactacataaagagacaaaaaaaagaaaaaagagcaaagatctgtgctgtgtcaagtatgacagccatcactcatggctctccagtaggagggaacgacagccagggccaggttcttgatggccagtctcagcatctcttccaacagaaccagacttcatcacctgattcttccaatgagaattccgtagcaactcctcctccagaggaacaagggcaaggtgatgccccaccacagcatgaagatgaagagcctgcatttccacatactgagctggcaaacctggatgacatgatcaacaggcctcgatgggtggttcctgttttgccaaaaggggaattagaagtgcttttagaagctgctattgatcttagtgtaaaaggccttgatgttaaaagtgaagcatgccaacgtttttttcgagatggactaacaatatctttcactaaaattcttatggatgaggctgtgagtggctggaagtttgaaattcatagatgtattattaacaatactcatcgcctagtggagctttgtgtggccaagttgtcccaagattggtttccacttctagaacttctcgccatggccttaaatcctcactgcaagtttcatatctacaatggtacacgtccgtgtgaattaatttcctcaaatgctcagttgcctgaagaagaattatttgctcgttcttcagatcctcgatcaccaaaaggttggctagtggatctcatcaataaatttggcacattaaatgggttccagattttgcatgatcgtttttttaatggatcagcattaaatattcaaataattgcagctcttattaaaccatttggacaatgctatgagtttctcagtcaacatacactgaaaaagtacttcattccagttatagaaatagttccacatttattggaaaacttaactgatgaagaactgaaaaaggaggcaaagaatgaagccaaaaatgatgccctttcaatgattattaaatctttgaagaacttagcttcaagaatttcaggacaagatgagactataaaaaatttggaaatttttaggttaaagatgatactcagattgttgcaaatttcctcttttaatggaaagatgaatgcactgaatgaaataaataaggttatatctagtgtatcatattatactcatcggcatagtaatcctgaggaggaagaatggctgacagctgagcgaatggcagaatggatacagcaaaataatatcttatccatagtcttgcaagacagtcttcatcaaccacaatatgtagaaaagctagagaaaattcttcgttttgtgattaaagaaaaggctcttacattacaggaccttgataatatctgggcagcacaggcaggaaaacatgaagccattgtgaagaatgtacatgatctgctagcaaagttggcttgggatttttctcctggacaacttgatcatctttttgattgctttaaggcaagttggacaaatgcaagtaaaaagcaacgtgaaaagctccttgagttgatacgccgtcttgcagaagatgataaagatggtgtgatggcacacaaagtgttgaaccttctttggaacctggctcagagtgatgatgtgcctgtagacatcatggaccttgctcttagtgcccacataaaaatactagattatagttgttcccaggatcgagatgcacagaagatccagtggatagatcactttatagaagaacttcgcacaaatgacaagtgggtaattcctgctctgaaacaaataagagaaatttgtagtttgtttggtgaagcatctcaaaatttgagtcaaactcagcgaagtccccacatattttatcgccatgatttaatcaaccagcttcaacaaaatcatgctttagttactttggtagcagaaaaccttgcaacctacatgaatagcatcagattgtatgctggagatcatgaagactatgatccacaaacagtgaggcttggaagtcgatacagtcatgttcaagaagttcaagaacgactaaacttccttagatttttactgaaggatggccaactgtggctctgtgctcctcaggcaaaacaaatatggaagtgcttagcagaaaatgcagtttatctttgtgatcgtgaagcctgttttaagtggtattccaagttaatgggggatgaaccagacttggatcctgatattaataaggacttctttgaaagtaatgtacttcagcttgatccttcccttttaactgaaaatggaatgaaatgctttgaaagatttttcaaagctgtcaattgtcgagaaaggaaactaatagcaaaaagaagatcctatatgatggatgatttggaattaattggactagactacctttggagggttgtgattcagagtagtgacgagattgctaacagagctatagatcttcttaaagagatatacacaaaccttggcccaagattaaaagccaatcaggtggttatccatgaagacttcattcagtcttgctttgatcgtttaaaagcatcatatgatacactgtgtgtttttgatggtgacaaaaacagcattaattgtgcaagacaagaagccattcgaatggttagagtattaactgttataaaagagtacattaatgaatgtgacagtgattatcacaaggaaagaatgattttacctatgtcgagagcattttgtggcaaacacctctctcttatagttcggtttccaaaccagggcagacaggttgatgagttggatatatggtctcatacgaatgacacaattggttcagtacggcgatgtattgttaatcgtattaaagccaatgtagcccacaaaaaaattgaactttttgtgggtggtgagctgatagattctgaagatgacagaaagctaattggacaattaaacttaaaagataaatctctaattacagccaaacttacacaaataaatttcaatatgccatcaagtcctgatagctcttccgattcctcaactgcatctcctggaaaccaccgtaatcattacaatgatggtcccaatctagaggtggaaagttgtttgcctggggtgataatgtcagtgcatcccagatacatctctttcctttggcaagttgcagacttaggtagcaacctgaatatgccacctcttagagatggagcaagagtacttatgaaacttatgccaccagatagaacagctgtagaaaaattacgagctgtttgtttggaccatgcaaaccttggagaaggcaaacttagtccaccccttgactcccttttctttggtccttctgcctcccaagttctatacctaacagaggtagtttatgccttgttaatgcctgctggtgtgcctctaactgatgggtcctctgactttcaagttcacttcttgaaaagtggtggcttacctcttgtactgagtatgctaataagaaataacttcttgccaaatacagatatggaaactcgaaggggtgcttatttaaatgctcttaaaatagccaaactgttgttaactgcgattggctatggccatgttcgagctgtagcagaagcttgtcagccagttgtagatggtacagaccccataacacagattaaccaagttactcatgatcaagcagtggtgctacaaagtgcccttcagagcattcctaatccctcatccgagtgcgtacttagaaatgagtccatacttcttgctcaggaaatatctaatgaggcttcaagatatatgcctgatatttgtgtaattagggctatacagaaaattatctgggcatcagcatgtggggcattaggactattttttagcccaaatgaagaaataactaaaatttatcagatgaccaccaatggaagcaataagctggaggtggaagatgaacaagtttgttgtgaagcactggaagtgatgaccttatgttttgctttacttccaacagcgttggatgcacttagtaaagaaaaagcctggcagaccttcatcattgacttattattgcactgtccaagcaaaactgttcgtcagttggcacaggagcagttctttttaatgtgcaccagatgttgcatgggacacaggcctctgcttttcttcattactttactctttaccatactggggagcacagcaagagagaagggtaaatattcaggtgattatttcacacttttacggcaccttctcaattatgcttacaatggcaatattaacatacccaatgctgaagttcttcttgtcagtgaaattgattggctcaaaaggattagggataatgttaaaaacacaggtgaaacaggtgtcgaagagccaatactggaaggccaccttggggtaacaaaagagttattggcctttcaaacttctgagaaaaagtatcactttggttgtgaaaaaggaggtgctaatctcattaaagaattaattgatgatttcatctttcccgcatccaaagtttacctgcagtatttaagaagtggagaactaccagctgagcaggctattccagtctgtagttcacccgttaccatcaatgccggttttgagctacttgtagcattagctattggctgtgtgaggaatctcaaacagatagtagactgtttgactgaaatgtattacatgggcacagcaattactacttgtgaagcacttactgagtgggaatatctgccccctgttggaccccgcccaccaaaaggatttgtgggactcaaaaatgctggtgctacgtgttacatgaactctgtgatccagcagctatacatgattccttctatcaggaacagtattcttgcaattgaaggcacaggtagtgatttacacgatgatatgttcggggatgagaagcaggacagtgagagtaatgttgatccccgagatgatgtatttggatatcctcatcaatttgaagacaagccagcattaagtaagacagaagataggaaagagtataatattggtgtcctaagacaccttcaggtcatctttggtcatttagctgcttcccaactacaatactatgtacccagaggattttggaaacagttcaggctttggggtgaacctgttaatctccgtgaacaacatgatgccttagagttttttaattctttggtggatagtttagatgaagctttaaaagctttaggacacccggctatactaagtaaagtcctaggaggctcctttgctgatcagaagatctgccagggctgcccacataggtttgaatgtgaagaatcttttacaactttgaatgtggatattagaaatcatcaaaatcttcttgactctttggaacagtatatcaaaggagatttattggaaggtgcaaatgcatatcattgtgaaaaatgtgataaaaaggttgacacagtaaagcgcctgctaattaaaaaattgcctcgggttcttgctatccaactcaaacgatttgactatgactgggaaagagaatgtgcaattaaattcaatgattattttgaatttcctcgagagctggatatgggaccttacacagtagcaggtgttgcaaacctggaaagggataatgtaaactcagaaaatgagttgattgaacagaaagagcagtctgacaatgaaactgcaggaggcacaaagtacagacttgtaggagtgcttgtacacagtggtcaagcaagcggtgggcattattattcttacatcattcaaaggaatggtaaagatgatcagacagatcactggtataaatttgatgatggagatgtaacagaatgcaaaatggatgatgatgaagaaatgaaaaatcagtgttttggtggagagtacatgggagaagtatttgatcacatgatgaagcgcatgtcatataggcgacagaagaggtggtggaatgcttacatacctttttatgaacaaatggatatgatagatgaagatgatgagatgataagatacatatcagagctaactattgcaagaccccatcagatcattatgtcaccagccattgagagaagtgtacggaaacaaaatgtgaaatttatgcataaccgattgcaatatagtttagagtattttcagtttgtgaaaaaactgcttacatgtaatggtgtttatttaaaccctgctccagggcaggattatttgttgcctgaagcagaagaaattactatgattagtattcagcttgctgctagattcctctttaccactggatttcacaccaagaaaatagttcgtggtcctgccagtgactggtatgatgcactgtgcgttcttctccgtcacagcaaaaatgtacgtttttggtttactcataatgtcctttttaatgtatcaaatcgcttctctgaatacctcctggagtgccctagtgcagaagtgaggggtgcatttgcaaaacttatagtgtttattgcacacttttccttgcaagatgggtcttgtccttctccttttgcatctccaggaccttctagtcaggcatgtgataacttgagcttgagtgaccacttactaagagccacactaaatctcttgagaagggaagtttcagagcatggacatcatttacagcaatattttaatttgtttgtaatgtatgccaatttaggtgtggcagaaaaaacacagcttctgaaattgaatgtacctgctacctttatgcttgtgtctttagacgaaggaccaggtcctccaatcaaatatcagtatgctgaattaggcaagttatattcagtagtgtctcagctgattcgttgttgcaatgtgtcatcaacaatgcagtcttcaatcaatggtaatccccctctccccaatcctttcggtgaccttaatttatcacagcctataatgccaattcagcagaatgtgttagacattttatttgtgagaacaagttatgtgaagaaaattattgaagactgcagtaactcagaggataccatcaaattacttcgcttttgctcttgggagaatcctcagttctcatctactgtcctcagcgaacttctctggcaggttgcatattcatatacctatgaacttcggccatatttagatctacttttccaaattttactgattgaggactcctggcagactcacagaattcataatgcacttaaaggaattccagatgacagagatgggctgttcgatacaatacagcgctcgaagaatcactatcaaaaacgagcatatcagtgcataaaatgtatggtagctctatttagcagttgtcctgttgcttaccagatcttacagggtaacggagatcttaaaagaaaatggacctgggcagtggaatggctaggagatgaacttgaaagaagaccatatactggcaatcctcagtatagttacaacaattggtctcctccagtacaaagcaatgaaacagcaaatggttatttcttagaaagatcacatagtgctaggatgacacttgcaaaagcttgtgaactctgtccagaagaggagccagatgaccaggatgccccagatgagcatgagccctctccatcagaagatgccccattatatcctcattcacctgcctctcagtatcaacagaataatcatgtacatggacagccatatacaggaccagcagcacatcacttgaacaaccctcagaaaacaggccaacgaacacaagaaaattatgaaggcaatgaagaagtatcctcacctcagatgaaggatcagtgaaaagcaataattaactgcttcctttatgactatgcactaaggtcttatagtccaaactttctctgtgtctggctagtattgaaaactagataaactgctccaaaccaacatggagtaaagagcatattcactggtttatttgcagtaatttgcaatttgtcagtgtataagacacatgcagggtgaagtgtacagagttttgtaacaaatgactggtcctaatctgtaaatgagaaaggtatatatactatgttaatgtctgactgttaattcttaagcaagaaactttttttgatgaaaacaagtcagatctacacagtcacacaattattttttgttgtgttcactacattgtgcaattgatattgcctgctttgagcagtttggtcaacttaccaacttccccccaaaaaagggaacataaaagagcccatctttgtcagtttacaccaatagtttcttgttaatccttctttcctggatatataaggctggtggtaacttttgaattatatggttgatgtggaaaattggcagtgtaacatttctagatacttttcattacctttttattctggtatataggctaaccactttaaagctattcttatgctgtaacagttagcatggcttcacactgtttgtgtagccaagaggacagaattacatgaatgacagtgcccagagtgacagctgtatattgctcagagcttttatttcttatacctagaataaatataaaatgggggaaaaatgtgacagacaagcagtttttcattgcacacatattcttcacatttaatgtttgatagttcaatttcttgagctgaagaatatcaaagtatcgataatacgaattttaaaatattaaaaccaatacacaaaattttcctatgtcagaatgtggtggagcataatagattgtatttggtgtgcttgcgattttttttttccatagaatttattaagtgaagtttctaaaactttgcttctcctgatcccggtgaagtgtacatcataagaatccatagtactttgaagtaccattgcaccaagatgtctgactgaattcatagtcacacttttatttgaaagaaagaattgttgtagttttttttcattattctaaaactcttgttgttagatacaagatttaattaagatctaagctcctgcttatttaatgtaattctaaggtaccattttagaaaaaacatttgttttaagattccaagaaacctgtgagttaatactatatttaaaagagaattggtaaattttgaatgtgtgtaatattttggaacctgtttaaaaaccaaatatacctgcaaatagatacagcctatcctatactatttaaatgtttggctgttttgttttatagaaattattttgctgaattcacaaataaaatttaagaagacttttgtcctg

SEQ ID NO: 316153 - DNA, 12943 bp, Homo sapiens
  misc_feature (1595)..(1595): n is a, c, g, or t
tttttttgtcagccgggttcaatgcgccatattgaagaggacgggtctaatagatcgctggagacacaatttaactgaaccccgcccgttgtggactgactttgatgctctgagtccctccctccttcacgccgctagcaggccctgatgtagattgcctttgtcttacttgggacgtttacctgagcgcttggtgctggtgtcgggaccgggagataggagtgtctcaggagagacctggccgaaaaccgcgagaaagaaaagtgaagcctagtgaaactgcctttgcagtgactcaagaaaaactcatcacctggagtccgtgtaagctcggcgacagccctagcagcgaggccaaaacagtttgggaagaaagaaaacctaaagtatttgccgttggtgattcaagggaatcaaacttgacgtatggagccaagaaagcccttggaaaaactggcctcatattttgtgtacacagtccctgtacagggtttctgacctgtggatgtgagacttcacaacctgctaaaaatgagctttcaggacctacccatataggaataaaccatcctagccatgagagatcagatgaaacctgagaccagagagactcatttgtttcaaaatagtttctccaaaagattttataaaagaaaaggctggggggagtgggatatgaaaggaaaatgaatcttggggcccccaaatcactaagctcaagggataagtcaagttagaaactgttcagggccaacttaccttgcattctattcaaattcacccctctgctcacttagatgcatatctgattgtaatcagaaactcaaaagaatgcagcagtttgtctctcacctatctatgacctggaagcccccttccccgtttgagtcttcctgcctttgcttcactttatccctgcctttctagactgaaccaacatacttcttagatatattgattgatgtctcatgtctccctaaaatgtataaaactaagctgggccccaaccaccttgggcacatgtcgttaggacttcctgagactgtgtcacaagtttgtgtccacaactttgacaaaataaactttttaaattaactgagacctgtcctaaatttttagggttccatcagatatgcatttctctcacctgagcatcagagggatgatttcgagttctctgtgttttttgtccacaggaatttccttgtgggcaaattctgagggagggatgtagcttttttatgtttggagctattttatttagaaataaaatgggaggcaggtttgcctgagtcagttgcctgcttgacttcctttggcttagtcattttggagtcctgagatttattttcttttcacatacctgttttatttatgatggtttatggtcattgaaccttgtaacattgattacatttcttttcactggtcttttttcttaagtagataaacttatttttaacttgggcacaagagagcataaaaattatatgaggtacatagcctgcttaaatagaatatttaaaatacgttttgtccacagagctggaattctttgtaaatgaaaaccaaattttacttaatttttagagatnggatcttggctttgtcgcctaggctagagtgctgtgggggcaatcatagcccactgcaacctcgaattcctggcttaagtgatcctcccatctcagcctcctgggtgcttggacaacagacatgacaccttacctggctagttaaaaaaaattttttttgtagagatgggctttgcctgtgtggcccaggctgctcttgaactcctaggttcaagtgatcctccagcttgggccttccgaagtgctgggattacattgcttccagctttagttttttaaatgtttaacttgtttaacttatttaacttgctgtttattatttaatggagagcttttagtgtttgtcttttgaggtgggatcttgccatgcccagactagccttgaagtcctacagtcaagtgatctttgcatctcagtctcccaagaagtagtggtagagaatttttatgttacattcctttctctgtgtatatgtttgtgggaggacatatgtccctttgtatgtttgggcatatatattttttgtgtgaaagttatgcatgttattgttgatcaatacaagaggtttagaggccagagaagagaaataaaatgggaaaaactacaaacattctacctcccatgataccatgctataatggcaatcataatatttatgtattttttacttttttgtgttcatttttaaaaattagataaaaatagtttaagctagaggcttctctctttcatctttttttttctaatttaagttttccctaagtaggaattttggtaatacttcattatattgatgtatcaagatttctttagtttctcctttgttgtctttaggttgtctacaatattttttgtcattgtgaatatgctgtcatgaacattttgatgctgattattaccagattagtgtgttgtgtcaaagttttcatcagttggattatttttcagtttagtaagtgatgcaagccaaaactaaaactctaaggcaccttctccccacccaaccagtcatctgagtagacttcctcctcagccagggcagtcatagcccactgcaaccagccagcccctttccattccagtatccctttccctttaataaaatttaaggccaaacatggtggttcaatgcctgtaatgccagcactttgggaggctgaggtgggcggatcatgaggtcaggagataaagaccattctgggaaacatggtgaaacactgtctctactaaaagtataaaaattagctggatgtggtggcatgtggctgtggtctcagctactcgggaggctgctgaggcaggagaatcgcttgaacctggggaggcagaggttgcagtgagcagagatcatgccactacactttagtctggtgacagaatgagactccatctcaaaaaaaaaaaaatgatttgtgagatgaatttgttttgaaaatattagcttgttttcagttgtgatacatttgaagttggtacagagtccattttcttttatgtgttaatgtattgacaatatagttgtgttgacaacttcttttcttatttccagttcagtctttacagaagctgacgagagatttccttgtattttatggtggtatgattggccttagagcacttcagttttgagatctctgctgtatttgtatacaagtattttggaagagagcttggagataattctggtggctgtgtggagtatgtgttggaggtattaaattttcacagtatatataaggcagcaattgataggcctttcacagattcttctgataactacataaagagacaaaaaaaagaaaaaagagcaaagatctgtgctgtgtcaagtatgacagccatcactcatggctctccagtaggagggaacgacagccagggccaggttcttgatggccagtctcagcatctcttccaacagaaccagacttcatcacctgattcttccaatgagaattccgtagcaactcctcctccagaggaacaagggcaaggtgatgccccaccacagcatgaagatgaagagcctgcatttccacatactgagctggcaaacctggatgacatgatcaacaggcctcgatgggtggttcctgttttgccaaaaggggaattagaagtgcttttagaagctgctattgatcttagtgtaaaaggccttgatgttaaaagtgaagcatgccaacgtttttttcgagatggactaacaatatctttcactaaaattcttatggatgaggctgtgagtggctggaagtttgaaattcatagatgtattattaacaatactcatcgcctagtggagctttgtgtggccaagttgtcccaagattggtttccacttctagaacttctcgccatggccttaaatcctcactgcaagtttcatatctacaatggtacacgtccgtgtgaattaatttcctcaaatgctcagttgcctgaagaagaattatttgctcgttcttcagatcctcgatcaccaaaaggttggctagtggatctcatcaataaatttggcacattaaatgggttccagattttgcatgatcgtttttttaatggatcagcattaaatattcaaataattgcagctcttattaaaccatttggacaatgctatgagtttctcagtcaacatacactgaaaaagtacttcattccagttatagaaatagttccacatttattggaaaacttaactgatgaagaactgaaaaaggaggcaaagaatgaagccaaaaatgatgccctttcaatgattattaaatctttgaagaacttagcttcaagaatttcaggacaagatgagactataaaaaatttggaaatttttaggttaaagatgatactcagattgttgcaaatttcctcttttaatggaaagatgaatgcactgaatgaaataaataaggttatatctagtgtatcatattatactcatcggcatagtaatcctgaggaggaagaatggctgacagctgagcgaatggcagaatggatacagcaaaataatatcttatccatagtcttgcaagacagtcttcatcaaccacaatatgtagaaaagctagagaaaattcttcgttttgtgattaaagaaaaggctcttacattacaggaccttgataatatctgggcagcacaggcaggaaaacatgaagccattgtgaagaatgtacatgatctgctagcaaagttggcttgggatttttctcctggacaacttgatcatctttttgattgctttaaggcaagttggacaaatgcaagtaaaaagcaacgtgaaaagctccttgagttgatacgccgtcttgcagaagatgataaagatggtgtgatggcacacaaagtgttgaaccttctttggaacctggctcagagtgatgatgtgcctgtagacatcatggaccttgctcttagtgcccacataaaaatactagattatagttgttcccaggatcgagatgcacagaagatccagtggatagatcactttatagaagaacttcgcacaaatgacaagtgggtaattcctgctctgaaacaaataagagaaatttgtagtttgtttggtgaagcatctcaaaatttgagtcaaactcagcgaagtccccacatattttatcgccatgatttaatcaaccagcttcaacaaaatcatgctttagttactttggtagcagaaaaccttgcaacctacatgaatagcatcagattgtatgctggagatcatgaagactatgatccacaaacagtgaggcttggaagtcgatacagtcatgttcaagaagttcaagaacgactaaacttccttagatttttactgaaggatggccaactgtggctctgtgctcctcaggcaaaacaaatatggaagtgcttagcagaaaatgcagtttatctttgtgatcgtgaagcctgttttaagtggtattccaagttaatgggggatgaaccagacttggatcctgatattaataaggacttctttgaaagtaatgtacttcagcttgatccttcccttttaactgaaaatggaatgaaatgctttgaaagatttttcaaagctgtcaattgtcgagaaaggaaactaatagcaaaaagaagatcctatatgatggatgatttggaattaattggactagactacctttggagggttgtgattcagagtagtgacgagattgctaacagagctatagatcttcttaaagagatatacacaaaccttggcccaagattaaaagccaatcaggtggttatccatgaagacttcattcagtcttgctttgatcgtttaaaagcatcatatgatacactgtgtgtttttgatggtgacaaaaacagcattaattgtgcaagacaagaagccattcgaatggttagagtattaactgttataaaagagtacattaatgaatgtgacagtgattatcacaaggaaagaatgattttacctatgtcgagagcattttgtggcaaacacctctctcttatagttcggtttccaaaccagggcagacaggttgatgagttggatatatggtctcatacgaatgacacaattggttcagtacggcgatgtattgttaatcgtattaaagccaatgtagcccacaaaaaaattgaactttttgtgggtggtgagctgatagattctgaagatgacagaaagctaattggacaattaaacttaaaagataaatctctaattacagccaaacttacacaaataaatttcaatatgccatcaagtcctgatagctcttccgattcctcaactgcatctcctggaaaccaccgtaatcattacaatgatggtcccaatctagaggtggaaagttgtttgcctggggtgataatgtcagtgcatcccagatacatctctttcctttggcaagttgcagacttaggtagcaacctgaatatgccacctcttagagatggagcaagagtacttatgaaacttatgccaccagatagaacagctgtagaaaaattacgagctgtttgtttggaccatgcaaaccttggagaaggcaaacttagtccaccccttgactcccttttctttggtccttctgcctcccaagttctatacctaacagaggtagtttatgccttgttaatgcctgctggtgtgcctctaactgatgggtcctctgactttcaagttcacttcttgaaaagtggtggcttacctcttgtactgagtatgctaataagaaataacttcttgccaaatacagatatggaaactcgaaggggtgcttatttaaatgctcttaaaatagccaaactgttgttaactgcgattggctatggccatgttcgagctgtagcagaagcttgtcagccagttgtagatggtacagaccccataacacagattaaccaagttactcatgatcaagcagtggtgctacaaagtgcccttcagagcattcctaatccctcatccgagtgcgtacttagaaatgagtccatacttcttgctcaggaaatatctaatgaggcttcaagatatatgcctgatatttgtgtaattagggctatacagaaaattatctgggcatcagcatgtggggcattaggactattttttagcccaaatgaagaaataactaaaatttatcagatgaccaccaatggaagcaataagctggaggtggaagatgaacaagtttgttgtgaagcactggaagtgatgaccttatgttttgctttacttccaacagcgttggatgcacttagtaaagaaaaagcctggcagaccttcatcattgacttattattgcactgtccaagcaaaactgttcgtcagttggcacaggagcagttctttttaatgtgcaccagatgttgcatgggacacaggcctctgcttttcttcattactttactctttaccatactggggagcacagcaagagagaagggtaaatattcaggtgattatttcacacttttacggcaccttctcaattatgcttacaatggcaatattaacatacccaatgctgaagttcttcttgtcagtgaaattgattggctcaaaaggattagggataatgttaaaaacacaggtgaaacaggtgtcgaagagccaatactggaaggccaccttggggtaacaaaagagttattggcctttcaaacttctgagaaaaagtatcactttggttgtgaaaaaggaggtgctaatctcattaaagaattaattgatgatttcatctttcccgcatccaaagtttacctgcagtatttaagaagtggagaactaccagctgagcaggctattccagtctgtagttcacccgttaccatcaatgccggttttgagctacttgtagcattagctattggctgtgtgaggaatctcaaacagatagtagactgtttgactgaaatgtattacatgggcacagcaattactacttgtgaagcacttactgagtgggaatatctgccccctgttggaccccgcccaccaaaaggatttgtgggactcaaaaatgctggtgctacgtgttacatgaactctgtgatccagcagctatacatgattccttctatcaggaacagtattcttgcaattgaaggcacaggtagtgatttacacgatgatatgttcggggatgagaagcaggacagtgagagtaatgttgatccccgagatgatgtatttggatatcctcatcaatttgaagacaagccagcattaagtaagacagaagataggaaagagtataatattggtgtcctaagacaccttcaggtcatctttggtcatttagctgcttcccaactacaatactatgtacccagaggattttggaaacagttcaggctttggggtgaacctgttaatctccgtgaacaacatgatgccttagagttttttaattctttggtggatagtttagatgaagctttaaaagctttaggacacccggctatactaagtaaagtcctaggaggctcctttgctgatcagaagatctgccagggctgcccacataggtttgaatgtgaagaatcttttacaactttgaatgtggatattagaaatcatcaaaatcttcttgactctttggaacagtatatcaaaggagatttattggaaggtgcaaatgcatatcattgtgaaaaatgtgataaaaaggttgacacagtaaagcgcctgctaattaaaaaattgcctcgggttcttgctatccaactcaaacgatttgactatgactgggaaagagaatgtgcaattaaattcaatgattattttgaatttcctcgagagctggatatgggaccttacacagtagcaggtgttgcaaacctggaaagggataatgtaaactcagaaaatgagttgattgaacagaaagagcagtctgacaatgaaactgcaggaggcacaaagtacagacttgtaggagtgcttgtacacagtggtcaagcaagcggtgggcattattattcttacatcattcaaaggaatggtaaagatgatcagacagatcactggtataaatttgatgatggagatgtaacagaatgcaaaatggatgatgatgaagaaatgaaaaatcagtgttttggtggagagtacatgggagaagtatttgatcacatgatgaagcgcatgtcatataggcgacagaagaggtggtggaatgcttacatacctttttatgaacaaatggatatgatagatgaagatgatgagatgataagatacatatcagagctaactattgcaagaccccatcagatcattatgtcaccagccattgagagaagtgtacggaaacaaaatgtgaaatttatgcataaccgattgcaatatagtttagagtattttcagtttgtgaaaaaactgcttacatgtaatggtgtttatttaaaccctgctccagggcaggattatttgttgcctgaagcagaagaaattactatgattagtattcagcttgctgctagattcctctttaccactggatttcacaccaagaaaatagttcgtggtcctgccagtgactggtatgatgcactgtgcgttcttctccgtcacagcaaaaatgtacgtttttggtttactcataatgtcctttttaatgtatcaaatcgcttctctgaatacctcctggagtgccctagtgcagaagtgaggggtgcatttgcaaaacttatagtgtttattgcacacttttccttgcaagatgggtcttgtccttctccttttgcatctccaggaccttctagtcaggcatgtgataacttgagcttgagtgaccacttactaagagccacactaaatctcttgagaagggaagtttcagagcatggacatcatttacagcaatattttaatttgtttgtaatgtatgccaatttaggtgtggcagaaaaaacacagcttctgaaattgaatgtacctgctacctttatgcttgtgtctttagacgaaggaccaggtcctccaatcaaatatcagtatgctgaattaggcaagttatattcagtagtgtctcagctgattcgttgttgcaatgtgtcatcaacaatgcagtcttcaatcaatggtaaagtagcatgttccatttcttttacagcagtttaaaaataatgctagctttatgtagcacttgataaaaagtagctctgaagatttataaaaatgaaattagtctgaaggcctatgttctagaatattatatttcttaagttttagctttttcatatgtttaatagggagtttattttttaaatgtaggatactgtgatatcttatgaaatgcttagtgtaaaaatgataaactttgtctttagtgtcagcatttatattttgcattttatcatcttggtatatacctgaccatttaggtgaatttttaatttaatttaaaatcagattgtattttttaagttaagaagtttattattataattttgtgaggaattctattggtttttcattgataacaaatctgttctaggtaatccccctctccccaatcctttcggtgaccttaatttatcacagcctataatgccaattcagcagaatgtgttagacattttatttgtgagaacaagttatgtgaagaaaattattgaagactgcagtaactcagaggataccatcaaattacttcgcttttgctcttgggagaatcctcagttctcatctactgtcctcagcgaacttctctggcaggttgcatattcatatacctatgaacttcggccatatttagatctacttttccaaattttactgattgaggactcctggcagactcacagaattcataatgcacttaaaggaattccagatgacagagatgggctgttcgatacaatacagcgctcgaagaatcactatcaaaaacgagcatatcagtgcataaaatgtatggtagctctatttagcagttgtcctgttgcttaccagatcttacagggtaacggagatcttaaaagaaaatggacctgggcagtggaatggctaggagatgaacttgaaagaagaccatatactggcaatcctcagtatagttacaacaattggtctcctccagtacaaagcaatgaaacagcaaatggttatttcttagaaagatcacatagtgctaggatgacacttgcaaaagcttgtgaactctgtccagaagaggagccagatgaccaggatgccccagatgagcatgagccctctccatcagaagatgccccattatatcctcattcacctgcctctcagtatcaacagaataatcatgtacatggacagccatatacaggaccagcagcacatcacttgaacaaccctcagaaaacaggccaacgaacacaagaaaattatgaaggcaatgaagaagtatcctcacctcagatgaaggatcagtgaaaagcaataattaactgcttcctttatgactatgcactaaggtcttatagtccaaactttctctgtgtctggctagtattgaaaactagataaactgctccaaaccaacatggagtaaagagcatattcactggtttatttgcagtaatttgcaatttgtcagtgtataagacacatgcagggtgaagtgtacagagttttgtaacaaatgactggtcctaatctgtaaatgagaaaggtatatatactatgttaatgtctgactgttaattcttaagcaagaaactttttttgatgaaaacaagtcagatctacacagtcacacaattattttttgttgtgttcactacattgtgcaattgatattgcctgctttgagcagtttggtcaacttaccaacttccccccaaaaaagggaacataaaagagcccatctttgtcagtttacaccaatagtttcttgttaatccttctttcctggatatataaggctggtggtaacttttgaattatatggttgatgtggaaaattggcagtgtaacatttctagatacttttcattacctttttattctggtatataggctaaccactttaaagctattcttatgctgtaacagttagcatggcttcacactgtttgtgtagccaagaggacagaattacatgaatgacagtgcccagagtgacagctgtatattgctcagagcttttatttcttatacctagaataaatataaaatgggggaaaaatgtgacagacaagcagtttttcattgcacacatattcttcacatttaatgtttgatagttcaatttcttgagctgaagaatatcaaagtatcgataatacgaattttaaaatattaaaaccaatacacaaaattttcctatgtcagaatgtggtggagcataatagattgtatttggtgtgcttgcgattttttttttccatagaatttattaagtgaagtttctaaaactttgcttctcctgatcccggtgaagtgtacatcataagaatccatagtactttgaagtaccattgcaccaagatgtctgactgaattcatagtcacacttttatttgaaagaaagaattgttgtagttttttttcattattctaaaactcttgttgttagatacaagatttaattaagatctaagctcctgcttatttaatgtaattctaaggtaccattttagaaaaaacatttgttttaagattccaagaaacctgtgagttaatactatatttaaaagagaattggtaaattttgaatgtgtgtaatattttggaacctgtttaaaaaccaaatatacctgcaaatagatacagcctatcctatactatttaaatgtttggctgttttgttttatagaaattattttgctgaattcacaaataaaatttaagaagacttttgtcctg

SEQ ID NO: 316154 - DNA, 8852 bp, Homo sapiens
  misc_feature (1595)..(1595): n is a, c, g, or t
tttttttgtcagccgggttcaatgcgccatattgaagaggacgggtctaatagatcgctggagacacaatttaactgaaccccgcccgttgtggactgactttgatgctctgagtccctccctccttcacgccgctagcaggccctgatgtagattgcctttgtcttacttgggacgtttacctgagcgcttggtgctggtgtcgggaccgggagataggagtgtctcaggagagacctggccgaaaaccgcgagaaagaaaagtgaagcctagtgaaactgcctttgcagtgactcaagaaaaactcatcacctggagtccgtgtaagctcggcgacagccctagcagcgaggccaaaacagtttgggaagaaagaaaacctaaagtatttgccgttggtgattcaagggaatcaaacttgacgtatggagccaagaaagcccttggaaaaactggcctcatattttgtgtacacagtccctgtacagggtttctgacctgtggatgtgagacttcacaacctgctaaaaatgagctttcaggacctacccatataggaataaaccatcctagccatgagagatcagatgaaacctgagaccagagagactcatttgtttcaaaatagtttctccaaaagattttataaaagaaaaggctggggggagtgggatatgaaaggaaaatgaatcttggggcccccaaatcactaagctcaagggataagtcaagttagaaactgttcagggccaacttaccttgcattctattcaaattcacccctctgctcacttagatgcatatctgattgtaatcagaaactcaaaagaatgcagcagtttgtctctcacctatctatgacctggaagcccccttccccgtttgagtcttcctgcctttgcttcactttatccctgcctttctagactgaaccaacatacttcttagatatattgattgatgtctcatgtctccctaaaatgtataaaactaagctgggccccaaccaccttgggcacatgtcgttaggacttcctgagactgtgtcacaagtttgtgtccacaactttgacaaaataaactttttaaattaactgagacctgtcctaaatttttagggttccatcagatatgcatttctctcacctgagcatcagagggatgatttcgagttctctgtgttttttgtccacaggaatttccttgtgggcaaattctgagggagggatgtagcttttttatgtttggagctattttatttagaaataaaatgggaggcaggtttgcctgagtcagttgcctgcttgacttcctttggcttagtcattttggagtcctgagatttattttcttttcacatacctgttttatttatgatggtttatggtcattgaaccttgtaacattgattacatttcttttcactggtcttttttcttaagtagataaacttatttttaacttgggcacaagagagcataaaaattatatgaggtacatagcctgcttaaatagaatatttaaaatacgttttgtccacagagctggaattctttgtaaatgaaaaccaaattttacttaatttttagagatnggatcttggctttgtcgcctaggctagagtgctgtgggggcaatcatagcccactgcaacctcgaattcctggcttaagtgatcctcccatctcagcctcctgggtgcttggacaacagacatgacaccttacctggctagttaaaaaaaattttttttgtagagatgggctttgcctgtgtggcccaggctgctcttgaactcctaggttcaagtgatcctccagcttgggccttccgaagtgctgggattacattgcttccagctttagttttttaaatgtttaacttgtttaacttatttaacttgctgtttattatttaatggagagcttttagtgtttgtcttttgaggtgggatcttgccatgcccagactagccttgaagtcctacagtcaagtgatctttgcatctcagtctcccaagaagtagtggtagagaatttttatgttacattcctttctctgtgtatatgtttgtgggaggacatatgtccctttgtatgtttgggcatatatattttttgtgtgaaagttatgcatgttattgttgatcaatacaagaggtttagaggccagagaagagaaataaaatgggaaaaactacaaacattctacctcccatgataccatgctataatggcaatcataatatttatgtattttttacttttttgtgttcatttttaaaaattagataaaaatagtttaagctagaggcttctctctttcatctttttttttctaatttaagttttccctaagtaggaattttggtaatacttcattatattgatgtatcaagatttctttagtttctcctttgttgtctttaggttgtctacaatattttttgtcattgtgaatatgctgtcatgaacattttgatgctgattattaccagattagtgtgttgtgtcaaagttttcatcagttggattatttttcagtttagtaagtgatgcaagccaaaactaaaactctaaggcaccttctccccacccaaccagtcatctgagtagacttcctcctcagccagggcagtcatagcccactgcaaccagccagcccctttccattccagtatccctttccctttaataaaatttaaggccaaacatggtggttcaatgcctgtaatgccagcactttgggaggctgaggtgggcggatcatgaggtcaggagataaagaccattctgggaaacatggtgaaacactgtctctactaaaagtataaaaattagctggatgtggtggcatgtggctgtggtctcagctactcgggaggctgctgaggcaggagaatcgcttgaacctggggaggcagaggttgcagtgagcagagatcatgccactacactttagtctggtgacagaatgagactccatctcaaaaaaaaaaaaatgatttgtgagatgaatttgttttgaaaatattagcttgttttcagttgtgatacatttgaagttggtacagagtccattttcttttatgtgttaatgtattgacaatatagttgtgttgacaacttcttttcttatttccagttcagtctttacagaagctgacgagagatttccttgtattttatggtggtatgattggccttagagcacttcagttttgagatctctgctgtatttgtatacaagtattttggaagagagcttggagataattctggtggctgtgtggagtatgtgttggaggtattaaattttcacagtatatataaggcagcaattgataggcctttcacagattcttctgataactacataaagagacaaaaaaaagaaaaaagagcaaagatctgtgctgtgtcaagtatgacagccatcactcatggctctccagtaggagggaacgacagccagggccaggttcttgatggccagtctcagcatctcttccaacagaaccagacttcatcacctgattcttccaatgagaattccgtagcaactcctcctccagaggaacaagggcaaggtgatgccccaccacagcatgaagatgaagagcctgcatttccacatactgagctggcaaacctggatgacatgatcaacaggcctcgatgggtggttcctgttttgccaaaaggggaattagaagtgcttttagaagctgctattgatcttagtgtaaaaggccttgatgttaaaagtgaagcatgccaacgtttttttcgagatggactaacaatatctttcactaaaattcttatggatgaggctgtgagtggctggaagtttgaaattcatagatgtattattaacaatactcatcgcctagtggagctttgtgtggccaagttgtcccaagattggtttccacttctagaacttctcgccatggccttaaatcctcactgcaagtttcatatctacaatggtacacgtccgtgtgaattaatttcctcaaatgctcagttgcctgaagaagaattatttgctcgttcttcagatcctcgatcaccaaaaggttggctagtggatctcatcaataaatttggcacattaaatgggttccagattttgcatgatcgtttttttaatggatcagcattaaatattcaaataattgcagctcttattaaaccatttggacaatgctatgagtttctcagtcaacatacactgaaaaagtacttcattccagttatagaaatagttccacatttattggaaaacttaactgatgaagaactgaaaaaggaggcaaagaatgaagccaaaaatgatgccctttcaatgattattaaatctttgaagaacttagcttcaagaatttcaggacaagatgagactataaaaaatttggaaatttttaggttaaagatgatactcagattgttgcaaatttcctcttttaatggaaagatgaatgcactgaatgaaataaataaggttatatctagtgtatcatattatactcatcggcatagtaatcctgaggaggaagaatggctgacagctgagcgaatggcagaatggatacagcaaaataatatcttatccatagtcttgcaagacagtcttcatcaaccacaatatgtagaaaagctagagaaaattcttcgttttgtgattaaagaaaaggctcttacattacaggaccttgataatatctgggcagcacaggcaggaaaacatgaagccattgtgaagaatgtacatgatctgctagcaaagttggcttgggatttttctcctggacaacttgatcatctttttgattgctttaaggcaagttggacaaatgcaagtaaaaagcaacgtgaaaagctccttgagttgatacgccgtcttgcagaagatgataaagatggtgtgatggcacacaaagtgttgaaccttctttggaacctggctcagagtgatgatgtgcctgtagacatcatggaccttgctcttagtgcccacataaaaatactagattatagttgttcccaggatcgagatgcacagaagatccagtggatagatcactttatagaagaacttcgcacaaatgacaagtgggtaattcctgctctgaaacaaataagagaaatttgtagtttgtttggtgaagcatctcaaaatttgagtcaaactcagcgaagtccccacatattttatcgccatgatttaatcaaccagcttcaacaaaatcatgctttagttactttggtagcagaaaaccttgcaacctacatgaatagcatcagattgtatgctggagatcatgaagactatgatccacaaacagtgaggcttggaagtcgatacagtcatgttcaagaagttcaagaacgactaaacttccttagatttttactgaaggatggccaactgtggctctgtgctcctcaggcaaaacaaatatggaagtgcttagcagaaaatgcagtttatctttgtgatcgtgaagcctgttttaagtggtattccaagttaatgggggatgaaccagacttggatcctgatattaataaggacttctttgaaagtaatgtacttcagcttgatccttcccttttaactgaaaatggaatgaaatgctttgaaagatttttcaaagctgtcaattgtcgagaaaggaaactaatagcaaaaagaagatcctatatgatggatgatttggaattaattggactagactacctttggagggttgtgattcagagtagtgacgagattgctaacagagctatagatcttcttaaagagatatacacaaaccttggcccaagattaaaagccaatcaggtggttatccatgaagacttcattcagtcttgctttgatcgtttaaaagcatcatatgatacactgtgtgtttttgatggtgacaaaaacagcattaattgtgcaagacaagaagccattcgaatggttagagtattaactgttataaaagagtacattaatgaatgtgacagtgattatcacaaggaaagaatgattttacctatgtcgagagcattttgtggcaaacacctctctcttatagttcggtttccaaaccagggcagacaggttgatgagttggatatatggtctcatacgaatgacacaattggttcagtacggcgatgtattgttaatcgtattaaagccaatgtagcccacaaaaaaattgaactttttgtgggtggtgagctgatagattctgaagatgacagaaagctaattggacaattaaacttaaaagataaatctctaattacagccaaacttacacaaataaatttcaatatgccatcaagtcctgatagctcttccgattcctcaactgcatctcctggaaaccaccgtaatcattacaatgatggtcccaatctagaggtggaaagttgtttgcctggggtgataatgtcagtgcatcccagatacatctctttcctttggcaagttgcagacttaggtagcaacctgaatatgccacctcttagagatggagcaagagtacttatgaaacttatgccaccagatagaacagctgtagaaaaattacgagctgtttgtttggaccatgcaaaccttggagaaggcaaacttagtccaccccttgactcccttttctttggtccttctgcctcccaagttctatacctaacagaggtagtttatgccttgttaatgcctgctggtgtgcctctaactgatgggtcctctgactttcaagttcacttcttgaaaagtggtggcttacctcttgtactgagtatgctaataagaaataacttcttgccaaatacagatatggaaactcgaaggggtgcttatttaaatgctcttaaaatagccaaactgttgttaactgcgattggctatggccatgttcgagctgtagcagaagcttgtcagccagttgtagatggtacagaccccataacacagattaaccaagttactcatgatcaagcagtggtgctacaaagtgcccttcagagcattcctaatccctcatccgagtgcgtacttagaaatgagtccatacttcttgctcaggaaatatctaatgaggcttcaagatatatgcctgatatttgtgtaattagggctatacagaaaattatctgggcatcagcatgtggggcattaggactattttttagcccaaatgaagaaataactaaaatttatcagatgaccaccaatggaagcaataagctggaggtggaagatgaacaagtttgttgtgaagcactggaagtgatgaccttatgttttgctttacttccaacagcgttggatgcacttagtaaagaaaaagcctggcagaccttcatcattgacttattattgcactgtccaagcaaaactgttcgtcagttggcacaggagcagttctttttaatgtgcaccagatgttgcatgggacacaggcctctgcttttcttcattactttactctttaccatactggggagcacagcaagagagaagggtaaatattcaggtgattatttcacacttttacggcaccttctcaattatgcttacaatggcaatattaacatacccaatgctgaagttcttcttgtcagtgaaattgattggctcaaaaggattagggataatgttaaaaacacaggtgaaacaggtgtcgaagagccaatactggaaggccaccttggggtaacaaaagagttattggcctttcaaacttctgagaaaaagtatcactttggttgtgaaaaaggaggtgctaatctcattaaagaattaattgatgatttcatctttcccgcatccaaagtttacctgcagtatttaagaagtggagaactaccagctgagcaggctattccagtctgtagttcacccgttaccatcaatgccggttttgagctacttgtagcattagctattggctgtgtgaggaatctcaaacagatagtagactgtttgactgaaatgtattacatgggcacagcaattactacttgtgaagcacttactgagtgggaatatctgccccctgttggaccccgcccaccaaaaggatttgtgggactcaaaaatgctggtgctacgtgttacatgaactctgtgatccagcagctatacatgattccttctatcaggaacagtattcttgcaattgaaggcacaggtagtgatttacacgatgatatgttcggggatgagaagcaggacagtgaggtaaattttaatactgttttctttgaagagtctgatagcagatgctgttgttctccctcagattactatactttcatgggatgttatggggactacattttgatgatacagacagaatctctgagatactatgtctggcatacttgtagtactcactatgtaatagacttaaaactccagttgataattaaacactgtttttttgtttgtctccaaagcacagttaatataatcgcattttgtgtgacatggtaaatgtaatttggtatttgaaaaatgatgaatctatttatttttaataattacattttcattgccttgttttttaaaatctgttatttcatttctttcactttttatattgtctgtgtttcataagctgtacttatttttaggattctctatttttctcaaattagagctctttctgctaaggaaacaaatttgtttctcagctaatgcttcacggacctgttaacaatattagttaacagttgcagtcaggctgcctatgaaatgtatccagttgaaaataaagcagtaaaaaagttaggttttagtggcagatcacatatttaagatgcaggtcttaaat

SEQ ID NO: 316155 - DNA, 3727 bp, Homo sapiens
  misc_feature (1595)..(1595): n is a, c, g, or t
tttttttgtcagccgggttcaatgcgccatattgaagaggacgggtctaatagatcgctggagacacaatttaactgaaccccgcccgttgtggactgactttgatgctctgagtccctccctccttcacgccgctagcaggccctgatgtagattgcctttgtcttacttgggacgtttacctgagcgcttggtgctggtgtcgggaccgggagataggagtgtctcaggagagacctggccgaaaaccgcgagaaagaaaagtgaagcctagtgaaactgcctttgcagtgactcaagaaaaactcatcacctggagtccgtgtaagctcggcgacagccctagcagcgaggccaaaacagtttgggaagaaagaaaacctaaagtatttgccgttggtgattcaagggaatcaaacttgacgtatggagccaagaaagcccttggaaaaactggcctcatattttgtgtacacagtccctgtacagggtttctgacctgtggatgtgagacttcacaacctgctaaaaatgagctttcaggacctacccatataggaataaaccatcctagccatgagagatcagatgaaacctgagaccagagagactcatttgtttcaaaatagtttctccaaaagattttataaaagaaaaggctggggggagtgggatatgaaaggaaaatgaatcttggggcccccaaatcactaagctcaagggataagtcaagttagaaactgttcagggccaacttaccttgcattctattcaaattcacccctctgctcacttagatgcatatctgattgtaatcagaaactcaaaagaatgcagcagtttgtctctcacctatctatgacctggaagcccccttccccgtttgagtcttcctgcctttgcttcactttatccctgcctttctagactgaaccaacatacttcttagatatattgattgatgtctcatgtctccctaaaatgtataaaactaagctgggccccaaccaccttgggcacatgtcgttaggacttcctgagactgtgtcacaagtttgtgtccacaactttgacaaaataaactttttaaattaactgagacctgtcctaaatttttagggttccatcagatatgcatttctctcacctgagcatcagagggatgatttcgagttctctgtgttttttgtccacaggaatttccttgtgggcaaattctgagggagggatgtagcttttttatgtttggagctattttatttagaaataaaatgggaggcaggtttgcctgagtcagttgcctgcttgacttcctttggcttagtcattttggagtcctgagatttattttcttttcacatacctgttttatttatgatggtttatggtcattgaaccttgtaacattgattacatttcttttcactggtcttttttcttaagtagataaacttatttttaacttgggcacaagagagcataaaaattatatgaggtacatagcctgcttaaatagaatatttaaaatacgttttgtccacagagctggaattctttgtaaatgaaaaccaaattttacttaatttttagagatnggatcttggctttgtcgcctaggctagagtgctgtgggggcaatcatagcccactgcaacctcgaattcctggcttaagtgatcctcccatctcagcctcctgggtgcttggacaacagacatgacaccttacctggctagttaaaaaaaattttttttgtagagatgggctttgcctgtgtggcccaggctgctcttgaactcctaggttcaagtgatcctccagcttgggccttccgaagtgctgggattacattgcttccagctttagttttttaaatgtttaacttgtttaacttatttaacttgctgtttattatttaatggagagcttttagtgtttgtcttttgaggtgggatcttgccatgcccagactagccttgaagtcctacagtcaagtgatctttgcatctcagtctcccaagaagtagtggtagagaatttttatgttacattcctttctctgtgtatatgtttgtgggaggacatatgtccctttgtatgtttgggcatatatattttttgtgtgaaagttatgcatgttattgttgatcaatacaagaggtttagaggccagagaagagaaataaaatgggaaaaactacaaacattctacctcccatgataccatgctataatggcaatcataatatttatgtattttttacttttttgtgttcatttttaaaaattagataaaaatagtttaagctagaggcttctctctttcatctttttttttctaatttaagttttccctaagtaggaattttggtaatacttcattatattgatgtatcaagatttctttagtttctcctttgttgtctttaggttgtctacaatattttttgtcattgtgaatatgctgtcatgaacattttgatgctgattattaccagattagtgtgttgtgtcaaagttttcatcagttggattatttttcagtttagtaagtgatgcaagccaaaactaaaactctaaggcaccttctccccacccaaccagtcatctgagtagacttcctcctcagccagggcagtcatagcccactgcaaccagccagcccctttccattccagtatccctttccctttaataaaatttaaggccaaacatggtggttcaatgcctgtaatgccagcactttgggaggctgaggtgggcggatcatgaggtcaggagataaagaccattctgggaaacatggtgaaacactgtctctactaaaagtataaaaattagctggatgtggtggcatgtggctgtggtctcagctactcgggaggctgctgaggcaggagaatcgcttgaacctggggaggcagaggttgcagtgagcagagatcatgccactacactttagtctggtgacagaatgagactccatctcaaaaaaaaaaaaatgatttgtgagatgaatttgttttgaaaatattagcttgttttcagttgtgatacatttgaagttggtacagagtccattttcttttatgtgttaatgtattgacaatatagttgtgttgacaacttcttttcttatttccagttcagtctttacagaagctgacgagagatttccttgtattttatggtggtatgattggccttagagcacttcagttttgagatctctgctgtatttgtatacaagtattttggaagagagcttggagataattctggtggctgtgtggagtatgtgttggaggtattaaattttcacagtatatataaggcagcaattgataggcctttcacagattcttctgataactacataaagagacaaaaaaaagaaaaaagagcaaagatctgtgctgtgtcaagtatgacagccatcactcatggctctccagtaggagggaacgacagccagggccaggttcttgatggccagtctcagcatctcttccaacagaaccagagatggggttttaccatgttgcccagccaagtcttgaactcctggattcaagctacccacctgcaatcgcctcccaaagtgctggcattacaggcttgagtcactgcgtccggcctccatctgttaaatctaacattcctgttacatctgagtatgaatttgatgcttgctctgtctcttcaaacagtttttttgtcacctagt

SEQ ID NO: 316156 - DNA, 5413 bp, Homo sapiens
  misc_feature (1595)..(1595): n is a, c, g, or t
tttttttgtcagccgggttcaatgcgccatattgaagaggacgggtctaatagatcgctggagacacaatttaactgaaccccgcccgttgtggactgactttgatgctctgagtccctccctccttcacgccgctagcaggccctgatgtagattgcctttgtcttacttgggacgtttacctgagcgcttggtgctggtgtcgggaccgggagataggagtgtctcaggagagacctggccgaaaaccgcgagaaagaaaagtgaagcctagtgaaactgcctttgcagtgactcaagaaaaactcatcacctggagtccgtgtaagctcggcgacagccctagcagcgaggccaaaacagtttgggaagaaagaaaacctaaagtatttgccgttggtgattcaagggaatcaaacttgacgtatggagccaagaaagcccttggaaaaactggcctcatattttgtgtacacagtccctgtacagggtttctgacctgtggatgtgagacttcacaacctgctaaaaatgagctttcaggacctacccatataggaataaaccatcctagccatgagagatcagatgaaacctgagaccagagagactcatttgtttcaaaatagtttctccaaaagattttataaaagaaaaggctggggggagtgggatatgaaaggaaaatgaatcttggggcccccaaatcactaagctcaagggataagtcaagttagaaactgttcagggccaacttaccttgcattctattcaaattcacccctctgctcacttagatgcatatctgattgtaatcagaaactcaaaagaatgcagcagtttgtctctcacctatctatgacctggaagcccccttccccgtttgagtcttcctgcctttgcttcactttatccctgcctttctagactgaaccaacatacttcttagatatattgattgatgtctcatgtctccctaaaatgtataaaactaagctgggccccaaccaccttgggcacatgtcgttaggacttcctgagactgtgtcacaagtttgtgtccacaactttgacaaaataaactttttaaattaactgagacctgtcctaaatttttagggttccatcagatatgcatttctctcacctgagcatcagagggatgatttcgagttctctgtgttttttgtccacaggaatttccttgtgggcaaattctgagggagggatgtagcttttttatgtttggagctattttatttagaaataaaatgggaggcaggtttgcctgagtcagttgcctgcttgacttcctttggcttagtcattttggagtcctgagatttattttcttttcacatacctgttttatttatgatggtttatggtcattgaaccttgtaacattgattacatttcttttcactggtcttttttcttaagtagataaacttatttttaacttgggcacaagagagcataaaaattatatgaggtacatagcctgcttaaatagaatatttaaaatacgttttgtccacagagctggaattctttgtaaatgaaaaccaaattttacttaatttttagagatnggatcttggctttgtcgcctaggctagagtgctgtgggggcaatcatagcccactgcaacctcgaattcctggcttaagtgatcctcccatctcagcctcctgggtgcttggacaacagacatgacaccttacctggctagttaaaaaaaattttttttgtagagatgggctttgcctgtgtggcccaggctgctcttgaactcctaggttcaagtgatcctccagcttgggccttccgaagtgctgggattacattgcttccagctttagttttttaaatgtttaacttgtttaacttatttaacttgctgtttattatttaatggagagcttttagtgtttgtcttttgaggtgggatcttgccatgcccagactagccttgaagtcctacagtcaagtgatctttgcatctcagtctcccaagaagtagtggtagagaatttttatgttacattcctttctctgtgtatatgtttgtgggaggacatatgtccctttgtatgtttgggcatatatattttttgtgtgaaagttatgcatgttattgttgatcaatacaagaggtttagaggccagagaagagaaataaaatgggaaaaactacaaacattctacctcccatgataccatgctataatggcaatcataatatttatgtattttttacttttttgtgttcatttttaaaaattagataaaaatagtttaagctagaggcttctctctttcatctttttttttctaatttaagttttccctaagtaggaattttggtaatacttcattatattgatgtatcaagatttctttagtttctcctttgttgtctttaggttgtctacaatattttttgtcattgtgaatatgctgtcatgaacattttgatgctgattattaccagattagtgtgttgtgtcaaagttttcatcagttggattatttttcagtttagtaagtgatgcaagccaaaactaaaactctaaggcaccttctccccacccaaccagtcatctgagtagacttcctcctcagccagggcagtcatagcccactgcaaccagccagcccctttccattccagtatccctttccctttaataaaatttaaggccaaacatggtggttcaatgcctgtaatgccagcactttgggaggctgaggtgggcggatcatgaggtcaggagataaagaccattctgggaaacatggtgaaacactgtctctactaaaagtataaaaattagctggatgtggtggcatgtggctgtggtctcagctactcgggaggctgctgaggcaggagaatcgcttgaacctggggaggcagaggttgcagtgagcagagatcatgccactacactttagtctggtgacagaatgagactccatctcaaaaaaaaaaaaatgatttgtgagatgaatttgttttgaaaatattagcttgttttcagttgtgatacatttgaagttggtacagagtccattttcttttatgtgttaatgtattgacaatatagttgtgttgacaacttcttttcttatttccagttcagtctttacagaagctgacgagagatttccttgtattttatggtggtatgattggccttagagcacttcagttttgagatctctgctgtatttgtatacaagtattttggaagagagcttggagataattctggtggctgtgtggagtatgtgttggaggtattaaattttcacagtatatataaggcagcaattgataggcctttcacagattcttctgataactacataaagagacaaaaaaaagaaaaaagagcaaagatctgtgctgtgtcaagtatgacagccatcactcatggctctccagtaggagggaacgacagccagggccaggttcttgatggccagtctcagcatctcttccaacagaaccagacttcatcacctgattcttccaatgagaattccgtagcaactcctcctccagaggaacaagggcaaggtgatgccccaccacagcatgaagatgaagagcctgcatttccacatactgagctggcaaacctggatgacatgatcaacaggcctcgatgggtggttcctgttttgccaaaaggggaattagaagtgcttttagaagctgctattgatcttagtgtaaaaggccttgatgttaaaagtgaagcatgccaacgtttttttcgagatggactaacaatatctttcactaaaattcttatggatgaggctgtgagtggctggaagtttgaaattcatagatgtattattaacaatactcatcgcctagtggagctttgtgtggccaagttgtcccaagattggtttccacttctagaacttctcgccatggccttaaatcctcactgcaagtttcatatctacaatggtacacgtccgtgtgaattaatttcctcaaatgctcagttgcctgaagaagaattatttgctcgttcttcagatcctcgatcaccaaaaggttggctagtggatctcatcaataaatttggcacattaaatgggttccagattttgcatgatcgtttttttaatggatcagcattaaatattcaaataattgcagctcttattaaaccatttggacaatgctatgagtttctcagtcaacatacactgaaaaagtacttcattccagttatagaaatagttccacatttattggaaaacttaactgatgaagaactgaaaaaggaggcaaagaatgaagccaaaaatgatgccctttcaatgattattaaatctttgaagaacttagcttcaagaatttcaggacaagatgagactataaaaaatttggaaatttttaggttaaagatgatactcagattgttgcaaatttcctcttttaatggaaagatgaatgcactgaatgaaataaataaggttatatctagtgtatcatattatactcatcggcatagtaatcctgaggaggaagaatggctgacagctgagcgaatggcagaatggatacagcaaaataatatcttatccatagtcttgcaagacagtcttcatcaaccacaatatgtagaaaagctagagaaaattcttcgttttgtgattaaagaaaaggctcttacattacaggaccttgataatatctgggcagcacaggcaggaaaacatgaagccattgtgaagaatgtacatgatctgctagcaaagttggcttgggatttttctcctggacaacttgatcatctttttgattgctttaaggcaagttggacaaatgcaagtaaaaagcaacgtgaaaagctccttgagttgatacgccgtcttgcagaagatgataaagatggtgtgatggcacacaaagtgttgaaccttctttggaacctggctcagagtgatgatgtgcctgtagacatcatggaccttgctcttagtgcccacataaaaatactagattatagttgttcccaggatcgagatgcacagaagatccagtggatagatcactttatagaagaacttcgcacaaatgacaagtgggtaattcctgctctgaaacaaataagagaaatttgtagtttgtttggtgaagcatctcaaaatttgagtcaaactcagcgaagtccccacatattttatcgccatgatttaatcaaccagcttcaacaaaatcatgctttagttactttggtagcagaaaaccttgcaacctacatgaatagcatcagattgtatgctggagagttttgttcttgttgcacaggcaggctggagtgcaatggcaccatctcggctcactgcaaagtctgccctccaggataactacat

SEQ ID NO: 316157 - DNA, 466 bp, Homo sapiens
gggctgttcgatacaatacagcgctcgaagaatcactatcaaaaacgagcatatcagtgcataaaatgtatggtagctctatttagcagttgtcctgttgcttaccagatcttacaggtgagggtttttctcttataaatttgtagaaacctctgtcacaagtaaggaaatgatcgtgaaatttttgtattagcattttaagctgatactgaaaatcattctaaattctaaatagttttatttttttctaaagggtaacggagatcttaaaagaaaatggacctgggcagtggaatggctaggagatgaacttgaaagaagaccatatactggcaatcctcagtatagttacaacaattggtctcctccagtacaaagcaatgaaacagcaaatggttatttcttagaaagatcacatagtgctaggatgacacttgcaaaagcttgtgaactctgtccagaagag

SEQ ID NO: 316158 - DNA, 673 bp, Homo sapiens
atgcaacacatgtgctttgatactaatagatactttttatttttaaataagaatactgaaatggatatttggttggaggcatggattatattttttacagggtttgatattttgttaaggggaggatattgaccacattttgttaagaatgtatagcattaaaaatttttaaagtagtagctagaatttagcttctgtaaactctcttaattatagcaattttcatgtgccttattatactgttaagttcttcttatttcagtcaaactcagcgaagtccccacatattttatcgccatgatttaatcaaccagcttcaacaaaatcatgctttagttactttggtagcagaaaaccttgcaacctacatgaatagcatcagattgtatgctggaggtatgtatgataagctaaaattaactatggggaatcaactttgttttgctctaaatgttaataacctaagaaataacaacatttatttttgaatgagaaaaaatagaagtggatttatacttcatattgcattcacttaaggaatatgatctacttggtatcccaaatcttaggcaacctaaactctaggccacctttcccagtgtctttattaaatgcatgtctacttactcatccttcttcttggtatcttttctttcatacctgggagctctgc

SEQ ID NO: 316159 - DNA, 317 bp, Homo sapiens
gcgtcgacttattttgttgttgttcataagatacattttgtttttatttcagaactgttcgtcagttggcacaggagcagttctttttaatgtgcaccagatgttgcatgggacacaggcctctgcttttcttcattactttactctttaccatactgggggtgagaagttttcaaatgaacttatcaatataatgcattcttaacatgagagacattcagaaagttactacgatagcttttattgtatttagaacaggcataattaataaatgcagtattataattttttactatttgtagattggctttttgttt

SEQ ID NO: 316160 - DNA, 5181 bp, Homo sapiens
gcaaagagctaaaagtggtatcatgattccacagcagtgattgtaagacagtgagccacagggaaatgggaaaacgtgaaaagaaacaagtatcaggaccaaattagagaagatatgagtagggccatcactagaggtgaaaatggagaaacctaagaaaaccagtgttggcatgaattatgcaagtggaaaatacatctgtagagggacgagatagaaggacctagatctaactccaagtgcttgattggagaagagagggagaaagagaatttatagaattaactgtatagaagcctaaaaaataagattatcagcctagtcatgtaaagtctagaagttcctttatttgctcatcacctttcctttttctataagactattaagcagaaggtcagtaacagaaaatttaccctttcctctcctctcttggtttaaattttataaggaatctgaagaggctatggatcagttggcattacagtgggaagagcttattgaagcaaggttgacaataggtcttgtcattctgctccctgaaaatgcccttcgacaactgtgtcaggcagaaagcacacgcaaagtgctcaggatggaacttgtaccccatggcactgatacaacggccagtgatgggctgcccacacccatggcagagcgttccccggcggtgatggtaatggagctcacagaatggacgtccatccagttcaaagaaggagccagtagaaaaactggtgaagcagtccccacaaacaaagcactctgggtggccagacagtgtccatggctgaaaggtagttttccaacactgggcgattgcagccaccacacttgggtgagaacatggctaagaaatcctttcggcaatatagcttcttgtccttctcatgaaagccttctgcaccaaacacctctccgcagtgagagcagaagaagtgctctgggtgccaggtctggttcattgctgtcagcactttatccaggatgggagcagcgcagtaagcacagcgtggagaaaaaagttggtggtagtcgttggggcagtaggccaagccactccgctcaaagaagggactggagccaatctcttctttgcaatgagtacagacaaaatgctcaggatgccatgattgccctagagcatggatcaccttcccagcaatcggtttctggcaggatgcacaatggcccttgggcactgtggcaatgccaaggtcctgcaattcctgctccagacccccaagcattgagtccagggaggccttgtgatcctgcttgtctggctaagtgcttcttgccagcatctgctctcactgcaaccttggcctgcatctcagtcgaggtgagccatgagctcatccaactcgagcagctgctgacgttttatgaaggtggtggtgattcctttggctcttgggcttcaactgtagacattgagctcctggatattggtagtatacacgagctgcgccggcaagggacttgtgttatcctgaatagaaaggatctccgaagtctcatcaaggttagtctcctttctggaattgctgatccaggggaagaggagctgggttggaatattcatcactgtcctgaagggtggagcgttccagttcctccaataaggcatctaactcttccattgtcctacatccaagatgctcttgtctcacaggccgtgaggaacagctttgccactggctgtgtggtgaatgggggagacgtgcggtgctcctgcaaagctgggtacacaggaacacagtgtgaaaggtgtgcaccgggatatttcgggaatccccagaaattcggaggtagctgccaaccatgcagttgtaacagcaatggccagctgggcagctgtcatcccctgactggagactgcataaaccaagaacccaaagatagcagccctgcagaagaatgtgatgattgcgacagctgtgtgatgaccctcctgaacgacctggccaccatgggcgagcagctccgcctggtcaagtctcagctgcagggcctgagtgccagcgcagggcttctggagcagatgaggcacatggagacccaggccaaggacctgaggaatcagttgctcaactaccgttctgccatttcaaatcatggatcaaaaatagaaggcctggaaagagaactgactgatttgaatcaagaatttgagactttgcaagaaaaggctcaagtaaattccagaaaagcacaaacattaaacaacaatgttaatcgggcaacacaaagcgcaaaagaactggatgtgaagattaaaaatgtcatccggaatgtgcacattcttttaaagcagatctctgggacagatggagagggaaacaacgtgccttcaggtgacttttccagagagtgggctgaagcccagcgcatgatgagggaactgcggaacaggaactttggaaagcacctcagagaagcagaagctgataaaagggagtcgcagctcttgctgaaccggataaggacctggcagaaaacccaccagggggagaacaatgggcttgctaacagtatccgggattctttaaatgaatacgaagccaaactcagtgaccttcgtgctcggctgcaggaggcagctgcccaagccaagcaggcaaatggcttgaaccaagaaaacgagagagctttgggagccattcagagacaagtgaaagaaataaattccctgcagagtgatttcaccaagtatctaaccactgcagactcatctttgttgcaaaccaacattgcgctgcagctgatggagaaaagccagaaggaatatgaaaaattagctgccagtttaaatgaagcaagacaagaactaagtgacaaagtaagagaactttccagatctgctggcaaaacatcccttgtggaggaggcagaaaagcacgcgcggtccttacaagagctggcaaagcagctggaagagatcaagagaaacgccagcggggatgagctggtgcgctgtgctgtggatgccgccaccgcctacgagaacatcctcaatgccatcaaagcggccgaggacgcagccaacagggctgccagtgcatctgaatctgccctccagacagtgataaaggaagatctgccaagaaaagctaaaaccctgagttccaacagtgataaactgttaaatgaagccaagatgacacaaaagaagctaaagcaagaagtcagtccagctctcaacaacctacagcaaaccctgaatattgtgacagttcagaaagaagtgatagacaccaatctcacaactctccgagatggtcttcatgggatacagagaggtgatattgatgctatgatcagtagtgcaaagagcatggtcagaaaggccaacgacatcacagatgaggttctggatgggctcaaccccatccagacagatgtggaaagaattaaggacacctatgggaggacacagaacgaagacttcaaaaaggctctgactgatgcagataactcggtgaataagttaaccaacaaactacctgatctttggcgcaagattgaaagtatcaaccaacagctgttgcccttgggaaacatctctgacaacatggacagaatacgagaactaattcagcaggccagagatgctgccagtaaggttgctgtccccatgaggttcaatggtaaatctggagtcgaagtccgactgccaaatgacctggaagatttgaaaggatatacatctctgtccttgtttctccaaaggcccaactcaagagaaaatgggggtactgagaatatgtttgtgatgtaccttggaaataaagatgcctcccgggactacatcggcatggcagttgtggatggccagctcacctgtgtctacaacctgggggaccgtgaggctgaactccaagtggaccagatcttgaccaagagtgagactaaggaggcagttatggatcgggtgaaatttcagagaatttatcagtttgcaaggcttaattacaccaaaggagccacatccagtaaaccagaaacacccggagtctatgacatggatggtagaaatagcaatacactccttaatttggatcctgaaaatgttgtattttatgttggaggttacccacctgattttaaacttcccagtcgactaagtttccctccatacaaaggttgtattgaattagatgacctcaatgaaaatgttctgagcttgtacaacttcaaaaaaacattcaatctcaacacaactgaagtggagccttgtagaaggaggaaggaagagtcagacaaaaattattttgaaggtacgggctatgctcgagttccaactcaaccacatgctcccatcccaacctttggacagacaattcagaccaccgtggatagaggcttgctgttctttgcagaaaacggggatcgcttcatatctctaaatatagaagatggcaagctcatggtgagatacaaactgaattcagagctaccaaaagagagaggagttggagacgccataaacaacggcagagaccattcgattcagatcaaaattggaaaactccaaaagcgtatgtggataaatgtggacgttcaaaacactataattgatggtgaagtatttgatttcagcacatattatctgggaggaattccaattgcaatcagggaaagatttaacatttctacgcctgctttccgaggctgcatgaaaaatttgaagaaaaccagtggtgtcgttagattgaatgatactgtgggagtaaccaaaaagtgctcggaagactggaagcttgtgcgatctgcctcattctccagaggaggacaattgagtttcactgatttgggcttaccacctactgaccacctccaggcctcatttggatttcagacctttcaacccagtggcatattattagatcatcagacatggacaaggaacctgcaggtcactctggaagatggttacattgaattgagcaccagcgatagcggcggcccaatttttaaatctccacagacgtatatggatggtttactgcattatgtatctgtaataagcgacaactctgggctgaggcaagagggttgcttgaggccaagagttcgagaccagtcttggaaacacagtgaaaccatgtctctacgaaaactaaaataaaataaaatgtaaataaataaaattttaaaaataaatcagttggatgg

SEQ ID NO: 316161 - DNA, 1880 bp, Homo sapiens
  misc_feature (478)..(478): n is a, c, g, or t
ctttccttcacatgttaaaaaattaaagacatgaaaaataaaataccaaaaaagtactaacatacaatcatttgccttgcaaatttcaataatttggatttcctggtatgacatctatttctctctacaaaatttgagcttcgaggtaggctcagtgtgctaaacagggttaggatgctaactatgttgctatgtaaaccagtcctggaatcgtaattgaagccatgaatcatcaagatggtcttaaagcatttgctggtcatttttgatgacccaaggatggcaatattatcagctaggaatgtctgctagctccctttctttcacagaatttttaaaatgtgtcattttggaaattaacagaaacaaacagtgcctactttgtgtctgtatttgcctggatgaggctctttcaacaacactcttttcttgtcctctgatggaagaggatcctttctacattattaattcattcatncactcatgtattcatttactcaacaaacatatactaatattacgcctcaactagtgccagacactacattatgtggtaggacatggtagtggataagacagatgcatcttttactaaacagagtctcttactctgagcagttaagaagtttagccttccccaagttattcagcctctttctttcttcctgtgtatttccaaggcattaccacaaggctctgatttgctgctgacctctgtaactggaggatcccagagctgtgggtctgggcacatgcagtgggcatctctgaggtgacccctaagaagcaagtctactcaatgctgtgcagacactggctacttcaggggccacaaataccaatggaggatcaaaatgcacaaagtaattgcctcctgatgctttattttattttagaagtcagtccagctctcaacaacctacagcaaaccctgaatattgtgacagttcagaaagaagtgatagacaccaatctcacaactctccgagatggtcttcatgggatacagagaggtcagcatcttcctaatccattgtactcggttggcttcttttgttgaacgttttagatacttatacctccctatctgtgtgtgcattaggtgatattgatgctatgatcagtagtgcaaagagcatggtcagaaaggccaacgacatcacagatgaggttctggatgggctcaaccccatccagacagatgtggaaagaattaaggacacctatgggaggacacagaacgaagacttcaaaaaggctctgactgatgcagataactcgggtatcaggcgatctctggccaggacatcttagccattctctccattgttatgtgttttggtccatttccattcttccctggtaaagtctgatctcagaaactaaaacattagaaaacagctccacctgatacaggatatattcaaagcgtatagatatcctgctagttggaaggaccagacaggatttttaatttttagaaaatacattgaaaatgctattggtttgcttttttacaaagtggagatatatgtttctaaatcatgaggcattgaattatgattgatattaagaatcagaaaacaggctgtgttttctgtgcgctgtggctcatgcctgtaatcccagcactttgggaggccgaggtgggtggatcacgaggtcaggagatcgagaccatcctggctaacatggtgaaatcctgtctctactaaaaatacaaaaaattagccaggcgtggtgatgggcgcctgtagtcccagctactcgggaggctgaggcaggagaatggcgtgatcctgggaggtggaggttgcagtgagctgaaattgcaccactgcactccagcctggacgacagagcgagactccatctcaaac

SEQ ID NO: 316162 - DNA, 362 bp, Homo sapiens
tcataggttcgcagggcaccagcacaggcctcccgggtagcatctttcttgctcttgcccatgaggtcatgtcgtcttggctcactctgtattgttggggccagaatttaagcttgttttcagcatccgcccaagaagtctcactgggatcctaatacacatcggaagtcagcccgggaagcacttatgtgtttacctggaggcaggaaaggtcacggcctctatggacagtggggcaggtgggacctcaacgtcggtcacaccaaagcagtctctgtgtgatggacagtggcactcggtggcagcgtcaccataaaacgacacatcctgcgaacctatgagggatcctctagacgacctcc

SEQ ID NO: 316163 - DNA, 159 bp, Homo sapiens
tgggtcttgggaagtggtgagcaagcatcttgccacaccttcacgctccttggggaggccaatcatggagccctccagtttggggacattcccaccagccacttgctattcaagcttcctcaggagctgctgaaacccaggtattatttagctttcctg

SEQ ID NO: 316164 - DNA, 5615 bp, Homo sapiens
  misc_feature (3)..(4): n is a, c, g, or t
  misc_feature (8)..(8): n is a, c, g, or t
ganntccnggaaccgggatgcctccagcagtgaggcggtcagctgcagcatgggatggctgtggatctttggggcagccctggggcagtgtctgggctacagttcacagcagcaaagggtgccatttcttcagcctcccggtcaaagtcaactgcaagcgagttatgtggagtttagacccagccagggttgtagccctggatactatcgggatcataaaggcttgtataccggacggtgtgttccctgcaattgcaacggacattcaaatcaatgccaggatggctcaggcatatgtgttaactgtcagcacaacaccgcgggagagcactgtgaacgctgccaggagggctactatggcaacgccgtccacggatcctgcagggcctgcccatgtcctcacactaacagctttgccactggctgtgtggtgaatgggggagacgtgcggtgctcctgcaaagctgggtacacaggaacacagtgtgaaaggtgtgcaccgggatatttcgggaatccccagaaattcggaggtagctgccaaccatgcagttgtaacagcaatggccagctgggcagctgtcatcccctgactggagactgcataaaccaagaacccaaagatagcagccctgcagaagaatgtgatgattgcgacagctgtgtgatgaccctcctgaacgacctggccaccatgggcgagcagctccgcctggtcaagtctcagctgcagggcctgagtgccagcgcagggcttctggagcagatgaggcacatggagacccaggccaaggacctgaggaatcagttgctcaactaccgttctgccatttcaaatcatggatcaaaaatagaaggcctggaaagagaactgactgatttgaatcaagaatttgagactttgcaagaaaaggctcaagtaaattccagaaaagcacaaacattaaacaacaatgttaatcgggcaacacaaagcgcaaaagaactggatgtgaagattaaaaatgtcatccggaatgtgcacattcttttaaagcagatctctgggacagatggagagggaaacaacgtgccttcaggtgacttttccagagagtgggctgaagcccagcgcatgatgagggaactgcggaacaggaactttggaaagcacctcagagaagcagaagctgataaaagggagtcgcagctcttgctgaaccggataaggacctggcagaaaacccaccagggggagaacaatgggcttgctaacagtatccgggattctttaaatgaatacgaagccaaactcagtgaccttcgtgctcggctgcaggaggcagctgcccaagccaagcaggcaaatggcttgaaccaagaaaacgagagagctttgggagccattcagagacaagtgaaagaaataaattccctgcagagtgatttcaccaagtatctaaccactgcagactcatctttgttgcaaaccaacattgcgctgcagctgatggagaaaagccagaaggaatatgaaaaattagctgccagtttaaatgaagcaagacaagaactaagtgacaaagtaagagaactttccagatctgctggcaaaacatcccttgtggaggaggcagaaaagcacgcgcggtccttacaagagctggcaaagcagctggaagagatcaagagaaacgccagcggggatgagctggtgcgctgtgctgtggatgccgccaccgcctacgagaacatcctcaatgccatcaaagcggccgaggacgcagccaacagggctgccagtgcatctgaatctgccctccagacagtgataaaggaagatctgccaagaaaagctaaaaccctgagttccaacagtgataaactgttaaatgaagccaagatgacacaaaagaagctaaagcaagaagtcagtccagctctcaacaacctacagcaaaccctgaatattgtgacagttcagaaagaagtgatagacaccaatctcacaactctccgagatggtcttcatgggatacagagaggtgatattgatgctatgatcagtagtgcaaagagcatggtcagaaaggccaacgacatcacagatgaggttctggatgggctcaaccccatccagacagatgtggaaagaattaaggacacctatgggaggacacagaacgaagacttcaaaaaggctctgactgatgcagataactcggtgaataagttaaccaacaaactacctgatctttggcgcaagattgaaagtatcaaccaacagctgttgcccttgggaaacatctctgacaacatggacagaatacgagaactaattcagcaggccagagatgctgccagtaaggttgctgtccccatgaggttcaatggtaaatctggagtcgaagtccgactgccaaatgacctggaagatttgaaaggatatacatctctgtccttgtttctccaaaggcccaactcaagagaaaatgggggtactgagaatatgtttgtgatgtaccttggaaataaagatgcctcccgggactacatcggcatggcagttgtggatggccagctcacctgtgtctacaacctgggggaccgtgaggctgaactccaagtggaccagatcttgaccaagagtgagactaaggaggcagttatggatcgggtgaaatttcagagaatttatcagtttgcaaggcttaattacaccaaaggagccacatccagtaaaccagaaacacccggagtctatgacatggatggtagaaatagcaatacactccttaatttggatcctgaaaatgttgtattttatgttggaggttacccacctgattttaaacttcccagtcgactaagtttccctccatacaaaggttgtattgaattagatgacctcaatgaaaatgttctgagcttgtacaacttcaaaaaaacattcaatctcaacacaactgaagtggagccttgtagaaggaggaaggaagagtcagacaaaaattattttgaaggtacgggctatgctcgagttccaactcaaccacatgctcccatcccaacctttggacagacaattcagaccaccgtggatagaggcttgctgttctttgcagaaaacggggatcgcttcatatctctaaatatagaagatggcaagctcatggtgagatacaaactgaattcagagctaccaaaagagagaggagttggagacgccataaacaacggcagagaccattcgattcagatcaaaattggaaaactccaaaagcgtatgtggataaatgtggacgttcaaaacactataattgatggtgaagtatttgatttcagcacatattatctgggaggaattccaattgcaatcagggaaagatttaacatttctacgcctgctttccgaggctgcatgaaaaatttgaagaaaaccagtggtgtcgttagattgaatgatactgtgggagtaaccaaaaagtgctcggaagactggaagcttgtgcgatctgcctcattctccagaggaggacaattgagtttcactgatttgggcttaccacctactgaccacctccaggcctcatttggatttcagacctttcaacccagtggcatattattagatcatcagacatggacaaggaacctgcaggtcactctggaagatggttacattgaattgagcaccagcgatagcggcggcccaatttttaaatctccacagacgtatatggatggtttactgcattatgtatctgtaataagcgacaactctggactacggcttctcatcgatgaccagcttctgagaaatagcaaaaggctaaaacacatttcaagttcccggcagtctctgcgtctgggcgggagcaattttgagggttgtattagcaatgtttttgtccagaggttatcactgagtcctgaagtcctagatttgaccagtaactctctcaagagagatgtgtccctgggaggctgcagtttaaacaaaccaccttttctaatgttgcttaaaggttctaccaggtttaacaagaccaagacttttcgtatcaaccagctgttgcaggacacaccagtggcctccccaaggagcgtgaaggtgtggcaagatgcttgctcaccacttcccaagacccaggccaatcatggagccctccagtttggggacattcccaccagccacttgctattcaagcttcctcaggagctgctgaaacccaggtcacagtttgctgtggacatgcagacaacatcctccagaggactggtgtttcacacgggcactaagaactcctttatggctctttatctttcaaaaggacgtctggtctttgcactggggacagatgggaaaaaattgaggatcaaaagcaaggagaaatgcaatgatgggaaatggcacacggtggtgtttggccatgatggggaaaaggggcgcttggttgtggatggactgagggcccgggagggaagtttgcctggaaactccaccatcagcatcagagcgccagtttacctgggatcacctccatcagggaaaccaaagagcctccccacaaacagctttgtgggatgcctgaagaactttcagctggattcaaaacccttgtataccccttcttcaagcttcggggtgtcttcctgcttgggtggtcctttggagaaaggcatttatttctctgaagaaggaggtcatgtcgtcttggctcactctgtattgttggggccagaatttaagcttgttttcagcatccgcccaagaagtctcactgggatcctaatacacatcggaagtcagcccgggaagcacttatgtgtttacctggaggcaggaaaggtcacggcctctatggacagtggggcaggtgggacctcaacgtcggtcacaccaaagcagtctctgtgtgatggacagtggcactcggtggcagtcaccataaaacaacacatcctgcacctggaactggacacagacagtagctacacagctggacagatccccttcccacctgccagcactcaagagccactacaccttggaggtgctccagccaatttgacgacactgaggatccctgtgtggaaatcattctttggctgtctgaggaatattcatgtcaatcacatccctgtccctgtcactgaagccttggaagtccaggggcctgtcagtctgaatggttgtcctgaccagtaacccaagcctatttcacagcaaggaaattcaccttcaaaagcactgattacccaatgcacctccctccccagctcgagatcattcttcaatcaggacacaaaccagacaggtttaatagcgaatctaattttgaattctgaccatggatacccatcactttggcattcagtgctacatgtgtattttatataaaaatcccatttcttgaagataaaaaaattgttattcaaattgttatgcacagaatgtttttggtaatattaatttccactaaaaaattaaatgtcttttaagaaacattcttttccacttgttaaaaaaattaaatatattttaaagcactttaagaatatgaaactttcatatatgttaaaggattataatttatggaattaaaaaatgcagtgtagtccttaaattatga

SEQ ID NO: 316165 - DNA, 5867 bp, Homo sapiens
  misc_feature (60)..(60): n is a, c, g, or t
cccacctcctacctgggggacaaggtttcttcatatggtggttacctcacttaccaagcnaagtcctttgcgcttgcctggcgacatggttcttctggaaaagaagccggatgtacagctcactggtcagcacatgtccatcatctatgaggagacaaacaccccacggccagaccggctgcatcatggacgagtgcacgtggtcgagggaaacttcagacatgccagcagccgtgccccagtgtctagggaggagctgatgacagtgctgtctagactggcagatgtgcgcatccaaggcctctacttcacagagactcaaaggctcaccctgagcgaggtggggctagaggaagcctctgacacaggaagtgggcgcatagcacttgctgtggaaatctgtgcctgcccccctgcctacgctggtgactcttgtcagggttgtagccctggatactatcgggatcataaaggcttgtataccggacggtgtgttccctgcaattgcaacggacattcaaatcaatgccaggatggctcaggcatatgtgttaactgtcagcacaacaccgcgggagagcactgtgaacgctgccaggagggctactatggcaacgccgtccacggatcctgcagggcctgcccatgtcctcacactaacagctttgccactggctgtgtggtgaatgggggagacgtgcggtgctcctgcaaagctgggtacacaggaacacagtgtgaaaggtgtgcaccgggatatttcgggaatccccagaaattcggaggtagctgccaaccatgcagttgtaacagcaatggccagctgggcagctgtcatcccctgactggagactgcataaaccaagaacccaaagatagcagccctgcagaagaatgtgatgattgcgacagctgtgtgatgaccctcctgaacgacctggccaccatgggcgagcagctccgcctggtcaagtctcagctgcagggcctgagtgccagcgcagggcttctggagcagatgaggcacatggagacccaggccaaggacctgaggaatcagttgctcaactaccgttctgccatttcaaatcatggatcaaaaatagaaggcctggaaagagaactgactgatttgaatcaagaatttgagactttgcaagaaaaggctcaagtaaattccagaaaagcacaaacattaaacaacaatgttaatcgggcaacacaaagcgcaaaagaactggatgtgaagattaaaaatgtcatccggaatgtgcacattcttttaaagcagatctctgggacagatggagagggaaacaacgtgccttcaggtgacttttccagagagtgggctgaagcccagcgcatgatgagggaactgcggaacaggaactttggaaagcacctcagagaagcagaagctgataaaagggagtcgcagctcttgctgaaccggataaggacctggcagaaaacccaccagggggagaacaatgggcttgctaacagtatccgggattctttaaatgaatacgaagccaaactcagtgaccttcgtgctcggctgcaggaggcagctgcccaagccaagcaggcaaatggcttgaaccaagaaaacgagagagctttgggagccattcagagacaagtgaaagaaataaattccctgcagagtgatttcaccaagtatctaaccactgcagactcatctttgttgcaaaccaacattgcgctgcagctgatggagaaaagccagaaggaatatgaaaaattagctgccagtttaaatgaagcaagacaagaactaagtgacaaagtaagagaactttccagatctgctggcaaaacatcccttgtggaggaggcagaaaagcacgcgcggtccttacaagagctggcaaagcagctggaagagatcaagagaaacgccagcggggatgagctggtgcgctgtgctgtggatgccgccaccgcctacgagaacatcctcaatgccatcaaagcggccgaggacgcagccaacagggctgccagtgcatctgaatctgccctccagacagtgataaaggaagatctgccaagaaaagctaaaaccctgagttccaacagtgataaactgttaaatgaagccaagatgacacaaaagaagctaaagcaagaagtcagtccagctctcaacaacctacagcaaaccctgaatattgtgacagttcagaaagaagtgatagacaccaatctcacaactctccgagatggtcttcatgggatacagagaggtgatattgatgctatgatcagtagtgcaaagagcatggtcagaaaggccaacgacatcacagatgaggttctggatgggctcaaccccatccagacagatgtggaaagaattaaggacacctatgggaggacacagaacgaagacttcaaaaaggctctgactgatgcagataactcggtgaataagttaaccaacaaactacctgatctttggcgcaagattgaaagtatcaaccaacagctgttgcccttgggaaacatctctgacaacatggacagaatacgagaactaattcagcaggccagagatgctgccagtaaggttgctgtccccatgaggttcaatggtaaatctggagtcgaagtccgactgccaaatgacctggaagatttgaaaggatatacatctctgtccttgtttctccaaaggcccaactcaagagaaaatgggggtactgagaatatgtttgtgatgtaccttggaaataaagatgcctcccgggactacatcggcatggcagttgtggatggccagctcacctgtgtctacaacctgggggaccgtgaggctgaactccaagtggaccagatcttgaccaagagtgagactaaggaggcagttatggatcgggtgaaatttcagagaatttatcagtttgcaaggcttaattacaccaaaggagccacatccagtaaaccagaaacacccggagtctatgacatggatggtagaaatagcaatacactccttaatttggatcctgaaaatgttgtattttatgttggaggttacccacctgattttaaacttcccagtcgactaagtttccctccatacaaaggttgtattgaattagatgacctcaatgaaaatgttctgagcttgtacaacttcaaaaaaacattcaatctcaacacaactgaagtggagccttgtagaaggaggaaggaagagtcagacaaaaattattttgaaggtacgggctatgctcgagttccaactcaaccacatgctcccatcccaacctttggacagacaattcagaccaccgtggatagaggcttgctgttctttgcagaaaacggggatcgcttcatatctctaaatatagaagatggcaagctcatggtgagatacaaactgaattcagagctaccaaaagagagaggagttggagacgccataaacaacggcagagaccattcgattcagatcaaaattggaaaactccaaaagcgtatgtggataaatgtggacgttcaaaacactataattgatggtgaagtatttgatttcagcacatattatctgggaggaattccaattgcaatcagggaaagatttaacatttctacgcctgctttccgaggctgcatgaaaaatttgaagaaaaccagtggtgtcgttagattgaatgatactgtgggagtaaccaaaaagtgctcggaagactggaagcttgtgcgatctgcctcattctccagaggaggacaattgagtttcactgatttgggcttaccacctactgaccacctccaggcctcatttggatttcagacctttcaacccagtggcatattattagatcatcagacatggacaaggaacctgcaggtcactctggaagatggttacattgaattgagcaccagcgatagcggcggcccaatttttaaatctccacagacgtatatggatggtttactgcattatgtatctgtaataagcgacaactctggactacggcttctcatcgatgaccagcttctgagaaatagcaaaaggctaaaacacatttcaagttcccggcagtctctgcgtctgggcgggagcaattttgagggttgtattagcaatgtttttgtccagaggttatcactgagtcctgaagtcctagatttgaccagtaactctctcaagagagatgtgtccctgggaggctgcagtttaaacaaaccaccttttctaatgttgcttaaaggttctaccaggtttaacaagaccaagacttttcgtatcaaccagctgttgcaggacacaccagtggcctccccaaggagcgtgaaggtgtggcaagatgcttgctcaccacttcccaagacccaggccaatcatggagccctccagtttggggacattcccaccagccacttgctattcaagcttcctcaggagctgctgaaacccaggtcacagtttgctgtggacatgcagacaacatcctccagaggactggtgtttcacacgggcactaagaactcctttatggctctttatctttcaaaaggacgtctggtctttgcactggggacagatgggaaaaaattgaggatcaaaagcaaggagaaatgcaatgatgggaaatggcacacggtggtgtttggccatgatggggaaaaggggcgcttggttgtggatggactgagggcccgggagggaagtttgcctggaaactccaccatcagcatcagagcgccagtttacctgggatcacctccatcagggaaaccaaagagcctccccacaaacagctttgtgggatgcctgaagaactttcagctggattcaaaacccttgtataccccttcttcaagcttcggggtgtcttcctgcttgggtggtcctttggagaaaggcatttatttctctgaagaaggaggtcatgtcgtcttggctcactctgtattgttggggccagaatttaagcttgttttcagcatccgcccaagaagtctcactgggatcctaatacacatcggaagtcagcccgggaagcacttatgtgtttacctggaggcaggaaaggtcacggcctctatggacagtggggcaggtgggacctcaacgtcggtcacaccaaagcagtctctgtgtgatggacagtggcactcggtggcagtcaccataaaacaacacatcctgcacctggaactggacacagacagtagctacacagctggacagatccccttcccacctgccagcactcaagagccactacaccttggaggtgctccagccaatttgacgacactgaggatccctgtgtggaaatcattctttggctgtctgaggaatattcatgtcaatcacatccctgtccctgtcactgaagccttggaagtccaggggcctgtcagtctgaatggttgtcctgaccagtaacccaagcctatttcacagcaaggaaattcaccttcaaaagcactgattacccaatgcacctccctccccagctcgagatcattcttcaatcaggacacaaaccagacaggtttaatagcgaatctaattttgaattctgaccatggatacccatcactttggcattcagtgctacatgtgtattttatataaaaatcccatttcttgaagataaaaaaattgttattcaaattgttatgcacagaatgtttttggtaatattaatttccactaaaaaattaaatgtcttttaagaaacattcttttccacttgttaaaaaaattaaatatattttaaagcactttaagaatatgaaactttcatatatgttaaaggattataatttatggaattaaaaaatgcagtgtagtccttaaattatga

SEQ ID NO: 316166 - DNA, 3616 bp, Homo sapiens
tggaccatggttgatagcaagtacttgaaaccttgggaagtgaaaccatgggtaaggggggaactaccgtaactaattatgacccatcctgttcaacatctggggaccaaacatgccacttgacaaatactgtcagtaagaacatttgtagttagccttttcttaatgcacaatcttacatttctattttttttctcaccaacagtgaataagttaaccaacaaactacctgatctttggcgcaagattgaaagtatcaaccaacagctgttgcccttgggaaacatctctgacaacatggacagaatacgagaactaattcagcaggccagagatgctgccagtaaggttgctgtccccatgaggttcaatggtaaatctggagtcgaagtccgactgccaaatgacctggaagatttgaaaggatatacatctctgtccttgtttctccaaaggcccaactcaagagaaaatgggggtactgagaatatgtttgtgatgtaccttggaaataaagatgcctcccgggactacatcggcatggcagttgtggatggccagctcacctgtgtctacaacctgggggaccgtgaggctgaactccaagtggaccagatcttgaccaagagtgagactaaggaggcagttatggatcgggtgaaatttcagagaatttatcagtttgcaaggcttaattacaccaaaggagccacatccagtaaaccagaaacacccggagtctatgacatggatggtagaaatagcaatacactccttaatttggatcctgaaaatgttgtattttatgttggaggttacccacctgattttaaacttcccagtcgactaagtttccctccatacaaaggttgtattgaattagatgacctcaatgaaaatgttctgagcttgtacaacttcaaaaaaacattcaatctcaacacaactgaagtggagccttgtagaaggaggaaggaagagtcagacaaaaattattttgaaggtacgggctatgctcgagttccaactcaaccacatgctcccatcccaacctttggacagacaattcagaccaccgtggatagaggcttgctgttctttgcagaaaacggggatcgcttcatatctctaaatatagaagatggcaagctcatggtgagatacaaactgaattcagagctaccaaaagagagaggagttggagacgccataaacaacggcagagaccattcgattcagatcaaaattggaaaactccaaaagcgtatgtggataaatgtggacgttcaaaacactataattgatggtgaagtatttgatttcagcacatattatctgggaggaattccaattgcaatcagggaaagatttaacatttctacgcctgctttccgaggctgcatgaaaaatttgaagaaaaccagtggtgtcgttagattgaatgatactgtgggagtaaccaaaaagtgctcggaagactggaagcttgtgcgatctgcctcattctccagaggaggacaattgagtttcactgatttgggcttaccacctactgaccacctccaggcctcatttggatttcagacctttcaacccagtggcatattattagatcatcagacatggacaaggaacctgcaggtcactctggaagatggttacattgaattgagcaccagcgatagcggcggcccaatttttaaatctccacagacgtatatggatggtttactgcattatgtatctgtaataagcgacaactctggactacggcttctcatcgatgaccagcttctgagaaatagcaaaaggctaaaacacatttcaagttcccggcagtctctgcgtctgggcgggagcaattttgagggttgtattagcaatgtttttgtccagaggttatcactgagtcctgaagtcctagatttgaccagtaactctctcaagagagatgtgtccctgggaggctgcagtttaaacaaaccaccttttctaatgttgcttaaaggttctaccaggtttaacaagaccaagacttttcgtatcaaccagctgttgcaggacacaccagtggcctccccaaggagcgtgaaggtgtggcaagatgcttgctcaccacttcccaagacccaggccaatcatggagccctccagtttggggacattcccaccagccacttgctattcaagcttcctcaggagctgctgaaacccaggtcacagtttgctgtggacatgcagacaacatcctccagaggactggtgtttcacacgggcactaagaactcctttatggctctttatctttcaaaaggacgtctggtctttgcactggggacagatgggaaaaaattgaggatcaaaagcaaggagaaatgcaatgatgggaaatggcacacggtggtgtttggccatgatggggaaaaggggcgcttggttgtggatggactgagggcccgggagggaagtttgcctggaaactccaccatcagcatcagagcgccagtttacctgggatcacctccatcagggaaaccaaagagcctccccacaaacagctttgtgggatgcctgaagaactttcagctggattcaaaacccttgtataccccttcttcaagcttcggggtgtcttcctgcttgggtggtcctttggagaaaggcatttatttctctgaagaaggaggtcatgtcgtcttggctcactctgtattgttggggccagaatttaagcttgttttcagcatccgcccaagaagtctcactgggatcctaatacacatcggaagtcagcccgggaagcacttatgtgtttacctggaggcaggaaaggtcacggcctctatggacagtggggcaggtgggacctcaacgtcggtcacaccaaagcagtctctgtgtgatggacagtggcactcggtggcagtcaccataaaacaacacatcctgcacctggaactggacacagacagtagctacacagctggacagatccccttcccacctgccagcactcaagagccactacaccttggaggtgctccagccaatttgacgacactgaggatccctgtgtggaaatcattctttggctgtctgaggaatattcatgtcaatcacatccctgtccctgtcactgaagccttggaagtccaggggcctgtcagtctgaatggttgtcctgaccagtaacccaagcctatttcacagcaaggaaattcaccttcaaaagcactgattacccaatgcacctccctccccagctcgagatcattcttcaatcaggacacaaaccagacaggtttaatagcgaatctaattttgaattctgaccatggatacccatcactttggcattcagtgctacatgtgtattttatataaaaatcccatttcttgaagataaaaaaattgttattcaaattgttatgcacagaatgtttttggtaatattaatttccactaaaaaattaaatgtcttttaagaaacattcttttccacttgttaaaaaaattaaatatattttaaagcactttaagaatatgaaactttcatatatgttaaaggattataatttatggaattaaaaaatgcagtgtagtccttaaattatga

SEQ ID NO: 316167 - DNA, 2484 bp, Homo sapiens
gagctcgtacccctgaaccatctatgagatacaaactgaattcagagctaccaaaagagagaggagttggagacgccataaacaacggcagagaccattcgattcagatcaaaattggaaaactccaaaagcgtatgtggataaatgtggacgttcaaaacactataattgatggtgaagtatttgatttcagcacatattatctgggaggaattccaattgcaatcagggaaagatttaacatttctacgcctgctttccgaggctgcatgaaaaatttgaagaaaaccagtggtgtcgttagattgaatgatactgtgggagtaaccaaaaagtgctcggaagactggaagcttgtgcgatctgcctcattctccagaggaggacaattgagtttcactgatttgggcttaccacctactgaccacctccaggcctcatttggatttcagacctttcaacccagtggcatattattagatcatcagacatggacaaggaacctgcaggtcactctggaagatggttacattgaattgagcaccagcgatagcggcggcccaatttttaaatctccacagacgtatatggatggtttactgcattatgtatctgtaataagcgacaactctggactacggcttctcatcgatgaccagcttctgagaaatagcaaaaggctaaaacacatttcaagttcccggcagtctctgcgtctgggcgggagcaattttgagggttgtattagcaatgtttttgtccagaggttatcactgagtcctgaagtcctagatttgaccagtaactctctcaagagagatgtgtccctgggaggctgcagtttaaacaaaccaccttttctaatgttgcttaaaggttctaccaggtttaacaagaccaagacttttcgtatcaaccagctgttgcaggacacaccagtggcctccccaaggagcgtgaaggtgtggcaagatgcttgctcaccacttcccaagacccaggccaatcatggagccctccagtttggggacattcccaccagccacttgctattcaagcttcctcaggagctgctgaaacccaggtcacagtttgctgtggacatgcagacaacatcctccagaggactggtgtttcacacgggcactaagaactcctttatggctctttatctttcaaaaggacgtctggtctttgcactggggacagatgggaaaaaattgaggatcaaaagcaaggagaaatgcaatgatgggaaatggcacacggtggtgtttggccatgatggggaaaaggggcgcttggttgtggatggactgagggcccgggagggaagtttgcctggaaactccaccatcagcatcagagcgccagtttacctgggatcacctccatcagggaaaccaaagagcctccccacaaacagctttgtgggatgcctgaagaactttcagctggattcaaaacccttgtataccccttcttcaagcttcggggtgtcttcctgcttgggtggtcctttggagaaaggcatttatttctctgaagaaggaggtcatgtcgtcttggctcactctgtattgttggggccagaatttaagcttgttttcagcatccgcccaagaagtctcactgggatcctaatacacatcggaagtcagcccgggaagcacttatgtgtttacctggaggcaggaaaggtcacggcctctatggacagtggggcaggtgggacctcaacgtcggtcacaccaaagcagtctctgtgtgatggacagtggcactcggtggcagtcaccataaaacaacacatcctgcacctggaactggacacagacagtagctacacagctggacagatccccttcccacctgccagcactcaagagccactacaccttggaggtgctccagccaatttgacgacactgaggatccctgtgtggaaatcattctttggctgtctgaggaatattcatgtcaatcacatccctgtccctgtcactgaagccttggaagtccaggggcctgtcagtctgaatggttgtcctgaccagtaacccaagcctatttcacagcaaggaaattcaccttcaaaagcactgattacccaatgcacctccctccccagctcgagatcattcttcaatcaggacacaaaccagacaggtttaatagcgaatctaattttgaattctgaccatggatacccatcactttggcattcagtgctacatgtgtattttatataaaaatcccatttcttgaagataaaaaaattgttattcaaattgttatgcacagaatgtttttggtaatattaatttccactaaaaaattaaatgtcttttaagaaacattcttttccacttgttaaaaaaattaaatatattttaaagcactttaagaatatgaaactttcatatatgttaaaggattataatttatggaattaaaaaatgcagtgtagtccttaaattatga

SEQ ID NO: 316168 - DNA, 1216 bp, Homo sapiens
ctctagacgatcccatggactctaaaggggcgcttggttgtggatggactgagggcccgggagggaagtttgcctggaaactccaccatcagcatcagagcgccagtttacctgggatcacctccatcagggaaaccaaagagcctccccacaaacagctttgtgggatgcctgaagaactttcagctggattcaaaacccttgtataccccttcttcaagcttcggggtgtcttcctgcttgggtggtcctttggagaaaggcatttatttctctgaagaaggaggtcatgtcgtcttggctcactctgtattgttggggccagaatttaagcttgttttcagcatccgcccaagaagtctcactgggatcctaatacacatcggaagtcagcccgggaagcacttatgtgtttacctggaggcaggaaaggtcacggcctctatggacagtggggcaggtgggacctcaacgtcggtcacaccaaagcagtctctgtgtgatggacagtggcactcggtggcagtcaccataaaacaacacatcctgcacctggaactggacacagacagtagctacacagctggacagatccccttcccacctgccagcactcaagagccactacaccttggaggtgctccagccaatttgacgacactgaggatccctgtgtggaaatcattctttggctgtctgaggaatattcatgtcaatcacatccctgtccctgtcactgaagccttggaagtccaggggcctgtcagtctgaatggttgtcctgaccagtaacccaagcctatttcacagcaaggaaattcaccttcaaaagcactgattacccaatgcacctccctccccagctcgagatcattcttcaatcaggacacaaaccagacaggtttaatagcgaatctaattttgaattctgaccatggatacccatcactttggcattcagtgctacatgtgtattttatataaaaatcccatttcttgaagataaaaaaattgttattcaaattgttatgcacagaatgtttttggtaatattaatttccactaaaaaattaaatgtcttttaagaaacattcttttccacttgttaaaaaaattaaatatattttaaagcactttaagaatatgaaactttcatatatgttaaaggattataatttatggaattaaaaaatgcagtgtagtccttaaattatga

SEQ ID NO: 316169 - DNA, 1381 bp, Homo sapiens
ggttcatctctctgtcagatccctccctcaccacgtcttacaatctattacattgaaaatattactcttaaacaaaaatgactgtgcatgcacgctctcatctataatggcaattttaaatacaaggtgcacctttgttatttgtaaaccttgaaagaaataaacttatttttaaaattgccattatgaaaggggcgcttggttgtggatggactgagggcccgggagggaagtttgcctggaaactccaccatcagcatcagagcgccagtttacctgggatcacctccatcagggaaaccaaagagcctccccacaaacagctttgtgggatgcctgaagaactttcagctggattcaaaacccttgtataccccttcttcaagcttcggggtgtcttcctgcttgggtggtcctttggagaaaggcatttatttctctgaagaaggaggtcatgtcgtcttggctcactctgtattgttggggccagaatttaagcttgttttcagcatccgcccaagaagtctcactgggatcctaatacacatcggaagtcagcccgggaagcacttatgtgtttacctggaggcaggaaaggtcacggcctctatggacagtggggcaggtgggacctcaacgtcggtcacaccaaagcagtctctgtgtgatggacagtggcactcggtggcagtcaccataaaacaacacatcctgcacctggaactggacacagacagtagctacacagctggacagatccccttcccacctgccagcactcaagagccactacaccttggaggtgctccagccaatttgacgacactgaggatccctgtgtggaaatcattctttggctgtctgaggaatattcatgtcaatcacatccctgtccctgtcactgaagccttggaagtccaggggcctgtcagtctgaatggttgtcctgaccagtaacccaagcctatttcacagcaaggaaattcaccttcaaaagcactgattacccaatgcacctccctccccagctcgagatcattcttcaatcaggacacaaaccagacaggtttaatagcgaatctaattttgaattctgaccatggatacccatcactttggcattcagtgctacatgtgtattttatataaaaatcccatttcttgaagataaaaaaattgttattcaaattgttatgcacagaatgtttttggtaatattaatttccactaaaaaattaaatgtcttttaagaaacattcttttccacttgttaaaaaaattaaatatattttaaagcactttaagaatatgaaactttcatatatgttaaaggattataatttatggaattaaaaaatgcagtgtagtccttaaattatga

SEQ ID NO: 316170 - DNA, 5747 bp, Homo sapiens
  misc_feature (60)..(60): n is a, c, g, or t
cccacctcctacctgggggacaaggtttcttcatatggtggttacctcacttaccaagcnaagtcctttgcgcttgcctggcgacatggttcttctggaaaagaagccggatgtacagctcactggtcagcacatgtccatcatctatgaggagacaaacaccccacggccagaccggctgcatcatggacgagtgcacgtggtcgagggaaacttcagacatgccagcagccgtgccccagtgtctagggaggagctgatgacagtgctgtctagactggcagatgtgcgcatccaaggcctctacttcacagagactcaaaggctcaccctgagcgaggtggggctagaggaagcctctgacacaggaagtgggcgcatagcacttgctgtggaaatctgtgcctgcccccctgcctacgctggtgactcttgtcagggttgtagccctggatactatcgggatcataaaggcttgtataccggacggtgtgttccctgcaattgcaacggacattcaaatcaatgccaggatggctcaggcatatgtgttaactgtcagcacaacaccgcgggagagcactgtgaacgctgccaggagggctactatggcaacgccgtccacggatcctgcagggcctgcccatgtcctcacactaacagctttgccactggctgtgtggtgaatgggggagacgtgcggtgctcctgcaaagctgggtacacaggaacacagtgtgaaaggtgtgcaccgggatatttcgggaatccccagaaattcggaggtagctgccaaccatgcagttgtaacagcaatggccagctgggcagctgtcatcccctgactggagactgcataaaccaagaacccaaagatagcagccctgcagaagaatgtgatgattgcgacagctgtgtgatgaccctcctgaacgacctggccaccatgggcgagcagctccgcctggtcaagtctcagctgcagggcctgagtgccagcgcagggcttctggagcagatgaggcacatggagacccaggccaaggacctgaggaatcagttgctcaactaccgttctgccatttcaaatcatggatcaaaaatagaaggcctggaaagagaactgactgatttgaatcaagaatttgagactttgcaagaaaaggctcaagtaaattccagaaaagcacaaacattaaacaacaatgttaatcgggcaacacaaagcgcaaaagaactggatgtgaagattaaaaatgtcatccggaatgtgcacattcttttaaagcagatctctgggacagatggagagggaaacaacgtgccttcaggtgacttttccagagagtgggctgaagcccagcgcatgatgagggaactgcggaacaggaactttggaaagcacctcagagaagcagaagctgataaaagggagtcgcagctcttgctgaaccggataaggacctggcagaaaacccaccagggggagaacaatgggcttgctaacagtatccgggattctttaaatgaatacgaagccaaactcagtgaccttcgtgctcggctgcaggaggcagctgcccaagccaagcaggcaaatggcttgaaccaagaaaacgagagagctttgggagccattcagagacaagtgaaagaaataaattccctgcagagtgatttcaccaagtatctaaccactgcagactcatctttgttgcaaaccaacattgcgctgcagctgatggagaaaagccagaaggaatatgaaaaattagctgccagtttaaatgaagcaagacaagaactaagtgacaaagtaagagaactttccagatctgctggcaaaacatcccttgtggaggaggcagaaaagcacgcgcggtccttacaagagctggcaaagcagctggaagagatcaagagaaacgccagcggggatgagctggtgcgctgtgctgtggatgccgccaccgcctacgagaacatcctcaatgccatcaaagcggccgaggacgcagccaacagggctgccagtgcatctgaatctgccctccagacagtgataaaggaagatctgccaagaaaagctaaaaccctgagttccaacagtgataaactgttaaatgaagccaagatgacacaaaagaagctaaagcaagaagtcagtccagctctcaacaacctacagcaaaccctgaatattgtgacagttcagaaagaagtgatagacaccaatctcacaactctccgagatggtcttcatgggatacagagaggtgatattgatgctatgatcagtagtgcaaagagcatggtcagaaaggccaacgacatcacagatgaggttctggatgggctcaaccccatccagacagatgtggaaagaattaaggacacctatgggaggacacagaacgaagacttcaaaaaggctctgactgatgcagataactcggtgaataagttaaccaacaaactacctgatctttggcgcaagattgaaagtatcaaccaacagctgttgcccttgggaaacatctctgacaacatggacagaatacgagaactaattcagcaggccagagatgctgccagtaaggttgctgtccccatgaggttcaatggtaaatctggagtcgaagtccgactgccaaatgacctggaagatttgaaaggatatacatctctgtccttgtttctccaaaggcccaactcaagagaaaatgggggtactgagaatatgtttgtgatgtaccttggaaataaagatgcctcccgggactacatcggcatggcagttgtggatggccagctcacctgtgtctacaacctgggggaccgtgaggctgaactccaagtggaccagatcttgaccaagagtgagactaaggaggcagttatggatcgggtgaaatttcagagaatttatcagtttgcaaggcttaattacaccaaaggagccacatccagtaaaccagaaacacccggagtctatgacatggatggtagaaatagcaatacactccttaatttggatcctgaaaatgttgtattttatgttggaggttacccacctgattttaaacttcccagtcgactaagtttccctccatacaaaggttgtattgaattagatgacctcaatgaaaatgttctgagcttgtacaacttcaaaaaaacattcaatctcaacacaactgaagtggagccttgtagaaggaggaaggaagagtcagacaaaaattattttgaaggtacgggctatgctcgagttccaactcaaccacatgctcccatcccaacctttggacagacaattcagaccaccgtggatagaggcttgctgttctttgcagaaaacggggatcgcttcatatctctaaatatagaagatggcaagctcatggtgagatacaaactgaattcagagctaccaaaagagagaggagttggagacgccataaacaacggcagagaccattcgattcagatcaaaattggaaaactccaaaagcgtatgtggataaatgtggacgttcaaaacactataattgatggtgaagtatttgatttcagcacatattatctgggaggaattccaattgcaatcagggaaagatttaacatttctacgcctgctttccgaggctgcatgaaaaatttgaagaaaaccagtggtgtcgttagattgaatgatactgtgggagtaaccaaaaagtgctcggaagactggaagcttgtgcgatctgcctcattctccagaggaggacaattgagtttcactgatttgggcttaccacctactgaccacctccaggcctcatttggatttcagacctttcaacccagtggcatattattagatcatcagacatggacaaggaacctgcaggtcactctggaagatggttacattgaattgagcaccagcgatagcggcggcccaatttttaaatctccacagacgtatatggatggtttactgcattatgtatctgtaataagcgacaactctggactacggcttctcatcgatgaccagcttctgagaaatagcaaaaggctaaaacacatttcaagttcccggcagtctctgcgtctgggcgggagcaattttgagggttgtattagcaatgtttttgtccagaggttatcactgagtcctgaagtcctagatttgaccagtaactctctcaagagagatgtgtccctgggaggctgcagtttaaacaaaccaccttttctaatgttgcttaaaggttctaccaggtttaacaagaccaagacttttcgtatcaaccagctgttgcaggacacaccagtggcctccccaaggagcgtgaaggtgtggcaagatgcttgctcaccacttcccaagacccaggccaatcatggagccctccagtttggggacattcccaccagccacttgctattcaagcttcctcaggagctgctgaaacccaggtcacagtttgctgtggacatgcagacaacatcctccagaggactggtgtttcacacgggcactaagaactcctttatggctctttatctttcaaaaggacgtctggtctttgcactggggacagatgggaaaaaattgaggatcaaaagcaaggagaaatgcaatgatgggaaatggcacacggtggtgtttggccatgatggggaaaaggggcgcttggttgtggatggactgagggcccgggagggaagtttgcctggaaactccaccatcagcatcagagcgccagtttacctgggatcacctccatcagggaaaccaaagagcctccccacaaacagctttgtgggatgcctgaagaactttcagctggattcaaaacccttgtataccccttcttcaagcttcggggtgtcttcctgcttgggtggtcctttggagaaaggcatttatttctctgaagaaggaggtcatgtcgtcttggctcactctgtattgttggggccagaatttaagcttgttttcagcatccgcccaagaagtctcactgggatcctaatacacatcggaagtcagcccgggaagcacttatgtgtttacctggaggcaggaaaggtcacggcctctatggacagtggggcaggtgggacctcaacgtcggtcacaccaaagcagtctctgtgtgatggacagtggcactcggtggcagccaatttgacgacactgaggatccctgtgtggaaatcattctttggctgtctgaggaatattcatgtcaatcacatccctgtccctgtcactgaagccttggaagtccaggggcctgtcagtctgaatggttgtcctgaccagtaacccaagcctatttcacagcaaggaaattcaccttcaaaagcactgattacccaatgcacctccctccccagctcgagatcattcttcaatcaggacacaaaccagacaggtttaatagcgaatctaattttgaattctgaccatggatacccatcactttggcattcagtgctacatgtgtattttatataaaaatcccatttcttgaagataaaaaaattgttattcaaattgttatgcacagaatgtttttggtaatattaatttccactaaaaaattaaatgtcttttaagaaacattcttttccacttgttaaaaaaattaaatatattttaaagcactttaagaatatgaaactttcatatatgttaaaggattataatttatggaattaaaaaatgcagtgtagtccttaaattatga

SEQ ID NO: 316171 - DNA, 5177 bp, Homo sapiens
  misc_feature (60)..(60): n is a, c, g, or t
cccacctcctacctgggggacaaggtttcttcatatggtggttacctcacttaccaagcnaagtcctttgcgcttgcctggcgacatggttcttctggaaaagaagccggatgtacagctcactggtcagcacatgtccatcatctatgaggagacaaacaccccacggccagaccggctgcatcatggacgagtgcacgtggtcgagggaaacttcagacatgccagcagccgtgccccagtgtctagggaggagctgatgacagtgctgtctagactggcagatgtgcgcatccaaggcctctacttcacagagactcaaaggctcaccctgagcgaggtggggctagaggaagcctctgacacaggaagtgggcgcatagcacttgctgtggaaatctgtgcctgcccccctgcctacgctggtgactcttgtcagggttgtagccctggatactatcgggatcataaaggcttgtataccggacggtgtgttccctgcaattgcaacggacattcaaatcaatgccaggatggctcaggcatatgtgttaactgtcagcacaacaccgcgggagagcactgtgaacgctgccaggagggctactatggcaacgccgtccacggatcctgcagggcctgcccatgtcctcacactaacagctttgccactggctgtgtggtgaatgggggagacgtgcggtgctcctgcaaagctgggtacacaggaacacagtgtgaaaggtgtgcaccgggatatttcgggaatccccagaaattcggaggtagctgccaaccatgcagttgtaacagcaatggccagctgggcagctgtcatcccctgactggagactgcataaaccaagaacccaaagatagcagccctgcagaagaatgtgatgattgcgacagctgtgtgatgaccctcctgaacgacctggccaccatgggcgagcagctccgcctggtcaagtctcagctgcagggcctgagtgccagcgcagggcttctggagcagatgaggcacatggagacccaggccaaggacctgaggaatcagttgctcaactaccgttctgccatttcaaatcatggatcaaaaatagaaggcctggaaagagaactgactgatttgaatcaagaatttgagactttgcaagaaaaggctcaagtaaattccagaaaagcacaaacattaaacaacaatgttaatcgggcaacacaaagcgcaaaagaactggatgtgaagattaaaaatgtcatccggaatgtgcacattcttttaaagcagatctctgggacagatggagagggaaacaacgtgccttcaggtgacttttccagagagtgggctgaagcccagcgcatgatgagggaactgcggaacaggaactttggaaagcacctcagagaagcagaagctgataaaagggagtcgcagctcttgctgaaccggataaggacctggcagaaaacccaccagggggagaacaatgggcttgctaacagtatccgggattctttaaatgaatacgaagccaaactcagtgaccttcgtgctcggctgcaggaggcagctgcccaagccaagcaggcaaatggcttgaaccaagaaaacgagagagctttgggagccattcagagacaagtgaaagaaataaattccctgcagagtgatttcaccaagtatctaaccactgcagactcatctttgttgcaaaccaacattgcgctgcagctgatggagaaaagccagaaggaatatgaaaaattagctgccagtttaaatgaagcaagacaagaactaagtgacaaagtaagagaactttccagatctgctggcaaaacatcccttgtggaggaggcagaaaagcacgcgcggtccttacaagagctggcaaagcagctggaagagatcaagagaaacgccagcggggatgagctggtgcgctgtgctgtggatgccgccaccgcctacgagaacatcctcaatgccatcaaagcggccgaggacgcagccaacagggctgccagtgcatctgaatctgccctccagacagtgataaaggaagatctgccaagaaaagctaaaaccctgagttccaacagtgataaactgttaaatgaagccaagatgacacaaaagaagctaaagcaagaagtcagtccagctctcaacaacctacagcaaaccctgaatattgtgacagttcagaaagaagtgatagacaccaatctcacaactctccgagatggtcttcatgggatacagagaggtgatattgatgctatgatcagtagtgcaaagagcatggtcagaaaggccaacgacatcacagatgaggttctggatgggctcaaccccatccagacagatgtggaaagaattaaggacacctatgggaggacacagaacgaagacttcaaaaaggctctgactgatgcagataactcggtgaataagttaaccaacaaactacctgatctttggcgcaagattgaaagtatcaaccaacagctgttgcccttgggaaacatctctgacaacatggacagaatacgagaactaattcagcaggccagagatgctgccagtaaggttgctgtccccatgaggttcaatggtaaatctggagtcgaagtccgactgccaaatgacctggaagatttgaaaggatatacatctctgtccttgtttctccaaaggcccaactcaagagaaaatgggggtactgagaatatgtttgtgatgtaccttggaaataaagatgcctcccgggactacatcggcatggcagttgtggatggccagctcacctgtgtctacaacctgggggaccgtgaggctgaactccaagtggaccagatcttgaccaagagtgagactaaggaggcagttatggatcgggtgaaatttcagagaatttatcagtttgcaaggcttaattacaccaaaggagccacatccagtaaaccagaaacacccggagtctatgacatggatggtagaaatagcaatacactccttaatttggatcctgaaaatgttgtattttatgttggaggttacccacctgattttaaacttcccagtcgactaagtttccctccatacaaaggttgtattgaattagatgacctcaatgaaaatgttctgagcttgtacaacttcaaaaaaacattcaatctcaacacaactgaagtggagccttgtagaaggaggaaggaagagtcagacaaaaattattttgaaggtacgggctatgctcgagttccaactcaaccacatgctcccatcccaacctttggacagacaattcagaccaccgtggatagaggcttgctgttctttgcagaaaacggggatcgcttcatatctctaaatatagaagatggcaagctcatggtgagatacaaactgaattcagagctaccaaaagagagaggagttggagacgccataaacaacggcagagaccattcgattcagatcaaaattggaaaactccaaaagcgtatgtggataaatgtggacgttcaaaacactataattgatggtgaagtatttgatttcagcacatattatctgggaggaattccaattgcaatcagggaaagatttaacatttctacgcctgctttccgaggctgcatgaaaaatttgaagaaaaccagtggtgtcgttagattgaatgatactgtgggagtaaccaaaaagtgctcggaagactggaagcttgtgcgatctgcctcattctccagaggaggacaattgagtttcactgatttgggcttaccacctactgaccacctccaggcctcatttggatttcagacctttcaacccagtggcatattattagatcatcagacatggacaaggaacctgcaggtcactctggaagatggttacattgaattgagcaccagcgatagcggcggcccaatttttaaatctccacagacgtatatggatggtttactgcattatgtatctgtaataagcgacaactctggactacggcttctcatcgatgaccagcttctgagaaatagcaaaaggctaaaacacatttcaagttcccggcagtctctgcgtctgggcgggagcaattttgagggttgtattagcaatgtttttgtccagaggttatcactgagtcctgaagtcctagatttgaccagtaactctctcaagagagatgtgtccctgggaggctgcagtttaaacaaaccaccttttctaatgttgcttaaaggttctaccaggtttaacaagaccaagacttttcgtatcaaccagctgttgcaggacacaccagtggcctccccaaggagcgtgaaggtgtggcaagatgcttgctcaccacttcccaagacccaggccaatcatggagccctccagtttggggacattcccaccagccacttgctattcaagcttcctcaggagctgctgaaacccaggtcacagtttgctgtggacatgcagacaacatcctccagaggactggtgtttcacacgggcactaagaactcctttatggctctttatctttcaaaaggacgtctggtctttgcactggggacagatgggaaaaaattgaggatcaaaagcaaggagaaatgcaatgatgggaaatggcacacggtggtgtttggccatgatggggaaaaggggcgcttggttgtggatggactgagggcccgggagggaagtttgcctggaaactccaccatcagcatcagagcgccagtttacctgggatcacctccatcagggaaaccaaaggtgcaggttgagacgcaggccctgaaagggtgaagatagagcttctctgccacttcctaaacctgaatctattggcttctcctccagggaatgcaaaaacgtaggttttaggttatagacagagattttttggttaacataatgtgtttcaaattacagtaatttgtgccattttcaccatctttgccataaggtaaaacattggcttaactgttttctctccatcaaactatttattttaaatgtgcttctatgggatctttttatctctcccataaatggaaacccaatattctttaccataaataatagataaccctgagaaataaacatttgaaaaccaaacactgttaatatcaactaagtagtgtgacctatgtgttct

SEQ ID NO: 316172 - DNA, 5152 bp, Homo sapiens
  misc_feature (60)..(60): n is a, c, g, or t
cccacctcctacctgggggacaaggtttcttcatatggtggttacctcacttaccaagcnaagtcctttgcgcttgcctggcgacatggttcttctggaaaagaagccggatgtacagctcactggtcagcacatgtccatcatctatgaggagacaaacaccccacggccagaccggctgcatcatggacgagtgcacgtggtcgagggaaacttcagacatgccagcagccgtgccccagtgtctagggaggagctgatgacagtgctgtctagactggcagatgtgcgcatccaaggcctctacttcacagagactcaaaggctcaccctgagcgaggtggggctagaggaagcctctgacacaggaagtgggcgcatagcacttgctgtggaaatctgtgcctgcccccctgcctacgctggtgactcttgtcagggttgtagccctggatactatcgggatcataaaggcttgtataccggacggtgtgttccctgcaattgcaacggacattcaaatcaatgccaggatggctcaggcatatgtgttaactgtcagcacaacaccgcgggagagcactgtgaacgctgccaggagggctactatggcaacgccgtccacggatcctgcagggcctgcccatgtcctcacactaacagctttgccactggctgtgtggtgaatgggggagacgtgcggtgctcctgcaaagctgggtacacaggaacacagtgtgaaaggtgtgcaccgggatatttcgggaatccccagaaattcggaggtagctgccaaccatgcagttgtaacagcaatggccagctgggcagctgtcatcccctgactggagactgcataaaccaagaacccaaagatagcagccctgcagaagaatgtgatgattgcgacagctgtgtgatgaccctcctgaacgacctggccaccatgggcgagcagctccgcctggtcaagtctcagctgcagggcctgagtgccagcgcagggcttctggagcagatgaggcacatggagacccaggccaaggacctgaggaatcagttgctcaactaccgttctgccatttcaaatcatggatcaaaaatagaaggcctggaaagagaactgactgatttgaatcaagaatttgagactttgcaagaaaaggctcaagtaaattccagaaaagcacaaacattaaacaacaatgttaatcgggcaacacaaagcgcaaaagaactggatgtgaagattaaaaatgtcatccggaatgtgcacattcttttaaagcagatctctgggacagatggagagggaaacaacgtgccttcaggtgacttttccagagagtgggctgaagcccagcgcatgatgagggaactgcggaacaggaactttggaaagcacctcagagaagcagaagctgataaaagggagtcgcagctcttgctgaaccggataaggacctggcagaaaacccaccagggggagaacaatgggcttgctaacagtatccgggattctttaaatgaatacgaagccaaactcagtgaccttcgtgctcggctgcaggaggcagctgcccaagccaagcaggcaaatggcttgaaccaagaaaacgagagagctttgggagccattcagagacaagtgaaagaaataaattccctgcagagtgatttcaccaagtatctaaccactgcagactcatctttgttgcaaaccaacattgcgctgcagctgatggagaaaagccagaaggaatatgaaaaattagctgccagtttaaatgaagcaagacaagaactaagtgacaaagtaagagaactttccagatctgctggcaaaacatcccttgtggaggaggcagaaaagcacgcgcggtccttacaagagctggcaaagcagctggaagagatcaagagaaacgccagcggggatgagctggtgcgctgtgctgtggatgccgccaccgcctacgagaacatcctcaatgccatcaaagcggccgaggacgcagccaacagggctgccagtgcatctgaatctgccctccagacagtgataaaggaagatctgccaagaaaagctaaaaccctgagttccaacagtgataaactgttaaatgaagccaagatgacacaaaagaagctaaagcaagaagtcagtccagctctcaacaacctacagcaaaccctgaatattgtgacagttcagaaagaagtgatagacaccaatctcacaactctccgagatggtcttcatgggatacagagaggtgatattgatgctatgatcagtagtgcaaagagcatggtcagaaaggccaacgacatcacagatgaggttctggatgggctcaaccccatccagacagatgtggaaagaattaaggacacctatgggaggacacagaacgaagacttcaaaaaggctctgactgatgcagataactcggtgaataagttaaccaacaaactacctgatctttggcgcaagattgaaagtatcaaccaacagctgttgcccttgggaaacatctctgacaacatggacagaatacgagaactaattcagcaggccagagatgctgccagtaaggttgctgtccccatgaggttcaatggtaaatctggagtcgaagtccgactgccaaatgacctggaagatttgaaaggatatacatctctgtccttgtttctccaaaggcccaactcaagagaaaatgggggtactgagaatatgtttgtgatgtaccttggaaataaagatgcctcccgggactacatcggcatggcagttgtggatggccagctcacctgtgtctacaacctgggggaccgtgaggctgaactccaagtggaccagatcttgaccaagagtgagactaaggaggcagttatggatcgggtgaaatttcagagaatttatcagtttgcaaggcttaattacaccaaaggagccacatccagtaaaccagaaacacccggagtctatgacatggatggtagaaatagcaatacactccttaatttggatcctgaaaatgttgtattttatgttggaggttacccacctgattttaaacttcccagtcgactaagtttccctccatacaaaggttgtattgaattagatgacctcaatgaaaatgttctgagcttgtacaacttcaaaaaaacattcaatctcaacacaactgaagtggagccttgtagaaggaggaaggaagagtcagacaaaaattattttgaaggtacgggctatgctcgagttccaactcaaccacatgctcccatcccaacctttggacagacaattcagaccaccgtggatagaggcttgctgttctttgcagaaaacggggatcgcttcatatctctaaatatagaagatggcaagctcatggtgagatacaaactgaattcagagctaccaaaagagagaggagttggagacgccataaacaacggcagagaccattcgattcagatcaaaattggaaaactccaaaagcgtatgtggataaatgtggacgttcaaaacactataattgatggtgaagtatttgatttcagcacatattatctgggaggaattccaattgcaatcagggaaagatttaacatttctacgcctgctttccgaggctgcatgaaaaatttgaagaaaaccagtggtgtcgttagattgaatgatactgtgggagtaaccaaaaagtgctcggaagactggaagcttgtgcgatctgcctcattctccagaggaggacaattgagtttcactgatttgggcttaccacctactgaccacctccaggcctcatttggatttcagacctttcaacccagtggcatattattagatcatcagacatggacaaggaacctgcaggtcactctggaagatggttacattgaattgagcaccagcgatagcggcggcccaatttttaaatctccacagacgtatatggatggtttactgcattatgtatctgtaataagcgacaactctggactacggcttctcatcgatgaccagcttctgagaaatagcaaaaggctaaaacacatttcaagttcccggcagtctctgcgtctgggcgggagcaattttgagggttgtattagcaatgtttttgtccagaggttatcactgagtcctgaagtcctagatttgaccagtaactctctcaagagagatgtgtccctgggaggctgcagtttaaacaaaccaccttttctaatgttgcttaaaggttctaccaggtttaacaagaccaagacttttcgtatcaaccagctgttgcaggacacaccagtggcctccccaaggagcgtgaaggtgtggcaagatgcttgctcaccacttcccaagacccaggccaatcatggagccctccagtttggggacattcccaccagccacttgctattcaagcttcctcaggagctgctgaaacccaggtcacagtttgctgtggacatgcagacaacatcctccagaggactggtgtttcacacgggcactaagaactcctttatggctctttatctttcaaaaggacgtctggtctttgcactggggacagatgggaaaaaattgaggatcaaaagcaaggagaaatgcaatgatgggaaatggcacacggtggtgtttggccatgatggggaaaaggggcgcttggttgtggatggactgagggcccgggagggaagtttgcctggaaactccaccatcagcatcagagcgccagtttacctgggatcacctccatcagggaaaccaaagagcctccccacaaacagctttgtgggatgcctgaagaactttcagctggataggggttgcttggttctggtaaaaaaaaaaaaaaaaaaaaaaaaagtggaaacttactctagccactagagggagcctgcagggcccatcattttgatgttgtcgacgattccagatgcctgtgcaccattgcttgtcaagcaaactattttaggagcactgtccgctcctcacctccaccctcagccctggttcacaagagctccgggaatcttcaagccttgtcttccagagggaggtagtacattggcgtagagtccgtctctgctgctcaaccgtgccatcagccaggtgttcccgtgcaggatg

SEQ ID NO: 316173 - DNA, 4370 bp, Homo sapiens
  misc_feature (60)..(60): n is a, c, g, or t
cccacctcctacctgggggacaaggtttcttcatatggtggttacctcacttaccaagcnaagtcctttgcgcttgcctggcgacatggttcttctggaaaagaagccggatgtacagctcactggtcagcacatgtccatcatctatgaggagacaaacaccccacggccagaccggctgcatcatggacgagtgcacgtggtcgagggaaacttcagacatgccagcagccgtgccccagtgtctagggaggagctgatgacagtgctgtctagactggcagatgtgcgcatccaaggcctctacttcacagagactcaaaggctcaccctgagcgaggtggggctagaggaagcctctgacacaggaagtgggcgcatagcacttgctgtggaaatctgtgcctgcccccctgcctacgctggtgactcttgtcagggttgtagccctggatactatcgggatcataaaggcttgtataccggacggtgtgttccctgcaattgcaacggacattcaaatcaatgccaggatggctcaggcatatgtgttaactgtcagcacaacaccgcgggagagcactgtgaacgctgccaggagggctactatggcaacgccgtccacggatcctgcagggcctgcccatgtcctcacactaacagctttgccactggctgtgtggtgaatgggggagacgtgcggtgctcctgcaaagctgggtacacaggaacacagtgtgaaaggtgtgcaccgggatatttcgggaatccccagaaattcggaggtagctgccaaccatgcagttgtaacagcaatggccagctgggcagctgtcatcccctgactggagactgcataaaccaagaacccaaagatagcagccctgcagaagaatgtgatgattgcgacagctgtgtgatgaccctcctgaacgacctggccaccatgggcgagcagctccgcctggtcaagtctcagctgcagggcctgagtgccagcgcagggcttctggagcagatgaggcacatggagacccaggccaaggacctgaggaatcagttgctcaactaccgttctgccatttcaaatcatggatcaaaaatagaaggcctggaaagagaactgactgatttgaatcaagaatttgagactttgcaagaaaaggctcaagtaaattccagaaaagcacaaacattaaacaacaatgttaatcgggcaacacaaagcgcaaaagaactggatgtgaagattaaaaatgtcatccggaatgtgcacattcttttaaagcagatctctgggacagatggagagggaaacaacgtgccttcaggtgacttttccagagagtgggctgaagcccagcgcatgatgagggaactgcggaacaggaactttggaaagcacctcagagaagcagaagctgataaaagggagtcgcagctcttgctgaaccggataaggacctggcagaaaacccaccagggggagaacaatgggcttgctaacagtatccgggattctttaaatgaatacgaagccaaactcagtgaccttcgtgctcggctgcaggaggcagctgcccaagccaagcaggcaaatggcttgaaccaagaaaacgagagagctttgggagccattcagagacaagtgaaagaaataaattccctgcagagtgatttcaccaagtatctaaccactgcagactcatctttgttgcaaaccaacattgcgctgcagctgatggagaaaagccagaaggaatatgaaaaattagctgccagtttaaatgaagcaagacaagaactaagtgacaaagtaagagaactttccagatctgctggcaaaacatcccttgtggaggaggcagaaaagcacgcgcggtccttacaagagctggcaaagcagctggaagagatcaagagaaacgccagcggggatgagctggtgcgctgtgctgtggatgccgccaccgcctacgagaacatcctcaatgccatcaaagcggccgaggacgcagccaacagggctgccagtgcatctgaatctgccctccagacagtgataaaggaagatctgccaagaaaagctaaaaccctgagttccaacagtgataaactgttaaatgaagccaagatgacacaaaagaagctaaagcaagaagtcagtccagctctcaacaacctacagcaaaccctgaatattgtgacagttcagaaagaagtgatagacaccaatctcacaactctccgagatggtcttcatgggatacagagaggtgatattgatgctatgatcagtagtgcaaagagcatggtcagaaaggccaacgacatcacagatgaggttctggatgggctcaaccccatccagacagatgtggaaagaattaaggacacctatgggaggacacagaacgaagacttcaaaaaggctctgactgatgcagataactcggtgaataagttaaccaacaaactacctgatctttggcgcaagattgaaagtatcaaccaacagctgttgcccttgggaaacatctctgacaacatggacagaatacgagaactaattcagcaggccagagatgctgccagtaaggttgctgtccccatgaggttcaatggtaaatctggagtcgaagtccgactgccaaatgacctggaagatttgaaaggatatacatctctgtccttgtttctccaaaggcccaactcaagagaaaatgggggtactgagaatatgtttgtgatgtaccttggaaataaagatgcctcccgggactacatcggcatggcagttgtggatggccagctcacctgtgtctacaacctgggggaccgtgaggctgaactccaagtggaccagatcttgaccaagagtgagactaaggaggcagttatggatcgggtgaaatttcagagaatttatcagtttgcaaggcttaattacaccaaaggagccacatccagtaaaccagaaacacccggagtctatgacatggatggtagaaatagcaatacactccttaatttggatcctgaaaatgttgtattttatgttggaggttacccacctgattttaaacttcccagtcgactaagtttccctccatacaaaggttgtattgaattagatgacctcaatgaaaatgttctgagcttgtacaacttcaaaaaaacattcaatctcaacacaactgaagtggagccttgtagaaggaggaaggaagagtcagacaaaaattattttgaaggtacgggctatgctcgagttccaactcaaccacatgctcccatcccaacctttggacagacaattcagaccaccgtggatagaggcttgctgttctttgcagaaaacggggatcgcttcatatctctaaatatagaagatggcaagctcatggtgagatacaaactgaattcagagctaccaaaagagagaggagttggagacgccataaacaacggcagagaccattcgattcagatcaaaattggaaaactccaaaagcgtatgtggataaatgtggacgttcaaaacactataattgatggtgaagtatttgatttcagcacatattatctgggaggaattccaattgcaatcagggaaagatttaacatttctacgcctgctttccgaggctgcatgaaaaatttgaagaaaaccagtggtgtcgttagattgaatgatactgtgggagtaaccaaaaagtgctcggaagactggaagcttgtgcgatctgcctcattctccagaggaggacaattgagtttcactgatttgggcttaccacctactgaccacctccaggcctcatttggatttcagacctttcaacccagtggcatattattagatcatcagacatggacaaggaacctgcaggtcactctggaagatggttacattgaattgagcaccagcgatagcggcggcccaatttttaaatctccacagacgtatatggatggtttactgcattatgtatctgtaataagcgacaactctgggtgagtggaataatacttctgtcagagctgtgagtgagttttactctctttcgtttaatggaattttctggtgtctttttgcaaaatatttgtccttgataccaaaaatacttcactaataagtcttgtccttcttcctttttccatatcaatttcttcataaaaaaataaactgccacacatggtggctcatgtctgtaatcccaacaactaagaaggctgaggcaagagggttgcttgaggccaagagttcgagaccagtcttggaaacacagtgaaaccatgtctctacgaaaactaaaataaaataaaatgtaaataaataaaattttaaaaataaatcagttggatgg

SEQ ID NO: 316174 - DNA, 1035 bp, Homo sapiens
acctcacaacaacacagcatactcggattgccagaagaacgggtcagtctggatgcaaagagccgttccatacgcgttaggcaagcattctctctgaagaaggaggtcatgtcgtcttggctcactctgtattgttggggccagaatttaagcttgttttcagcatccgcccaagaagtctcactgggatcctaatacacatcggaagtcagcccgggaagcacttatgtgtttacctggaggcaggaaaggtcacggcctctatggacagtggggcaggtgggacctcaacgtcggtcacaccaaagcagtctctgtgtgatggacagtggcactcggtggcagtcaccataaaacaacacatcctgcacctggaactggacacagacagtagctacacagctggacagatccccttcccacctgccagcactcaagagccactacaccttggaggtgctccagccaatttgacgacactgaggatccctgtgtggaaatcattctttggctgtctgaggaatattcatgtcaatcacatccctgtccctgtcactgaagccttggaagtccaggggcctgtcagtctgaatggttgtcctgaccagtaacccaagcctatttcacagcaaggaaattcaccttcaaaagcactgattacccaatgcacctccctccccagctcgagatcattcttcaatcaggacacaaaccagacaggtttaatagcgaatctaattttgaattctgaccatggatacccatcactttggcattcagtgctacatgtgtattttatataaaaatcccatttcttgaagataaaaaaattgttattcaaattgttatgcacagaatgtttttggtaatattaatttccactaaaaaattaaatgtcttttaagaaacattcttttccacttgttaaaaaaattaaatatattttaaagcactttaagaatatgaaactttcatatatgttaaaggattataatttatggaattaaaaaatgcagtgtagtccttaaattatga

SEQ ID NO: 316175 - DNA, 845 bp, Homo sapiens
ttctagaggatccctaaaggcgagccgggtagcacttatgtgttacctgaaggcaggaaaggtcacggcctctatggacagtggggcaggtgggacctcaacgtcggtcacaccaaagcagtctctgtgtgatggacagtggcactcggtggcagtcaccataaaacaacacatcctgcacctggaactggacacagacagtagctacacagctggacagatccccttcccacctgccagcactcaagagccactacaccttggaggtgctccagccaatttgacgacactgaggatccctgtgtggaaatcattctttggctgtctgaggaatattcatgtcaatcacatccctgtccctgtcactgaagccttggaagtccaggggcctgtcagtctgaatggttgtcctgaccagtaacccaagcctatttcacagcaaggaaattcaccttcaaaagcactgattacccaatgcacctccctccccagctcgagatcattcttcaatcaggacacaaaccagacaggtttaatagcgaatctaattttgaattctgaccatggatacccatcactttggcattcagtgctacatgtgtattttatataaaaatcccatttcttgaagataaaaaaattgttattcaaattgttatgcacagaatgtttttggtaatattaatttccactaaaaaattaaatgtcttttaagaaacattcttttccacttgttaaaaaaattaaatatattttaaagcactttaagaatatgaaactttcatatatgttaaaggattataatttatggaattaaaaaatgcagtgtagtccttaaattatga

SEQ ID NO: 316176 - DNA, 3207 bp, Homo sapiens
  misc_feature (3)..(4): n is a, c, g, or t
  misc_feature (8)..(8): n is a, c, g, or t
  misc_feature (3191)..(3191): n is a, c, g, or t
ganntccnggaaccgggatgcctccagcagtgaggcggtcagctgcagcatgggatggctgtggatctttggggcagccctggggcagtgtctgggctacagttcacagcagcaaagggtgccatttcttcagcctcccggtcaaagtcaactgcaagcgagttatgtggagtttagacccagccagggttgtagccctggatactatcgggatcataaaggcttgtataccggacggtgtgttccctgcaattgcaacggacattcaaatcaatgccaggatggctcaggcatatgtgttaactgtcagcacaacaccgcgggagagcactgtgaacgctgccaggagggctactatggcaacgccgtccacggatcctgcagggcctgcccatgtcctcacactaacagctttgccactggctgtgtggtgaatgggggagacgtgcggtgctcctgcaaagctgggtacacaggaacacagtgtgaaaggtgtgcaccgggatatttcgggaatccccagaaattcggaggtagctgccaaccatgcagttgtaacagcaatggccagctgggcagctgtcatcccctgactggagactgcataaaccaagaacccaaagatagcagccctgcagaagaatgtgatgattgcgacagctgtgtgatgaccctcctgaacgacctggccaccatgggcgagcagctccgcctggtcaagtctcagctgcagggcctgagtgccagcgcagggcttctggagcagatgaggcacatggagacccaggccaaggacctgaggaatcagttgctcaactaccgttctgccatttcaaatcatggatcaaaaatagaaggcctggaaagagaactgactgatttgaatcaagaatttgagactttgcaagaaaaggctcaagtaaattccagaaaagcacaaacattaaacaacaatgttaatcgggcaacacaaagcgcaaaagaactggatgtgaagattaaaaatgtcatccggaatgtgcacattcttttaaagcagatctctgggacagatggagagggaaacaacgtgccttcaggtgacttttccagagagtgggctgaagcccagcgcatgatgagggaactgcggaacaggaactttggaaagcacctcagagaagcagaagctgataaaagggagtcgcagctcttgctgaaccggataaggacctggcagaaaacccaccagggggagaacaatgggcttgctaacagtatccgggattctttaaatgaatacgaagccaaactcagtgaccttcgtgctcggctgcaggaggcagctgcccaagccaagcaggcaaatggcttgaaccaagaaaacgagagagctttgggagccattcagagacaagtgaaagaaataaattccctgcagagtgatttcaccaagtatctaaccactgcagactcatctttgttgcaaaccaacattgcgctgcagctgatggagaaaagccagaaggaatatgaaaaattagctgccagtttaaatgaagcaagacaagaactaagtgacaaagtaagagaactttccagatctgctggcaaaacatcccttgtggaggaggcagaaaagcacgcgcggtccttacaagagctggcaaagcagctggaagagatcaagagaaacgccagcggggatgagctggtgcgctgtgctgtggatgccgccaccgcctacgagaacatcctcaatgccatcaaagcggccgaggacgcagccaacagggctgccagtgcatctgaatctgccctccagacagtgataaaggaagatctgccaagaaaagctaaaaccctgagttccaacagtgataaactgttaaatgaagccaagatgacacaaaagaagctaaagcaagaagtcagtccagctctcaacaacctacagcaaaccctgaatattgtgacagttcagaaagaagtgatagacaccaatctcacaactctccgagatggtcttcatgggatacagagaggtgatattgatgctatgatcagtagtgcaaagagcatggtcagaaaggccaacgacatcacagatgaggttctggatgggctcaaccccatccagacagatgtggaaagaattaaggacacctatgggaggacacagaacgaagacttcaaaaaggctctgactgatgcagataactcggtgaataagttaaccaacaaactacctgatctttggcgcaagattgaaagtatcaaccaacagctgttgcccttgggaaacatctctgacaacatggacagaatacgagaactaattcagcaggccagagatgctgccagtaaggttgctgtccccatgaggttcaatggtaaatctggagtcgaagtccgactgccaaatgacctggaagatttgaaaggatatacatctctgtccttgtttctccaaaggcccaactcaagagaaaatgggggtactgagaatatgtttgtgatgtaccttggaaataaagatgcctcccgggactacatcggcatggcagttgtggatggccagctcacctgtgtctacaacctgggggaccgtgaggctgaactccaagtggaccagatcttgaccaagagtgagactaaggaggcagttatggatcgggtgaaatttcagagaatttatcagtttgcaaggcttaattacaccaaaggagccacatccagtaaaccagaaacacccggagtctatgacatggatggtagaaatagcaatacactccttaatttggatcctgaaaatgttgtattttatgttggaggttacccacctgattttaaacttcccagtcgactaagtttccctccatacaaaggttgtattgaattagatgacctcaatgaaaatgttctgagcttgtacaacttcaaaaaaacattcaatctcaacacaactgaagtggagccttgtagaaggaggaaggaagagtcagacaaaaattattttgaaggtacgggctatgctcgagttccaactcctctctcttttggtagctctgaattcagtttgtatctcaccatgagcttgccatcttctatatttagagatatgaagcgatccccgttttctgcaaagaacagcaagcctctatccacggtggtctgaatgtctgtccaaaggttgggatgggagcatgtgntgagtgattcgcgacc

SEQ ID NO: 316177 - DNA, 2593 bp, Homo sapiens
  misc_feature (3)..(4): n is a, c, g, or t
  misc_feature (8)..(8): n is a, c, g, or t
ganntccnggaaccgggatgcctccagcagtgaggcggtcagctgcagcatgggatggctgtggatctttggggcagccctggggcagtgtctgggctacagttcacagcagcaaagggtgccatttcttcagcctcccggtcaaagtcaactgcaagcgagttatgtggagtttagacccagccagggttgtagccctggatactatcgggatcataaaggcttgtataccggacggtgtgttccctgcaattgcaacggacattcaaatcaatgccaggatggctcaggcatatgtgttaactgtcagcacaacaccgcgggagagcactgtgaacgctgccaggagggctactatggcaacgccgtccacggatcctgcagggcctgcccatgtcctcacactaacagctttgccactggctgtgtggtgaatgggggagacgtgcggtgctcctgcaaagctgggtacacaggaacacagtgtgaaaggtgtgcaccgggatatttcgggaatccccagaaattcggaggtagctgccaaccatgcagttgtaacagcaatggccagctgggcagctgtcatcccctgactggagactgcataaaccaagaacccaaagatagcagccctgcagaagaatgtgatgattgcgacagctgtgtgatgaccctcctgaacgacctggccaccatgggcgagcagctccgcctggtcaagtctcagctgcagggcctgagtgccagcgcagggcttctggagcagatgaggcacatggagacccaggccaaggacctgaggaatcagttgctcaactaccgttctgccatttcaaatcatggatcaaaaatagaaggcctggaaagagaactgactgatttgaatcaagaatttgagactttgcaagaaaaggctcaagtaaattccagaaaagcacaaacattaaacaacaatgttaatcgggcaacacaaagcgcaaaagaactggatgtgaagattaaaaatgtcatccggaatgtgcacattcttttaaagcagatctctgggacagatggagagggaaacaacgtgccttcaggtgacttttccagagagtgggctgaagcccagcgcatgatgagggaactgcggaacaggaactttggaaagcacctcagagaagcagaagctgataaaagggagtcgcagctcttgctgaaccggataaggacctggcagaaaacccaccagggggagaacaatgggcttgctaacagtatccgggattctttaaatgaatacgaagccaaactcagtgaccttcgtgctcggctgcaggaggcagctgcccaagccaagcaggcaaatggcttgaaccaagaaaacgagagagctttgggagccattcagagacaagtgaaagaaataaattccctgcagagtgatttcaccaagtatctaaccactgcagactcatctttgttgcaaaccaacattgcgctgcagctgatggagaaaagccagaaggaatatgaaaaattagctgccagtttaaatgaagcaagacaagaactaagtgacaaagtaagagaactttccagatctgctggcaaaacatcccttgtggaggaggcagaaaagcacgcgcggtccttacaagagctggcaaagcagctggaagagatcaagagaaacgccagcggggatgagctggtgcgctgtgctgtggatgccgccaccgcctacgagaacatcctcaatgccatcaaagcggccgaggacgcagccaacagggctgccagtgcatctgaatctgccctccagacagtgataaaggaagatctgccaagaaaagctaaaaccctgagttccaacagtgataaactgttaaatgaagccaagatgacacaaaagaagctaaagcaagaagtcagtccagctctcaacaacctacagcaaaccctgaatattgtgacagttcagaaagaagtgatagacaccaatctcacaactctccgagatggtcttcatgggatacagagaggtgatattgatgctatgatcagtagtgcaaagagcatggtcagaaaggccaacgacatcacagatgaggttctggatgggctcaaccccatccagacagatgtggaaagaattaaggacacctatgggaggacacagaacgaagacttcaaaaaggctctgactgatgcagataactcggtgaataagttaaccaacaaactacctgatctttggcgcaagattgaaagtatcaaccaactaagtgtgcccacccgtgttctcctccaaatgctgtcgggcaagatagctccttcatgcttttctcatggtattatctagtaggtctgcacacataacacacatcagtccaccccattgtgaatgttgcctgtgtcatctgtcagctcccaacaatactttgggcttttggtctctcttgtccttttcttttccaaagttgtacatagtggtcaattggggctttaacctcctgaagtcttgagtttcatttttcaattttctcttcttcggttggattttgctgaataacaaccatttaggaatgctcaatggtgctggtgattcttt

SEQ ID NO: 316178 - DNA, 1788 bp, Homo sapiens
  misc_feature (3)..(4): n is a, c, g, or t
  misc_feature (8)..(8): n is a, c, g, or t
  misc_feature (1785)..(1785): n is a, c, g, or t
ganntccnggaaccgggatgcctccagcagtgaggcggtcagctgcagcatgggatggctgtggatctttggggcagccctggggcagtgtctgggctacagttcacagcagcaaagggtgccatttcttcagcctcccggtcaaagtcaactgcaagcgagttatgtggagtttagacccagccagggttgtagccctggatactatcgggatcataaaggcttgtataccggacggtgtgttccctgcaattgcaacggacattcaaatcaatgccaggatggctcaggcatatgtgttaactgtcagcacaacaccgcgggagagcactgtgaacgctgccaggagggctactatggcaacgccgtccacggatcctgcagggcctgcccatgtcctcacactaacagctttgccactggctgtgtggtgaatgggggagacgtgcggtgctcctgcaaagctgggtacacaggaacacagtgtgaaaggtgtgcaccgggatatttcgggaatccccagaaattcggaggtagctgccaaccatgcagttgtaacagcaatggccagctgggcagctgtcatcccctgactggagactgcataaaccaagaacccaaagatagcagccctgcagaagaatgtgatgattgcgacagctgtgtgatgaccctcctgaacgacctggccaccatgggcgagcagctccgcctggtcaagtctcagctgcagggcctgagtgccagcgcagggcttctggagcagatgaggcacatggagacccaggccaaggacctgaggaatcagttgctcaactaccgttctgccatttcaaatcatggatcaaaaatagaaggcctggaaagagaactgactgatttgaatcaagaatttgagactttgcaagaaaaggctcaagtaaattccagaaaagcacaaacattaaacaacaatgttaatcgggcaacacaaagcgcaaaagaactggatgtgaagattaaaaatgtcatccggaatgtgcacattcttttaaagcagatctctgggacagatggagagggaaacaacgtgccttcaggtgacttttccagagagtgggctgaagcccagcgcatgatgagggaactgcggaacaggaactttggaaagcacctcagagaagcagaagctgataaaagggagtcgcagctcttgctgaaccggataaggacctggcagaaaacccaccagggggagaacaatgggcttgctaacagtatccgggattctttaaatgaatacgaagccaaactcagtgaccttcgtgctcggctgcaggaggcagctgcccaagccaagcaggcaaatggcttgaaccaagaaaaaaaaaaaaaaaaaaaaaaaaaaaaattggggggcgcgcgcgccgcgggccccccgagaaaagctcttttctagagacccctctcgcggttggggcggcgcggggacccacagatgtgaggtgataagtgtgaaacactgtgggccataaaggtgtggttcccacaaggaggaactccccggggacaagaagaacaaaggggtcgtgggggtttctctccaccactatttaaaaaagagcgccccgggggagacaaccgcagagtgtctgtctctgggaacaatatttcccaagtaggggagtttctccagagaaggagcgctataacgcggggggcatcttttataaaaacgggggagtgtcccaaacgagagagtctcccaattttaaaatattaaaccccccgcttgcgtgggggggncgc

SEQ ID NO: 316179 - DNA, 489 bp, Homo sapiens
agagtcaaaagagctgtctttggcatcagctttcagaagtcagtgtcttcatagaaagtagctgagatcacatgaaatcagcatggcctctggacacaggagaccagagcttaaatcccaactcttggtaaccaagccatcttgtcaggctcctcagtgagacacattctcttatctgggaaatggggaatgataatttcttcttcacagattcattttaagggtaaaattcattcatgtacgtggaagcactacctggtgtttagaggaagttaattgaatttatatctaagctgaccaaatttctgcaaacagcactcccacaggtctagtatgaaggagttaaaacaaagtcaatggtgtagacattaagcagggctcacctccgatgatagacctaaccagcctcctttccccagtcaccataaaacaacacatcctgcacctggaactggacacagacagtagctacacagctggacagatccc

SEQ ID NO: 316180 - DNA, 721 bp, Homo sapiens
agaaaaagaaaaagaaaagaaaagaaaagaaaaagtggttcataaaatgtgccatgacttttttggtactcttccacctcaatctttttgaaaattgctgccttgaactcctaaccttccctacaattacaaggacatggtatattctaatatgaggtggaccaaatatttattattcagaataaaattacattgcaagttaataatctcttacatttcaaaatcttcagctggcagaccacatcttcctaagcagacatttccaaaagggtatcttactcatctttgtcgagctagggtttgattgtcagagtatgagagcacatccaggagaaagagctggctgccttaacattttaaagatgtctcctctgctttaacaaaattatgacaactagattgcattttcttggctccatttttcagatagcaacatcttgtattaataagcacactggcatggtgatcatttgctgctgtgttctaatttatgatgattaatgttgacaggaggaaggaagagtcagacaaaaattattttgaaggtacgggctatgctcgagttccaactcaaccacatgctcccatcccaacctttggacagacaattcagaccaccgtggatagaggcttgctgttctttgcagaaaacggggtaatctataacaagcatccagatacaaccaaatatattcattctgtttagcaatttggagataac

SEQ ID NO: 316181 - DNA, 2241 bp, Homo sapiens
tgatgctgaaagcgtgttggccaaatctgaatgatgaaagccaattacaaactagaaaatgaaaacagaccccagatgcaaggagatgagacagttagatttacttcctcttttctaatctgagaggtttcatgttgaagaaaatcagtgttggggttgcaggagacctaaacacagtcaccatgaagctgggctgtgtcctcatggcctgggccctctacctttcccttggtgtgctctgggtggcccagatgctactggctgccagttttgagacgctgcagtgtgagggacctgtctgcactgaggagagcagctgccacacggaggatgacttgactgatgcaagggaagctggcttccaggtcaaggcctacactttcagtgaacccttccacctgattgtgtcctatgactggctgatcctccaaggtccagccaagccagtttttgaaggggacctgctggttctgcgctgccaggcctggcaagactggccactgactcaggtgaccttctaccgagatggctcagctctgggtccccccgggcctaacagggaattctccatcaccgtggtacaaaaggcagacagcgggcactaccactgcagtggcatcttccagagccctggtcctgggatcccagaaacagcatctgttgtggctatcacagtccaagaactgtttccagcgccaattctcagagctgtaccctcagctgaaccccaagcaggaagccccatgaccctgagttgtcagacaaagttgcccctgcagaggtcagctgcccgcctcctcttctccttctacaaggatggaaggatagtgcaaagcagggggctctcctcagaattccagatccccacagcttcagaagatcactccgggtcatactggtgtgaggcagccactgaggacaaccaagtttggaaacagagcccccagctagagatcagagtgcagggtgcttccagctctgctgcacctcccacattgaatccagctcctcagaaatcagctgctccaggaactgctcctgaggaggcccctgggcctctgcctccgccgccaaccccatcttctgaggatccaggcttttcttctcctctggggatgccagatcctcatctgtatcaccagatgggccttcttctcaaacacatgcaggatgtgagagtcctcctcggtcacctgctcatggagttgagggaattatctggccaccggaagcctgggaccacaaaggctactgctgaatagaagtaaacagttcatccatgatctcacttaaccaccccaataaatctgattctttattttctcttcctgtcctgcacatatgcataagtacttttacaagttgtcccagtgttttgttagaataatgtagttaggtgagtgtaaataaatttatataaagtgagaattagagtttagctataattgtgtattctctcttaacacaacagaattctgctgtctagatcaggaatttctatctgttatatcgaccagaatgttgtgatttaaagagaactaatggaagtggattgaatacagcagtctcaactgggggcaattttgccccccagaggacattgggcaatgtttggagacattttggtcattatacttggggggttgggggatggtgggatgtgtgtgctactggcatccagtaaatagaagccaggggtgccgctaaacatcctataatgcacagggcagtaccccacaacgaaaaataatctggcccaaaatgtcagttgtactgagtttgagaaaccccagcctaatgaaaccctaggtgttgggctctggaatgggactttgtcccttctaattattatctctttccagcctcattcagctattcttactgacataccagtctttagctggtgctatggtctgttctttagttctagtttgtatcccctcaaaagccattatgttgaaatcctaatccccaaggtgatggcattaagaagtgggcctttgggaagtgattagatcaggagtgcagagccctcatgattaggattagtgcccttatttaaaaaggccccagagagctaactcacccttccaccatatgaggacgtggcaagaagatgacatgtatgagaaccaaaaaacagctgtcgccaaacaccgactctgtcgttgccttgatcttgaacttccagcctccagaactatgagaaataaaattctgttgtttgtaaacaaaaaaaag

SEQ ID NO: 316182 - DNA, 2245 bp, Homo sapiens
tgatgctgaaagcgtgttggccaaatctgaatgatgaaagccaattacaaactagaaaatgaaaacagaccccagatgcaaggagatgagacagttagatttacttcctcttttctaatctgagaggtttcatgttgaagaaaatcagtgttggggttgcaggagacctaaacacagtcaccatgaagctgggctgtgtcctcatggcctgggccctctacctttcccttggtgtgctctgggtggcccagatgctactggttaccattgtctttgctcctggtttcccgtaccagcagctggatgtcatgccgctgccagttttgagacgctgcagtgtgagggacctgtctgcactgaggagagcagctgccacacggaggatgacttgactgatgcaagggaagctggcttccagactggctgatcctccaaggtccagccaagccagtttttgaaggggacctgctggttctgcgctgccaggcctggcaagactggccactgactcaggtgaccttctaccgagatggctcagctctgggtccccccgggcctaacagggaattctccatcaccgtggtacaaaaggcagacagcgggcactaccactgcagtggcatcttccagagccctggtcctgggatcccagaaacagcatctgttgtggctatcacagtccaagaactgtttccagcgccaattctcagagctgtaccctcagctgaaccccaagcaggaagccccatgaccctgagttgtcagacaaagttgcccctgcagaggtcagctgcccgcctcctcttctccttctacaaggatggaaggatagtgcaaagcagggggctctcctcagaattccagatccccacagcttcagaagatcactccgggtcatactggtgtgaggcagccactgaggacaaccaagtttggaaacagagcccccagctagagatcagagtgcagggtgcttccagctctgctgcacctcccacattgaatccagctcctcagaaatcagctgctccaggaactgctcctgaggaggcccctgggcctctgcctccgccgccaaccccatcttctgaggatccaggcttttcttctcctctggggatgccagatcctcatctgtatcaccagatgggccttcttctcaaacacatgcaggatgtgagagtcctcctcggtcacctgctcatggagttgagggaattatctggccaccggaagcctgggaccacaaaggctactgctgaatagaagtaaacagttcatccatgatctcacttaaccaccccaataaatctgattctttattttctcttcctgtcctgcacatatgcataagtacttttacaagttgtcccagtgttttgttagaataatgtagttaggtgagtgtaaataaatttatataaagtgagaattagagtttagctataattgtgtattctctcttaacacaacagaattctgctgtctagatcaggaatttctatctgttatatcgaccagaatgttgtgatttaaagagaactaatggaagtggattgaatacagcagtctcaactgggggcaattttgccccccagaggacattgggcaatgtttggagacattttggtcattatacttggggggttgggggatggtgggatgtgtgtgctactggcatccagtaaatagaagccaggggtgccgctaaacatcctataatgcacagggcagtaccccacaacgaaaaataatctggcccaaaatgtcagttgtactgagtttgagaaaccccagcctaatgaaaccctaggtgttgggctctggaatgggactttgtcccttctaattattatctctttccagcctcattcagctattcttactgacataccagtctttagctggtgctatggtctgttctttagttctagtttgtatcccctcaaaagccattatgttgaaatcctaatccccaaggtgatggcattaagaagtgggcctttgggaagtgattagatcaggagtgcagagccctcatgattaggattagtgcccttatttaaaaaggccccagagagctaactcacccttccaccatatgaggacgtggcaagaagatgacatgtatgagaaccaaaaaacagctgtcgccaaacaccgactctgtcgttgccttgatcttgaacttccagcctccagaactatgagaaataaaattctgttgtttgtaaacaaaaaaaag

SEQ ID NO: 316183 - DNA, 2259 bp, Homo sapiens
tgatgctgaaagcgtgttggccaaatctgaatgatgaaagccaattacaaactagaaaatgaaaacagaccccagatgcaaggagatgagacagttagatttacttcctcttttctaatctgagaggtttcatgttgaagaaaatcagtgttggggttgcaggagacctaaacacagtcaccatgaagctgggctgtgtcctcatggcctgggccctctacctttcccttggtgtgctctgggtggcccagatgctactggcagctggatgtcatgccgctgccagttttgagacgctgcagtgtgagggacctgtctgcactgaggagagcagctgccacacggaggatgacttgactgatgcaagggaagctggcttccaggtcaaggcctacactttcagtgaacccttccacctgattgtgtcctatgactggctgatcctccaaggtccagccaagccagtttttgaaggggacctgctggttctgcgctgccaggcctggcaagactggccactgactcaggtgaccttctaccgagatggctcagctctgggtccccccgggcctaacagggaattctccatcaccgtggtacaaaaggcagacagcgggcactaccactgcagtggcatcttccagagccctggtcctgggatcccagaaacagcatctgttgtggctatcacagtccaagaactgtttccagcgccaattctcagagctgtaccctcagctgaaccccaagcaggaagccccatgaccctgagttgtcagacaaagttgcccctgcagaggtcagctgcccgcctcctcttctccttctacaaggatggaaggatagtgcaaagcagggggctctcctcagaattccagatccccacagcttcagaagatcactccgggtcatactggtgtgaggcagccactgaggacaaccaagtttggaaacagagcccccagctagagatcagagtgcagggtgcttccagctctgctgcacctcccacattgaatccagctcctcagaaatcagctgctccaggaactgctcctgaggaggcccctgggcctctgcctccgccgccaaccccatcttctgaggatccaggcttttcttctcctctggggatgccagatcctcatctgtatcaccagatgggccttcttctcaaacacatgcaggatgtgagagtcctcctcggtcacctgctcatggagttgagggaattatctggccaccggaagcctgggaccacaaaggctactgctgaatagaagtaaacagttcatccatgatctcacttaaccaccccaataaatctgattctttattttctcttcctgtcctgcacatatgcataagtacttttacaagttgtcccagtgttttgttagaataatgtagttaggtgagtgtaaataaatttatataaagtgagaattagagtttagctataattgtgtattctctcttaacacaacagaattctgctgtctagatcaggaatttctatctgttatatcgaccagaatgttgtgatttaaagagaactaatggaagtggattgaatacagcagtctcaactgggggcaattttgccccccagaggacattgggcaatgtttggagacattttggtcattatacttggggggttgggggatggtgggatgtgtgtgctactggcatccagtaaatagaagccaggggtgccgctaaacatcctataatgcacagggcagtaccccacaacgaaaaataatctggcccaaaatgtcagttgtactgagtttgagaaaccccagcctaatgaaaccctaggtgttgggctctggaatgggactttgtcccttctaattattatctctttccagcctcattcagctattcttactgacataccagtctttagctggtgctatggtctgttctttagttctagtttgtatcccctcaaaagccattatgttgaaatcctaatccccaaggtgatggcattaagaagtgggcctttgggaagtgattagatcaggagtgcagagccctcatgattaggattagtgcccttatttaaaaaggccccagagagctaactcacccttccaccatatgaggacgtggcaagaagatgacatgtatgagaaccaaaaaacagctgtcgccaaacaccgactctgtcgttgccttgatcttgaacttccagcctccagaactatgagaaataaaattctgttgtttgtaaacaaaaaaaag

SEQ ID NO: 316184 - DNA, 2141 bp, Homo sapiens
tgatgctgaaagcgtgttggccaaatctgaatgatgaaagccaattacaaactagaaaatgaaaacagaccccagatgcaaggagatgagacagttagatttacttcctcttttctaatctgagaggtttcatgttgaagaaaatcagtgttggggttgcaggagacctaaacacagtcaccatgaagctgggctgtgtcctcatggcctgggccctctacctttcccttggtgtgctctgggtggcccagatgctactggctgccagttttgagacgctgcagtgtgagggacctgtctgcactgaggagagcagctgccacacggaggatgacttgactgatgcaagggaagctggcttccaggtcaaggcctacactttcagtgaacccttccacctgattgtgtcctatgactggctgatcctccaaggtccagccaagccagtttttgaaggggacctgctggttctgcgctgccaggcctggcaagactggccactgactcaggtgaccttctaccgagatggctcagctctgggtccccccgggcctaacagggaattctccatcaccgtggtacaaaaggcagacagcgggcactaccactgcagtggcatcttccagagccctggtcctgggatcccagaaacagcatctgttgtggctatcacagtccaaggtcagctgcccgcctcctcttctccttctacaaggatggaaggatagtgcaaagcagggggctctcctcagaattccagatccccacagcttcagaagatcactccgggtcatactggtgtgaggcagccactgaggacaaccaagtttggaaacagagcccccagctagagatcagagtgcagggtgcttccagctctgctgcacctcccacattgaatccagctcctcagaaatcagctgctccaggaactgctcctgaggaggcccctgggcctctgcctccgccgccaaccccatcttctgaggatccaggcttttcttctcctctggggatgccagatcctcatctgtatcaccagatgggccttcttctcaaacacatgcaggatgtgagagtcctcctcggtcacctgctcatggagttgagggaattatctggccaccggaagcctgggaccacaaaggctactgctgaatagaagtaaacagttcatccatgatctcacttaaccaccccaataaatctgattctttattttctcttcctgtcctgcacatatgcataagtacttttacaagttgtcccagtgttttgttagaataatgtagttaggtgagtgtaaataaatttatataaagtgagaattagagtttagctataattgtgtattctctcttaacacaacagaattctgctgtctagatcaggaatttctatctgttatatcgaccagaatgttgtgatttaaagagaactaatggaagtggattgaatacagcagtctcaactgggggcaattttgccccccagaggacattgggcaatgtttggagacattttggtcattatacttggggggttgggggatggtgggatgtgtgtgctactggcatccagtaaatagaagccaggggtgccgctaaacatcctataatgcacagggcagtaccccacaacgaaaaataatctggcccaaaatgtcagttgtactgagtttgagaaaccccagcctaatgaaaccctaggtgttgggctctggaatgggactttgtcccttctaattattatctctttccagcctcattcagctattcttactgacataccagtctttagctggtgctatggtctgttctttagttctagtttgtatcccctcaaaagccattatgttgaaatcctaatccccaaggtgatggcattaagaagtgggcctttgggaagtgattagatcaggagtgcagagccctcatgattaggattagtgcccttatttaaaaaggccccagagagctaactcacccttccaccatatgaggacgtggcaagaagatgacatgtatgagaaccaaaaaacagctgtcgccaaacaccgactctgtcgttgccttgatcttgaacttccagcctccagaactatgagaaataaaattctgttgtttgtaaacaaaaaaaag

SEQ ID NO: 316185 - DNA, 1821 bp, Homo sapiens
tgatgctgaaagcgtgttggccaaatctgaatgatgaaagccaattacaaactagaaaatgaaaacagaccccagatgcaaggagatgagacagttagatttacttcctcttttctaatctgagaggtttcatgttgaagaaaatcagtgttggggttgcaggagacctaaacacagtcaccatgaagctgggctgtgtcctcatggcctgggccctctacctttcccttggtgtgctctgggtggcccagatgctactggaactgtttccagcgccaattctcagagctgtaccctcagctgaaccccaagcaggaagccccatgaccctgagttgtcagacaaagttgcccctgcagaggtcagctgcccgcctcctcttctccttctacaaggatggaaggatagtgcaaagcagggggctctcctcagaattccagatccccacagcttcagaagatcactccgggtcatactggtgtgaggcagccactgaggacaaccaagtttggaaacagagcccccagctagagatcagagtgcagggtgcttccagctctgctgcacctcccacattgaatccagctcctcagaaatcagctgctccaggaactgctcctgaggaggcccctgggcctctgcctccgccgccaaccccatcttctgaggatccaggcttttcttctcctctggggatgccagatcctcatctgtatcaccagatgggccttcttctcaaacacatgcaggatgtgagagtcctcctcggtcacctgctcatggagttgagggaattatctggccaccggaagcctgggaccacaaaggctactgctgaatagaagtaaacagttcatccatgatctcacttaaccaccccaataaatctgattctttattttctcttcctgtcctgcacatatgcataagtacttttacaagttgtcccagtgttttgttagaataatgtagttaggtgagtgtaaataaatttatataaagtgagaattagagtttagctataattgtgtattctctcttaacacaacagaattctgctgtctagatcaggaatttctatctgttatatcgaccagaatgttgtgatttaaagagaactaatggaagtggattgaatacagcagtctcaactgggggcaattttgccccccagaggacattgggcaatgtttggagacattttggtcattatacttggggggttgggggatggtgggatgtgtgtgctactggcatccagtaaatagaagccaggggtgccgctaaacatcctataatgcacagggcagtaccccacaacgaaaaataatctggcccaaaatgtcagttgtactgagtttgagaaaccccagcctaatgaaaccctaggtgttgggctctggaatgggactttgtcccttctaattattatctctttccagcctcattcagctattcttactgacataccagtctttagctggtgctatggtctgttctttagttctagtttgtatcccctcaaaagccattatgttgaaatcctaatccccaaggtgatggcattaagaagtgggcctttgggaagtgattagatcaggagtgcagagccctcatgattaggattagtgcccttatttaaaaaggccccagagagctaactcacccttccaccatatgaggacgtggcaagaagatgacatgtatgagaaccaaaaaacagctgtcgccaaacaccgactctgtcgttgccttgatcttgaacttccagcctccagaactatgagaaataaaattctgttgtttgtaaacaaaaaaaag

SEQ ID NO: 316186 - DNA, 2159 bp, Homo sapiens
tgatgctgaaagcgtgttggccaaatctgaatgatgaaagccaattacaaactagaaaatgaaaacagaccccagatgcaaggagatgagacagttagatttacttcctcttttctaatctgagaggtttcatgttgaagaaaatcagtgttggggttgcaggagacctaaacacagtcaccatgaagctgggctgtgtcctcatggcctgggccctctacctttcccttggtgtgctctgggtggcccagatgctactggcagctggatgtcatgccgctgccagttttgagacgctgcagtgtgagggacctgtctgcactgaggagagcagctgccacacggaggatgacttgactgatgcaagggaagctggcttccaggtcaaggcctacactttcagtgaacccttccacctgattgtgtcctatgactggctgatcctccaaggtccagccaagccagtttttgaaggggacctgctggttctgcgctgccaggcctggcaagactggccactgactcaggtgaccttctaccgagatggctcagctctgggtccccccgggcctaacagggaattctccatcaccgtggtacaaaaggcagacagcgggcactaccactgcagtggcatcttccagagccctggtcctgggatcccagaaacagcatctgttgtggctatcacagtccaaggtcagctgcccgcctcctcttctccttctacaaggatggaaggatagtgcaaagcagggggctctcctcagaattccagatccccacagcttcagaagatcactccgggtcatactggtgtgaggcagccactgaggacaaccaagtttggaaacagagcccccagctagagatcagagtgcagggtgcttccagctctgctgcacctcccacattgaatccagctcctcagaaatcagctgctccaggaactgctcctgaggaggcccctgggcctctgcctccgccgccaaccccatcttctgaggatccaggcttttcttctcctctggggatgccagatcctcatctgtatcaccagatgggccttcttctcaaacacatgcaggatgtgagagtcctcctcggtcacctgctcatggagttgagggaattatctggccaccggaagcctgggaccacaaaggctactgctgaatagaagtaaacagttcatccatgatctcacttaaccaccccaataaatctgattctttattttctcttcctgtcctgcacatatgcataagtacttttacaagttgtcccagtgttttgttagaataatgtagttaggtgagtgtaaataaatttatataaagtgagaattagagtttagctataattgtgtattctctcttaacacaacagaattctgctgtctagatcaggaatttctatctgttatatcgaccagaatgttgtgatttaaagagaactaatggaagtggattgaatacagcagtctcaactgggggcaattttgccccccagaggacattgggcaatgtttggagacattttggtcattatacttggggggttgggggatggtgggatgtgtgtgctactggcatccagtaaatagaagccaggggtgccgctaaacatcctataatgcacagggcagtaccccacaacgaaaaataatctggcccaaaatgtcagttgtactgagtttgagaaaccccagcctaatgaaaccctaggtgttgggctctggaatgggactttgtcccttctaattattatctctttccagcctcattcagctattcttactgacataccagtctttagctggtgctatggtctgttctttagttctagtttgtatcccctcaaaagccattatgttgaaatcctaatccccaaggtgatggcattaagaagtgggcctttgggaagtgattagatcaggagtgcagagccctcatgattaggattagtgcccttatttaaaaaggccccagagagctaactcacccttccaccatatgaggacgtggcaagaagatgacatgtatgagaaccaaaaaacagctgtcgccaaacaccgactctgtcgttgccttgatcttgaacttccagcctccagaactatgagaaataaaattctgttgtttgtaaacaaaaaaaag

SEQ ID NO: 316187 - DNA, 1974 bp, Homo sapiens
tgatgctgaaagcgtgttggccaaatctgaatgatgaaagccaattacaaactagaaaatgaaaacagaccccagatgcaaggagatgagacagttagatttacttcctcttttctaatctgagaggtttcatgttgaagaaaatcagtgttggggttgcaggagacctaaacacagtcaccatgaagctgggctgtgtcctcatggcctgggccctctacctttcccttggtgtgctctgggtggcccagatgctactggctgccagttttgagacgctgcagtgtgagggacctgtctgcactgaggagagcagctgccacacggaggatgacttgactgatgcaagggaagctggcttccaggtcaaggcctacactttcagtgaacccttccacctgattgtgtcctatgaactgtttccagcgccaattctcagagctgtaccctcagctgaaccccaagcaggaagccccatgaccctgagttgtcagacaaagttgcccctgcagaggtcagctgcccgcctcctcttctccttctacaaggatggaaggatagtgcaaagcagggggctctcctcagaattccagatccccacagcttcagaagatcactccgggtcatactggtgtgaggcagccactgaggacaaccaagtttggaaacagagcccccagctagagatcagagtgcagggtgcttccagctctgctgcacctcccacattgaatccagctcctcagaaatcagctgctccaggaactgctcctgaggaggcccctgggcctctgcctccgccgccaaccccatcttctgaggatccaggcttttcttctcctctggggatgccagatcctcatctgtatcaccagatgggccttcttctcaaacacatgcaggatgtgagagtcctcctcggtcacctgctcatggagttgagggaattatctggccaccggaagcctgggaccacaaaggctactgctgaatagaagtaaacagttcatccatgatctcacttaaccaccccaataaatctgattctttattttctcttcctgtcctgcacatatgcataagtacttttacaagttgtcccagtgttttgttagaataatgtagttaggtgagtgtaaataaatttatataaagtgagaattagagtttagctataattgtgtattctctcttaacacaacagaattctgctgtctagatcaggaatttctatctgttatatcgaccagaatgttgtgatttaaagagaactaatggaagtggattgaatacagcagtctcaactgggggcaattttgccccccagaggacattgggcaatgtttggagacattttggtcattatacttggggggttgggggatggtgggatgtgtgtgctactggcatccagtaaatagaagccaggggtgccgctaaacatcctataatgcacagggcagtaccccacaacgaaaaataatctggcccaaaatgtcagttgtactgagtttgagaaaccccagcctaatgaaaccctaggtgttgggctctggaatgggactttgtcccttctaattattatctctttccagcctcattcagctattcttactgacataccagtctttagctggtgctatggtctgttctttagttctagtttgtatcccctcaaaagccattatgttgaaatcctaatccccaaggtgatggcattaagaagtgggcctttgggaagtgattagatcaggagtgcagagccctcatgattaggattagtgcccttatttaaaaaggccccagagagctaactcacccttccaccatatgaggacgtggcaagaagatgacatgtatgagaaccaaaaaacagctgtcgccaaacaccgactctgtcgttgccttgatcttgaacttccagcctccagaactatgagaaataaaattctgttgtttgtaaacaaaaaaaag

SEQ ID NO: 316188 - DNA, 1956 bp, Homo sapiens
tgatgctgaaagcgtgttggccaaatctgaatgatgaaagccaattacaaactagaaaatgaaaacagaccccagatgcaaggagatgagacagttagatttacttcctcttttctaatctgagaggtttcatgttgaagaaaatcagtgttggggttgcaggagacctaaacacagtcaccatgaagctgggctgtgtcctcatggcctgggccctctacctttcccttggtgtgctctgggtggcccagatgctactggctgccagttttgagacgctgcagtgtgagggacctgtctgcactgaggagagcagctgccacacggaggatgacttgactgatgcaagggaagctggcttccaggtcaaggcctacactttcagtgaacccttccacctgattgtgtcctatgactggctgatcctccaaggtccagccaagccagtttttgaaggggacctgctggttctgcgctgccaggcctggcaagactggccactgactcaggtgaccttctaccgagatggctcagctctgggtccccccgggcctaacagggaattctccatcaccgtggtacaaaaggcagacagcgggcactaccactgcagtggcatcttccagagccctggtcctgggatcccagaaacagcatctgttgtggctatcacagtccaaggtgcttccagctctgctgcacctcccacattgaatccagctcctcagaaatcagctgctccaggaactgctcctgaggaggcccctgggcctctgcctccgccgccaaccccatcttctgaggatccaggcttttcttctcctctggggatgccagatcctcatctgtatcaccagatgggccttcttctcaaacacatgcaggatgtgagagtcctcctcggtcacctgctcatggagttgagggaattatctggccaccggaagcctgggaccacaaaggctactgctgaatagaagtaaacagttcatccatgatctcacttaaccaccccaataaatctgattctttattttctcttcctgtcctgcacatatgcataagtacttttacaagttgtcccagtgttttgttagaataatgtagttaggtgagtgtaaataaatttatataaagtgagaattagagtttagctataattgtgtattctctcttaacacaacagaattctgctgtctagatcaggaatttctatctgttatatcgaccagaatgttgtgatttaaagagaactaatggaagtggattgaatacagcagtctcaactgggggcaattttgccccccagaggacattgggcaatgtttggagacattttggtcattatacttggggggttgggggatggtgggatgtgtgtgctactggcatccagtaaatagaagccaggggtgccgctaaacatcctataatgcacagggcagtaccccacaacgaaaaataatctggcccaaaatgtcagttgtactgagtttgagaaaccccagcctaatgaaaccctaggtgttgggctctggaatgggactttgtcccttctaattattatctctttccagcctcattcagctattcttactgacataccagtctttagctggtgctatggtctgttctttagttctagtttgtatcccctcaaaagccattatgttgaaatcctaatccccaaggtgatggcattaagaagtgggcctttgggaagtgattagatcaggagtgcagagccctcatgattaggattagtgcccttatttaaaaaggccccagagagctaactcacccttccaccatatgaggacgtggcaagaagatgacatgtatgagaaccaaaaaacagctgtcgccaaacaccgactctgtcgttgccttgatcttgaacttccagcctccagaactatgagaaataaaattctgttgtttgtaaacaaaaaaaag

SEQ ID NO: 316189 - DNA, 1389 bp, Homo sapiens
taggccgtgggacccagagctgagccatctcggtagaaggtcacctgagtcagtggccagtcttgccaggcctggagcgcaaaccagcatctgttgtggctatcacagtccaaggtgcttccagctctgctgcacctcccacattgaatccagctcctcagaaatcagctgctccaggaactgctcctgaggaggcccctgggcctctgcctccgccgccaaccccatcttctgaggatccaggcttttcttctcctctggggatgccagatcctcatctgtatcaccagatgggccttcttctcaaacacatgcaggatgtgagagtcctcctcggtcacctgctcatggagttgagggaattatctggccaccggaagcctgggaccacaaaggctactgctgaatagaagtaaacagttcatccatgatctcacttaaccaccccaataaatctgattctttattttctcttcctgtcctgcacatatgcataagtacttttacaagttgtcccagtgttttgttagaataatgtagttaggtgagtgtaaataaatttatataaagtgagaattagagtttagctataattgtgtattctctcttaacacaacagaattctgctgtctagatcaggaatttctatctgttatatcgaccagaatgttgtgatttaaagagaactaatggaagtggattgaatacagcagtctcaactgggggcaattttgccccccagaggacattgggcaatgtttggagacattttggtcattatacttggggggttgggggatggtgggatgtgtgtgctactggcatccagtaaatagaagccaggggtgccgctaaacatcctataatgcacagggcagtaccccacaacgaaaaataatctggcccaaaatgtcagttgtactgagtttgagaaaccccagcctaatgaaaccctaggtgttgggctctggaatgggactttgtcccttctaattattatctctttccagcctcattcagctattcttactgacataccagtctttagctggtgctatggtctgttctttagttctagtttgtatcccctcaaaagccattatgttgaaatcctaatccccaaggtgatggcattaagaagtgggcctttgggaagtgattagatcaggagtgcagagccctcatgattaggattagtgcccttatttaaaaaggccccagagagctaactcacccttccaccatatgaggacgtggcaagaagatgacatgtatgagaaccaaaaaacagctgtcgccaaacaccgactctgtcgttgccttgatcttgaacttccagcctccagaactatgagaaataaaattctgttgtttgtaaacaaaaaaaag

SEQ ID NO: 316190 - DNA, 993 bp, Homo sapiens
tgatgctgaaagcgtgttggccaaatctgaatgatgaaagccaattacaaactagaaaatgaaaacagaccccagatgcaaggagatgagacagttagatttacttcctcttttctaatctgagaggtttcatgttgaagaaaatcagtgttggggttgcaggagacctaaacacagtcaccatgaagctgggctgtgtcctcatggcctgggccctctacctttcccttggtgtgctctgggtggcccagatgctactggctgccagttttgagacgctgcagtgtgagggacctgtctgcactgaggagagcagctgccacacggaggatgacttgactgatgcaagggaagctggcttccaggtcaaggcctacactttcagtgaacccttccacctgattgtgtcctatgactggctgatcctccaaggtccagccaagccagtttttgaaggggacctgctggttctgcgctgccaggcctggcaagactggccactgactcaggtgaccttctaccgagatggctcagctctgggtccccccgggcctaacagggaattctccatcaccgtggtacaaaaggcagacagcgggcactaccactgcagtggcatcttccagagccctggtcctgggatcccagaaacagcatctgttgtggctatcacagtccaagaactgtttccagcgccaattctcagagctgtaccctcagctgaaccccaagcaggaagccccatgaccctgagttgtcagacaaagttgcccctgcagaggtcagctgcccgcctcctcttctccttctacaaggatggaaggatagtgcaaagcagggggctctcctcagaattccagatccccacagcttcagaagatcactccgggtcatactggtgtgaggcagccactgaggacaaccaagtttggaaacagagcccccagctagagatcagagtgcagggtgagttcgcatcagagtgcaggttgt

SEQ ID NO: 316191 - DNA, 1689 bp, Homo sapiens
tgatgctgaaagcgtgttggccaaatctgaatgatgaaagccaattacaaactagaaaatgaaaacagaccccagatgcaaggagatgagacagttagatttacttcctcttttctaatctgagaggtttcatgttgaagaaaatcagtgttggggttgcaggagacctaaacacagtcaccatgaagctgggctgtgtcctcatggcctgggccctctacctttcccttggtgtgctctgggtggcccagatgctactggctgccagttttgagacgctgcagtgtgagggacctgtctgcactgaggagagcagctgccacacggaggatgacttgactgatgcaagggaagctggcttccaggtcaaggcctacactttcagtgaacccttccacctgattgtgtcctatggtgcttccagctctgctgcacctcccacattgaatccagctcctcagaaatcagctgctccaggaactgctcctgaggaggcccctgggcctctgcctccgccgccaaccccatcttctgaggatccaggcttttcttctcctctggggatgccagatcctcatctgtatcaccagatgggccttcttctcaaacacatgcaggatgtgagagtcctcctcggtcacctgctcatggagttgagggaattatctggccaccggaagcctgggaccacaaaggctactgctgaatagaagtaaacagttcatccatgatctcacttaaccaccccaataaatctgattctttattttctcttcctgtcctgcacatatgcataagtacttttacaagttgtcccagtgttttgttagaataatgtagttaggtgagtgtaaataaatttatataaagtgagaattagagtttagctataattgtgtattctctcttaacacaacagaattctgctgtctagatcaggaatttctatctgttatatcgaccagaatgttgtgatttaaagagaactaatggaagtggattgaatacagcagtctcaactgggggcaattttgccccccagaggacattgggcaatgtttggagacattttggtcattatacttggggggttgggggatggtgggatgtgtgtgctactggcatccagtaaatagaagccaggggtgccgctaaacatcctataatgcacagggcagtaccccacaacgaaaaataatctggcccaaaatgtcagttgtactgagtttgagaaaccccagcctaatgaaaccctaggtgttgggctctggaatgggactttgtcccttctaattattatctctttccagcctcattcagctattcttactgacataccagtctttagctggtgctatggtctgttctttagttctagtttgtatcccctcaaaagccattatgttgaaatcctaatccccaaggtgatggcattaagaagtgggcctttgggaagtgattagatcaggagtgcagagccctcatgattaggattagtgcccttatttaaaaaggccccagagagctaactcacccttccaccatatgaggacgtggcaagaagatgacatgtatgagaaccaaaaaacagctgtcgccaaacaccgactctgtcgttgccttgatcttgaacttccagcctccagaactatgagaaataaaattctgttgtttgtaaacaaaaaaaag

SEQ ID NO: 316192 - DNA, 593 bp, Homo sapiens
ggtgaaagctgaccctgccggcccacagttgggctctcttctccgggagtggagaatacagtgagccgtgtattctcagccgtgaagctgagctcttgtctaatgcacgcccggccactcagacactctggcagaagccagtgctgtgggcggcctcccagaacggcggtggggctagcagtgtcgacgctggcctctgccccaggtcctggctggacacagctcacacgtgctgcctaggaatcaggtaaatctcacctctgctttatccacaggcagatggaagtctgatcagaacacaccctctgggaagcctgttagtaaaaggaggaagggtacccacatggaactacctagagtgagcctgttggcccatggcctggctgggcaaggtggaccccacagccactttccctgtccctcgccttgcagcggagtctattcccaggaggaactgagtgtagggtgttccctaatccctaacccaaggaagagcccccgaaaaggaccctgctcgtccccacttctgtctggactctggggagttttggaccttggtcgagccttctctagaccagatgggggtacagagt

SEQ ID NO: 316193 - DNA, 552 bp, Homo sapiens
gcgccctttttttctttttttaaatttaccatttgatttgatttattatattttgaggccaagactcgtctccatcgcccaggctggagtgcacggggcatgatctcaagcttcattgtgaacctcacacctccacccggtatcaataaattctcccgccgttcagtctccccagaagctgggattacagacgcccatcaccgtgccgggcttaattggtgtatttaagtagagacagggtttcactgtgttggcaggctggtgttgaactcctcccctcctgtgttttggatttctgttcactcagaattgtaaatgtttagttgtgaccatgacgtattgtttgggtcaatgtccctttccaatgcatactaatatattatggttattatatatgaatatatttaatgacatggaaaaagttgtggattttctttctttccttttttttgggggggggtggggggttggttagagttgtaatggacccagatggaacttgtaacgtgggccccacatgatagaactaaattcagatatcattaaataaac

SEQ ID NO: 316194 - DNA, 2334 bp, Homo sapiens
ccgcatcacggctgccatttattgagcacctgctgtgtgccaggcactttacccacatgctcccagtgtgtactcatgacaaccctgtgggacagggactcattatcaccagcaaggagactggagtacacgtgcccaaggtcatgctgcaaattggtggcaggactggggctcaaactccagagcccgactttctgaccaggggccacgctggccctcactgcactccagctctgcagcctacccgcccaatccctgtgcaggctgggagggtgctcttgggggagtggccaccgagcccctggccctggttactgcctcttgaggacactggcatctgggctggagaacaggagcccggggtggggtagggcatggggacaatcacatcttcagaggaggcagcaaagtggtgggggatgcagggacggacttgccagatggcagctccaggttccaggaaggcaggccttggatgctccgaagaggtggtagaaaggtgtttttagaaaggtgttttggctgcctcagggtggttggagagactccaggagagactggcagaggtgcctcaggggcagggagcagacagacctgccctgggaaggggcatttggcttccctgaatccagcccaaggctagaagacagggcccctctccaagctgtcagcgcccctcggatgcccagtgtggtgtgctgggcgccatcagcatcacaaggcactacgctgctggggcggttgtcctatttctgtctatgccagtgtggtttcttcaccctgcccagaagggctgtggcagccccacgatatcccaccctgggtctgggtctcacgggtgtcctgtgaggggcttgcacttgtggtggtctctgaggccacctcagcaacggagctggcgacacgccaagcaacaaggcatcttgcggaaaattcagccagtgtcctgcccctcccttcggctcagcaccccgcagggcacaggctgtccgcccggtggtctggcccttggggaatgcgtcagggtgaccagatccaccatgctagcagccaggtcactgttgggattgcacggtcgtcacgagctgcctttcctatccacacacccagccaggacccagcccaccactcccgactgcagccccggcctctgcggtgagcaccatccttgggaaagcacccctcctccactccggtgccccactccaaggagcagagggaaatgggaattgaggtgtcccggtttgtacagttaggaagggatgtaaaacggaactagattttgattttgaagagtgtattaaccagaattgtgctatgtaggtgtttgtttgaagaaaaacataccagattagtctttgtttttgaaacagcttccccagttgtcctttttcttaccagctgggtggtctggtgcccctgacagctgagtgcctgctttacggacacgcagtaatgccgaagatttgcgggggaggacatagggctgtccccgggattcacctgctggctgtggtctctgcccactgcttctgtccttggaaagcagggcaggaggcagcatccccaggggcctctatgtgggagggagggacacctggggtcacaacccagggagggagggtcacagcccagggaggctgggagctgctccaaggccctggaactctgcctcagtcgcggcatgctggagaggggtacggacttactttcttggagttgtcccaggttggaatgagactgaactcaagaagagaccctaagggactggggaatggttcggttcctgccttcaggaaagtgaaagacgcttaggctgtcaacacttaaaggaagtccccttgaagcccagagtggacagactagacccattgatggggccactggccatggtccgtggacaagacattcctgtgggccatggcacaccgggggggatcaaaatgtgtacttgtggggtctcgccccttgccaaaagccaaaccagtcccactcctgtcattggacgtttcttcccattccctcctcccaaatgcacttcccctcctccctctgccccctcctgtgttttggatttctgttcactcagaattgtaaatgtttagttgtgaccatgacgtattgtttgggtcaatgtccctttccaatgcatactaatatattatggttattatatatgaatatatttaatgacatggaaaaagttgtggattttctttctttccttttttttgggggggggtggggggttggttagagttgtaatggacccagatggaacttgtaacgtgggccccacatgatagaactaaattcagatatcattaaataaac

SEQ ID NO: 316195 - DNA, 965 bp, Homo sapiens
aaaaaaaaaaaattcagttgatgtacttcaattttctgtgtaatttgcattggagtatgtgatttttctcatttttctaacagtttttcctattattttcatttctcaccttatttctttggctagaaagtccattatattattatttaaccaatggtgacagtaagtattccaattaataacatcttgattttttaaggtaaatgattttatagtttcacagctcagtgtcatgttggatgattaaagtagcatgttaaggacatatctatatatttttttaaagacagggtctcatggttactcaggctggagtgcagtggcatgatcatggcttactgcagccttggcatcctgggtttaggcaatccccccacctcggcctcccagagtgctgggattacaggcgtgagccactgtgctcagccaggacacctctttctattccaaatttagtaagagtaatcagaaatgagtatttaatattatatctgtcttttgtacacaattttgtaatcaaaatgagaaaactaaccttaggcaaggtgcttcccctcattatactgtatgcgatatattacaaagaaagcatttttccctttgtagtgaaaaataagtaaaacgtgtgattaattccctgcccatgtttacttggctctcttcggaaacattttcactagccaaatattcttacagtgtatagctccactctgatacatggatacattattgaattaatgagttaattaatgaagaaagtggtcttacaatggtgaacacatgtagtggataaggaatgacaggaaggaataagtcttttggatgaaagtgtgggagaccacagcataacgtgagaaaaacaaggatctcttcttccaaattattgcctaaacccaggcacttatggaagtgttgggctattaatagttcataaactgggatggcttagttccctgtgcctgtga

SEQ ID NO: 316196 - DNA, 1452 bp, Homo sapiens
gagacacagtagaaataacactttataagcctcttcctcctcccatctcctggcctccttccatcctcctctgcccagactccgcccctcccagacggtcctcacttctcttttccctagactgcagccagcggagcccgcagccggcccgagccaggaacccaggtccggagcctcaacttcaggatgttgacaacattgctgccgatactgctgctgtctggctgggccttttgtagccaagacgcctcagatggcctccaaagacttcatatgctccagatctcctacttccgcgacccctatcacgtgtggtaccagggcaacgcgtcgctggggggacacctaacgcacgtgctggaaggcccagacaccaacaccacgatcattcagctgcagcccttgcaggagcccgagagctgggcgcgcacgcagagtggcctgcagtcctacctgctccagttccacggcctcgtgcgcctggtgcaccaggagcggaccttggcctttcctctgaccatccgctgcttcctgggctgtgagctgcctcccgagggctctagagcccatgtcttcttcgaagtggctgtgaatgggagctcctttgtgagtttccggccggagagagccttgtggcaggcagacacccaggtcacctccggagtggtcaccttcaccctgcagcagctcaatgcctacaaccgcactcggtatgaactgcgggaattcctggaggacacctgtgtgcagtatgtgcagaaacatatttccgcggaaaacacgaaagggagccaaacaagccgctcctacacttcgctggtcctgggcgtcctggtgggcagtttcatcattgctggtgtggctgtaggcatcttcctgtgcacaggtggacggcgatgttaattactctccagccccgtcagaaggggctggattgatggaggctggcaagggaaagtttcagctcactgtgaagccagactccccaactgaaacaccagaaggtttggagtgacagctcctttcttctcccacatctgcccactgaagatttgagggaggggagatggagaggagaggtggacaaagtacttggtttgctaagaacctaagaacgtgtatgctttgctgaattagtctgataagtgaatgtttatctatctttgtggaaaacagataatggagttggggcaggaagcctatggcccatcctccaaagacagacagaatcacctgaggcgttcaaaagatataaccaaataaacaagtcatccacaatcaaaatacaacattcaatacttccaggtgtgtcagacttgggatgggacgctgatataatagggtagaaagaagtaacacgaagaagtggtggaaatgtaaaatccaagtcatatggcagtgatcaattattaatcaattaataatattaataaatttcttatatttaaggca

SEQ ID NO: 316197 - DNA, 1534 bp, Homo sapiens
acagaatcttgccgcatgacccaggctagaatgcagtggtgtgatctcggccctctgcaacctccacctcccagacgttcgccatattggccaggctggtctcaaactcctggcctcaagtgatctgcccacctcggcctcccaaagtgccagcagcatgctcggaggagtgactttaaagcttttctacttgcttcctagaactgcagccagcggagcccgcagccggcccgagccaggaacccaggtccggagcctcaacttcaggatgttgacaacattgctgccgatactgctgctgtctggctgggccttttgtagccaagacgcctcagatggcctccaaagacttcatatgctccagatctcctacttccgcgacccctatcacgtgtggtaccagggcaacgcgtcgctggggggacacctaacgcacgtgctggaaggcccagacaccaacaccacgatcattcagctgcagcccttgcaggagcccgagagctgggcgcgcacgcagagtggcctgcagtcctacctgctccagttccacggcctcgtgcgcctggtgcaccaggagcggaccttggcctttcctctgaccatccgctgcttcctgggctgtgagctgcctcccgagggctctagagcccatgtcttcttcgaagtggctgtgaatgggagctcctttgtgagtttccggccggagagagccttgtggcaggcagacacccaggtcacctccggagtggtcaccttcaccctgcagcagctcaatgcctacaaccgcactcggtatgaactgcgggaattcctggaggacacctgtgtgcagtatgtgcagaaacatatttccgcggaaaacacgaaagggagccaaacaagccgctcctacacttcgctggtcctgggcgtcctggtgggcagtttcatcattgctggtgtggctgtaggcatcttcctgtgcacaggtggacggcgatgttaattactctccagccccgtcagaaggggctggattgatggaggctggcaagggaaagtttcagctcactgtgaagccagactccccaactgaaacaccagaaggtttggagtgacagctcctttcttctcccacatctgcccactgaagatttgagggaggggagatggagaggagaggtggacaaagtacttggtttgctaagaacctaagaacgtgtatgctttgctgaattagtctgataagtgaatgtttatctatctttgtggaaaacagataatggagttggggcaggaagcctatggcccatcctccaaagacagacagaatcacctgaggcgttcaaaagatataaccaaataaacaagtcatccacaatcaaaatacaacattcaatacttccaggtgtgtcagacttgggatgggacgctgatataatagggtagaaagaagtaacacgaagaagtggtggaaatgtaaaatccaagtcatatggcagtgatcaattattaatcaattaataatattaataaatttcttatatttaaggca

SEQ ID NO: 316198 - DNA, 1281 bp, Homo sapiens
gagacacagtagaaataacactttataagcctcttcctcctcccatctcctggcctccttccatcctcctctgcccagactccgcccctcccagacggtcctcacttctcttttccctagactgcagccagcggagcccgcagccggcccgagccaggaacccaggtccggagcctcaacttcaggatgttgacaacattgctgccgatactgctgctgtctggctgggccttttgtagccaagacgcctcagatggcctccaaagacttcatatgctccagatctcctacttccgcgacccctatcacgtgtggtaccagggcaacgcgtcgctggggggacacctaacgcacgtgctggaaggcccagacaccaacaccacgatcattcagctgcagcccttgcaggagcccgagagctgggcgcgcacgcagagtggcctgcagtcctacctgctccagttccacggcctcgtgcgcctggtgcaccaggagcggaccttggcctttcctctgaccatccgctgcttcctgggctgtgagctgcctcccgagggctctagagcccatgtcttcttcgaagtggctgtgaatgggagctcctttgtgagtttccggccggagagagccttgtggcaggcagacacccaggtcacctccggagtggtcaccttcaccctgcagcagctcaatgcctacaaccgcactcggtatgaactgcgggaattcctggaggacacctgtgtgcagtatgtgcagaaacatatttccgcggaaaacacgaaagggagccaaacaagccgctcctacacttcgctggtcctgggcgtcctggtgggcagtttcatcattgctggtgtggctgtaggcatcttcctgtgcacaggtggacggcgatgttaattactctccagccccgtcagaaggggctggattgatggaggctggcaagggaaagtttcagctcactgtgaagccagactccccaactgaaacaccagaaggtttggagtgacagctcctttcttctcccacatctgcccactgaagatttgagggaggggagatggagaggagaggtggacaaagtacttggtttgctaagaacctaagaacgtgtatgctttgctgaattagtctgataagtgaatgtttatctatctttgtggaaaacagataatggagttggggcaggaagcctatggcccatcctccaaagacagacagaatcacctgaggcgttcaaaagatataaccaaataaacaagtcatccacaatca

SEQ ID NO: 316199 - DNA, 1130 bp, Homo sapiens
  misc_feature (1)..(1): n is a, c, g, or t
  misc_feature (18)..(18): n is a, c, g, or t
  misc_feature (21)..(21): n is a, c, g, or t
ngctaggtacaggccggngtnaatcggccgaggtgctggaaggcccagacaccaacaccacgatcattcagctgcagcccttgcaggagcccgagagctgggcgcgcacgcagagtggcctgcagtcctacctgctccagttccacggcctcgtgcgcctggtgcaccaggagcggaccttggcctttcctctgaccatccgctgcttcctgggctgtgagctgcctcccgagggctctagagcccatgtcttcttcgaagtggctgtgaatgggagctcctttgtgagtttccggccggagagagccttgtggcaggcagacacccaggtcacctccggagtggtcaccttcaccctgcagcagctcaatgcctacaaccgcactcggtatgaactgcgggaattcctggaggacacctgtgtgcagtatgtgcagaaacatatttccgcggaaaacacgaaagggagccaaacaagccgctcctacacttcgctggtcctgggcgtcctggtgggcagtttcatcattgctggtgtggctgtaggcatcttcctgtgcacaggtggacggcgatgttaattactctccagccccgtcagaaggggctggattgatggaggctggcaagggaaagtttcagctcactgtgaagccagactccccaactgaaacaccagaaggtttggagtgacagctcctttcttctcccacatctgcccactgaagatttgagggaggggagatggagaggagaggtggacaaagtacttggtttgctaagaacctaagaacgtgtatgctttgctgaattagtctgataagtgaatgtttatctatctttgtggaaaacagataatggagttggggcaggaagcctatggcccatcctccaaagacagacagaatcacctgaggcgttcaaaagatataaccaaataaacaagtcatccacaatcaaaatacaacattcaatacttccaggtgtgtcagacttgggatgggacgctgatataatagggtagaaagaagtaacacgaagaagtggtggaaatgtaaaatccaagtcatatggcagtgatcaattattaatcaattaataatattaataaatttcttatatttaaggca

SEQ ID NO: 316200 - DNA, 941 bp, Homo sapiens
gagacacagtagaaataacactttataagcctcttcctcctcccatctcctggcctccttccatcctcctctgcccagactccgcccctcccagacggtcctcacttctcttttccctagactgcagccagcggagcccgcagccggcccgagccaggaacccaggtccggagcctcaacttcaggatgttgacaacattgctgccgatactgctgctgtctggctgggccttttgtagccaagacgcctcagatggcctccaaagacttcatatgctccagatctcctacttccgcgacccctatcacgtgtggtaccagggcaacgcgtcgctggggggacacctaacgcacgtgctggaaggcccagacaccaacaccacgatcattcagctgcagcccttgcaggagcccgagagctgggcgcgcacgcagagtggcctgcagtcctacctgctccagttccacggcctcgtgcgcctggtgcaccaggagcggaccttggcctttcctctgaccatccgctgcttcctgggctgtgagctgcctcccgagggctctagagcccatgtcttcttcgaagtggctgtgaatgggagctcctttgtgagtttccggccggagagagccttgtggcaggcagacacccaggtcacctccggagtggtcaccttcaccctgcagcagctcaatgcctacaaccgcactcggtatgaactgcgggaattcctggaggacacctgtgtgcagtatgtgcagaaacatatttccgcggaaaacacgaaagatctctactaagaatgtcactctggccgggcgcagtggctcactcctgtaatcccagcactttgggaggccgaggcaggaggatcacttgaggttgggagttcgagaccagcatgaccaacatggaaaaaccccgtctctactaaaaatacaaa

SEQ ID NO: 316201 - DNA, 1364 bp, Homo sapiens
  misc_feature (1)..(1): n is a, c, g, or t
  misc_feature (18)..(18): n is a, c, g, or t
  misc_feature (21)..(21): n is a, c, g, or t
ngctaggtacaggccggngtnaatcggccgagactgcagccagcggagcccgcagccggcccgagccaggaacccaggtccggagcctcaacttcaggatgttgacaacattgctgccgatactgctgctgtctggctgggccttttgtagccaagacgcctcagatggcctccaaagacttcatatgctccagatctcctacttccgcgacccctatcacgtgtggtaccagggcaacgcgtcgctggggggacacctaacgcacgtgctggaaggcccagacaccaacaccacgatcattcagctgcagcccttgcaggagcccgagagctgggcgcgcacgcagagtggcctgcagtcctacctgctccagttccacggcctcgtgcgcctggtgcaccaggagcggaccttggcctttcctctgaccatccgctgcttcctgggctgtgagctgcctcccgagggctctagagcccatgtcttcttcgaagtggctgtgaatgggagctcctttgtgagtttccggccggagagagccttgtggcaggcagacacccaggtcacctccggagtggtcaccttcaccctgcagcagctcaatgcctacaaccgcactcggtatgaactgcgggaattcctggaggacacctgtgtgcagtatgtgcagaaacatatttccgcggaaaacacgaaagggagccaaacaagccgctcctacacttcgctggtcctgggcgtcctggtgggcagtttcatcattgctggtgtggctgtaggcatcttcctgtgcacaggtggacggcgatgttaattactctccagccccgtcagaaggggctggattgatggaggctggcaagggaaagtttcagctcactgtgaagccagactccccaactgaaacaccagaaggtttggagtgacagctcctttcttctcccacatctgcccactgaagatttgagggaggggagatggagaggagaggtggacaaagtacttggtttgctaagaacctaagaacgtgtatgctttgctgaattagtctgataagtgaatgtttatctatctttgtggaaaacagataatggagttggggcaggaagcctatggcccatcctccaaagacagacagaatcacctgaggcgttcaaaagatataaccaaataaacaagtcatccacaatcaaaatacaacattcaatacttccaggtgtgtcagacttgggatgggacgctgatataatagggtagaaagaagtaacacgaagaagtggtggaaatgtaaaatccaagtcatatggcagtgatcaattattaatcaattaataatattaataaatttcttatatttaaggca

SEQ ID NO: 316202 - DNA, 1869 bp, Homo sapiens
gagacacagtagaaataacactttataagcctcttcctcctcccatctcctggcctccttccatcctcctctgcccagactccgcccctcccagacggtcctcacttctcttttccctagactgcagccagcggagcccgcagccggcccgagccaggaacccaggtccggagcctcaacttcaggatgttgacaacattgctgccgatactgctgctgtctggctgggccttttgtagccaagacgcctcagatggcctccaaagacttcatatgctccagatctcctacttccgcgacccctatcacgtgtggtaccagggcaacgcgtcgctggggggacacctaacgcacgtgctggaaggcccagacaccaacaccacgatcattcagctgcagcccttgcaggagcccgagagctgggcgcgcacgcagagtggcctgcagtcctacctgctccagttccacggcctcgtgcgcctggtgcaccaggagcggaccttggcctttcctctgaccatccgctgcttcctgggctgtgagctgcctcccgagggctctagagcccatgtcttcttcgaagtggctgtgaatgggagctcctttgtgagtttccggccggagagagccttgtggcaggcagacacccaggtcacctccggagtggtcaccttcaccctgcagcagctcaatgcctacaaccgcactcggtatgaactgcgggaattcctggaggacacctgtgtgcagtatgtgcagaaacatatttccgcggaaaacacgaaagggagccaaacaagccgctcctacacttcgctggtcctgggcgtcctggtgggcagtttcatcattgctggtgtggctgtaggcatcttcctgtgcacaggtggacggcgatgttaattactctccagccccgtcagaaggggctggattgatggaggctggcaagggaaagtttcagctcactgtgaagccagactccccaactgaaacaccagaaggtttggagtgacagctcctttcttctcccacatctgcccactgaagatttgagggaggggagatggagaggagaggtggacaaagtacttggtttgctaagaacctaagaacgtgtatgctttgctgaattagtctgataagtgaatgtttatctatctttgtggaaaacagataatggagttggggcaggaagcctatggcccatcctccaaagacagacagaatcacctgaggcgttcaaaagatataaccaaataaacaagtcatccacaatcaaaatacaacattcaatacttccaggtgtgtcagacttgggatgggacgctgatataatagggtagaaagaagtaacacgaagaagtggtggaaatgtaaaatccaagtcatatggcagtgatcaattattaatcaattaataatattaataaatttcttatatttaaggcaaaaaaaaaaaaaaaaaaaaaaagcaaaaaaaaagaaaacaaaacagaccacaaacaaaaaaaggagaaagaagacaacgaaaagaaaacaaagaagagccgaggagacgctcgagacagcaacaggcgcacgacgaacacgcgaaaagaggcacaggcaatggcaagcggcgggagaggaaggagccaaagagaggcagaaaaaagaaagcagaggcgcgaagacaagacggccaggaggggacgaggagaaaaggaaacgacggaagaagacagggaaggaggaacacgagagcgcaagaggcggcaaggagacaaagaagcggggagacgaggtggagagagagaaggagaggcaagcgagagaggagcgaaagaaagagggggaaaacagagagggcgagagacacacgggcag

SEQ ID NO: 316203 - DNA, 1251 bp, Homo sapiens
atttgatggaattggaattttattcaggtcaggatttgttaaccatttgttccgttggttaacaggaaacggggggagggagagccgagggtgaaaaaggaggcagaaaggagtgtctcttccactgcaggcctcagtttcctcatctgtaaaacggagataataatccctgtcctgtcctcctggcagagttactgtcagcgtcaaacgggagaagcggtgggagggcacattatagtttatgaaagggtcgagaaggcgggcggccagcctcgaggtagggggttattatcttccgctgcccgccgccccctcccacgccggcccaggctgaagttgactctgcccgcaggcctccaaagacttcatatgctccagatctcctacttccgcgacccctatcacgtgtggtaccagggcaacgcgtcgctggggggacacctaacgcacgtgctggaaggcccagacaccttcaccctgcagcagctcaatgcctacaaccgcactcggtatgaactgcgggaattcctggaggacacctgtgtgcagtatgtgcagaaacatatttccgcggaaaacacgaaagggagccaaacaagccgctcctacacttcgctggtcctgggcgtcctggtgggcagtttcatcattgctggtgtggctgtaggcatcttcctgtgcacaggtggacggcgatgttaattactctccagccccgtcagaaggggctggattgatggaggctggcaagggaaagtttcagctcactgtgaagccagactccccaactgaaacaccagaaggtttggagtgacagctcctttcttctcccacatctgcccactgaagatttgagggaggggagatggagaggagaggtggacaaagtacttggtttgctaagaacctaagaacgtgtatgctttgctgaattagtctgataagtgaatgtttatctatctttgtggaaaacagataatggagttggggcaggaagcctatggcccatcctccaaagacagacagaatcacctgaggcgttcaaaagatataaccaaataaacaagtcatccacaatcaaaatacaacattcaatacttccaggtgtgtcagacttgggatgggacgctgatataatagggtagaaagaagtaacacgaagaagtggtggaaatgtaaaatccaagtcatatggcagtgatcaattattaatcaattaataatattaataaatttcttatatttaaggca

SEQ ID NO: 316204 - DNA, 1104 bp, Homo sapiens
gagacacagtagaaataacactttataagcctcttcctcctcccatctcctggcctccttccatcctcctctgcccagactccgcccctcccagacggtcctcacttctcttttccctagactgcagccagcggagcccgcagccggcccgagccaggaacccaggtccggagcctcaacttcaggatgttgacaacattgctgccgatactgctgctgtctggctgggccttttgtagccaagacgcctcagatggcctccaaagacttcatatgctccagatctcctacttccgcgacccctatcacgtgtggtaccagggcaacgcgtcgctggggggacacctaacgcacgtgctggaaggcccagacaccaacaccacgatcattcagctgcagcccttgcaggagcccgagagctgggcgcgcacgcagagtggcctgcagtcctacctgctccagttccacggcctcgtgcgcctggtgcaccaggagcggaccttggcctttcctctgaccatccgctgcttcctgggctgtgagctgcctcccgagggctctagagcccatgtcttcttcgaagtggctgtgaatgggagctcctttgtgagtttccggccggagagagccttgtggcaggcagacacccaggtcacctccggagtggtcaccttcaccctgcagcagctcaatgcctacaaccgcactcggtatgaactgcgggaattcctggaggacacctgtgtgcagtatgtgcagaaacatatttccgcggaaaacacgaaaggtatgatgggacggggcccaggcctgcaagctggggagagggcgggttccagacaaatggatggacctgaaggatggatgcctagagaggcaaggaacggattatcccttagagcctttggagtgggtgtggccctgtcaataacttaattttagcccagtgaaattgatttcaggcttctgacctcccaaactgcgagagaataaatttctgttgctttaagccacttggtttgtggtaatttgttgcaggaatcacaggaaacgaatacagtgctcctgtgttgtatccagtctcgcttactgtcatctcctttc

SEQ ID NO: 316205 - DNA, 141 bp, Homo sapiens
tcccaggaccagcagcataatctgggagtttactgaaatgctgaatttcaggcctcccctctatctattgttttaacacgtaagggtaaggaattttgacattaggtttatgcctttcttcttctttttcttttttttgag

SEQ ID NO: 316206 - DNA, 6446 bp, Homo sapiens
gcagtgaagccaatatagttttattggatccaatgcactaccactaaaacaaatatatgtacactcaggccaatacacttttattaaaacaaatagaatttaattcaaaccagcattcaatacgttttctcaaagcaatgaaattaagctgtaccagtacttctgctcaatatgttttcccaatcaaatccatttgaacaaagtgaaatatatttatcatagatagcacatttttattaaaaacaaattcactgaaaccaagtttccctttgaactgatagatagaaattctaaccaattgcacaattagatcatagaaacggatgtatttttactttagcaaaaagcatttctgttcaggtccactttaaaacacactaatgaataataaaagttgctccaacaatgtctttaatggaatattctgtccaaggtatgtcctttgaggttgaagcacagtctagaaatttttttttaatgtagggaaaagaatagtgctgaaatagaattacaataacttcagatacttaatgactaaatatttatcctacctatgtgtacttaaaagtgatgttgttggatgtgtacaaatgaattaaagacatgcttgggggtgtcctttttagttgcatttgctactataccacattagccagaaaaaactttccttgtcattgatgaaaaacactctctcttcttacctgtctgaggttaactagggattgccatgcatagagagaacttaatggtatgggaggtcatttatttgtgtggctctttggagggaatttcaattttggtgcctagattacaaaccatattcaagtcttctgaagaaccatggaaaaggagaacaacttacaaatgccacacaccttttgggaggcaacaaactccctacgagcaagagtatccaaataacgtcccacctctctgcagggccactaatgctcccgacacacgggcagacctccaagtagagaagcatctctggagaaattagagcctccccacaaggaatatgagggctccgatcagtggccacaaggaacccctccctgctgcctccacagtggccccacactctgtcttctctgctcccatcttaccccaaggctgcaggaccttgggatagaaatcttctcccctaagcagcccagagaatgctccttaacccaagacagtgggttctcagtactacttcctccttcctgcctggaaaagtgcaaaaagtatagatatgcccacagttcactgggcaaataatgtactgacctccgggggatcctggccttgaatggactagatctgccttctctgaaacacaactggtcatggagggtaccctgcgaacagatgttcatcacagaattatttaaaaagatgaaatgttagaaacccaaatatctagcatccaggggattggttaaacatattgtaataatatcttcctgatgtattctacaatattaatatcaatacagtatcataagcattcagtgtcactgtagaggtatttaattgaatgggaaatattcatagtacattatcaaataaaaacgtttaaaagatatagtaatttcttatctttgcaaaatagatatgcatatctatgcataaacaaaaacatgggaagatgacactaaaatgttaatagtggtgagtgatagatgatagatttctctctctctctctctctccacctctctctttgaagctgtattttacaaatttcctgaaattcacctgtattacttttgatataagcaaaaattattttaaaagtggttattttttaaaatatggcattaagtccaatttaaaaggtagtgagcaaatgttgggtcggcttctgtagtcttaattctggtatcctttcagagagggtcagtactccacgtctcattctttgttcttttgcaaaactttatttgaaggctttcatcaactggtcattcgacatgcacttaaacaggaacccaggtaataaattctgccttgagtttgttccaggaagcagtgcggcttgacacaaaggatgtgcatgctttatgttgtcagatgatataaactgtgttgccccagattctgccttttgccttagctcagagccacctggctgttttaatcatctcatctcagatgcctggcaacatctaattcctcagctccttttcagtaatttcagttctattttcttactctatcattctggtgttttcattgcattttcttataaaagagatccagatttattttggaaatagatttgaatgacgaaaacatcctatagaagcaaatcctaaacaaatataaatatttgaccatgattatgcaaagaaagctcctgcttcctcctctgtgtcacagagaccctcgggaggaactccagggagaatggaagcttgggagtcatcccaacccttgctcaggtgcgaaatcccctgccctctgcctggcactgatagggacggatcagtttctctgcctggagaggcagcctcctgtgacctggatacattggagcctgaacacgggaacagaagggtctctgggaatccaatctcagtctgttgggcttacaaagtgaccaaagtcaaatgctggtctgtgagagaaagaggaggcagacacatcgggggaccgagaagtactttgaagcaccccgctcaccatggtatggggaagaatttggccacatccctgccaactgctgcttctcttggactgggaaagggtcagttgcttgtttctatcagattcatggacaccaccaagaaaagaggccagtctgagacattcaatatttgttgaaacacagaggtttaactgatcattgaggtacacagggtgataggaagagtatgaacttgagaatctgatggattttgtttaaagttaggactaggctactgactacccaccctgctaattgtcttggggaagttatttaacctctctgaacctcagcttctcatccacaaaataggacactagcacacagtgggctatctatatatatttattgaattgaaatgggagtattcaaaattatttgggttgttggcttaaaataagcagaataattcaattcctgttcatctggaatctaattgtccaatttggagtttcagatgtaacaaagatcctaatgacctaatattattggggtaatcctaaaatttattaggtgatctgcaagttccatgatgattgtatactggaggaaatgcacaatgcacacagaccttcctaggagtaaaagactgatgtgaatttgcagcactacttaattataagtaattgttgcatgaacacacacacaaacacacacccacagaactcacactataagataggggggcaaataatgacatttgacaaaaatgagctcttgcagagctcaacgagtctaagtttcctccctaatatcttaacaggctacagtatacacaggcttttaagtaatgtacttgttatccaaacactagcagacatttaactggaatccaggagcattttgtcaagaaggaaaagaactaaccaaagaaaaagaaaagtagagagtttcccagctgttttaccacatcacaacttcaaaaaaaccaagcctgtccttgccttgtccctgatggctctgccagcagagtgaatgaattggagcagatttaggttttaaaatgcctcctaatatcatttgggcagattagcttacatggctggacattgtgctcccagccacagggaatgttcttttcctgttggaagctctgacagccactgccacggtgaaatatcaggagcctcctaacatttttcttgatttctttaagagtgaacattagacatattaaaaacaacaacccaatcattaagccctgtgaggttttcctaggagccagctctatcgctttaatcagattacggacaactcattctcatcccagccatttatcttctttgtttacacacacaccaagtggcattcttcttagcatcaaaaaatagtaatcaaaattgagaacaacaaaagacctttcattatttacagtgttaagtaacatctatttgccttcattagtttctaaacaacgaagtacactggttctgattaaagctggcatgtgttaattatatccgaggtctgggattgttttgtctacaataaaggattgctgaaagctgaaatttgaggcgcccaggccccagaagtcacctgcctgtatgtgtttcctcagtgagagtttccagcctgagaatggcagaagcggatgtgagcttgtcacagaaagttttttttgctttgttttgttttgtttggtttttaagccctcggttttattgcccattttatgggctggagttaaatggaagtacaatgcagtttgctctcttactgctcagcactaacagccatgatgagccataattagaagtaaaaccaccacataaataacatggtagaaaaattgccacagtgagaagccagactttggcgacgggaaacttcagcgggtcctgagtatccatcatacttaaggggcaccgcgtattttagcccatatttgtcttactaaagccaaaatgggagccatttagactttcgaacaagcttttaaaaatagagaatgtaggcttaaacagactgcctgctgctaagtgtgatgaagaaacctgtcacctggaggctacgacagctggaagggctgggagggagagccctgggagcccaggggttaggaagggaagataaacaggagaggaagaggaggcctggactctccacaacagcaaggtctagacatttcactgcaaagcctaagagtctgcacaccgttgagcacagcagcttagacttccgccggggaacgtgtgaggctgggacgccttgcagattttgctttcatgacctgtactcagcgatgaagtgggagcaggtagactagtttttttttttttttttaatggagtctcattctgtcacccaggctggagtgcagtggcgtgatctcggttcactgcaacctctgccacccatgttcaagcgattctcctgcctcagccccctgagtagctgggattacaggtgcctgccactgcgtctggctaatttttgtatttttagtagagatggggtttcaccatcttggccaggctggtcttgaactcctgaccttgtggtccacccgcctcggcctcccaaaatgctgggattacatgcatgagccacgcgcccagcctagactagcatttttgagtacccactatctccttggcattttacttccattttaattctcataacagccttaggacgccaatgaaaaggaagagaaaataaagtgtgttctgtgcctgaaaatggccttaaagaaacaaggaccaacagctggagcagagtggggctgcccatacgcaaagagacaacaagtaggaattaacataaggcatatcacgtggatgccatagaactatcacagcaatttcttttttccccaagtcagcctctcttgtacaggggattagaaaacaaacccaagagaataaacttgaaatggaaggaacgtgctttgtagtcgagtgtttttcaaagcctgcatcattttaaaaactgatttaagtatattcatttgctttctaaaataagtcatatgtatgtttctactgatcggccagaatagttaaggtctgtctgatcttcatatggaatgaaaggggacattctttggatattctggaagtccacacgtgttctttacagagtttggtttgctttctccgtttcttccttcctttgcaaaatcaaacaaacaggaataaaaaccaaaccaaaacaaaattaatgaaaacccttgtgttgaggactttgttttgttttaaatgtgtctggtattaagcagtatgtttagtgaaatgactttaaacttaagtaggaaatacagctccatttcacacgtggattttgtctgcatttacatctctgcaggcctcacatgccgtgacaccagacatttttttaattaagatatgaagtgctcattttttttttgtggaactgctgtattctaacaaatttactacacgtctcagaaaacacatagctttgccaaagttggtgagtagcccagcatggtttatctccagcccacagctctttccctgaattcaatactgcaggcacaatttaatgcaaacccaatttatgacttaatgctctagggaccgtagtgggagattgttacattattcttttctaatcctatttgtgttttaatttgctaagtctgtaatgaggtgcatgccttgaatattcaagatctttcacattgcttttgactttgtttaatataatagattttacagtttgcattaaatacccaggtgcttcggtcagtattatctctttattttctcaactagagtgaataaaattacacgatgaaagt

SEQ ID NO: 316207 - DNA, 488 bp, Homo sapiens
ttctgccttttgccttagctcagagccacctggctgttttaatcatctcatctcagatgcctggcaacatctaattcctcagctccttttcagtaatttcagttctattttcttactctatcattctggtgttttcattgcattttcttataaaagagatccagatttattttggaaatagatttgaatgacgaaaacatcctatagaagcaaatcctaaacaaatataaatatttgaccatgattatgcaaagaaagctcctgcttcctcctctgtgtcacagagaccctcgggaggaactccagggagaatggaagcttgggagtcatcccaacccttgctcaggtgcgaaatcccctgccctctgcctggcactgatagggacggatcagtttctctgcctggagaggcagcctcctgtgacctggatacattggagcctgaacacgggaacagaaggtatcctccctccttccttagtggtctc

SEQ ID NO: 316208 - DNA, 6389 bp, Homo sapiens
gcagtgaagccaatatagttttattggatccaatgcactaccactaaaacaaatatatgtacactcaggccaatacacttttattaaaacaaatagaatttaattcaaaccagcattcaatacgttttctcaaagcaatgaaattaagctgtaccagtacttctgctcaatatgttttcccaatcaaatccatttgaacaaagtgaaatatatttatcatagatagcacatttttattaaaaacaaattcactgaaaccaagtttccctttgaactgatagatagaaattctaaccaattgcacaattagatcatagaaacggatgtatttttactttagcaaaaagcatttctgttcaggtccactttaaaacacactaatgaataataaaagttgctccaacaatgtctttaatgttaatgtagggaaaagaatagtgctgaaatagaattacaataacttcagatacttaatgactaaatatttatcctacctatgtgtacttaaaagtgatgttgttggatgtgtacaaatgaattaaagacatgcttgggggtgtcctttttagttgcatttgctactataccacattagccagaaaaaactttccttgtcattgatgaaaaacactctctcttcttacctgtctgaggttaactagggattgccatgcatagagagaacttaatggtatgggaggtcatttatttgtgtggctctttggagggaatttcaattttggtgcctagattacaaaccatattcaagtcttctgaagaaccatggaaaaggagaacaacttacaaatgccacacaccttttgggaggcaacaaactccctacgagcaagagtatccaaataacgtcccacctctctgcagggccactaatgctcccgacacacgggcagacctccaagtagagaagcatctctggagaaattagagcctccccacaaggaatatgagggctccgatcagtggccacaaggaacccctccctgctgcctccacagtggccccacactctgtcttctctgctcccatcttaccccaaggctgcaggaccttgggatagaaatcttctcccctaagcagcccagagaatgctccttaacccaagacagtgggttctcagtactacttcctccttcctgcctggaaaagtgcaaaaagtatagatatgcccacagttcactgggcaaataatgtactgacctccgggggatcctggccttgaatggactagatctgccttctctgaaacacaactggtcatggagggtaccctgcgaacagatgttcatcacagaattatttaaaaagatgaaatgttagaaacccaaatatctagcatccaggggattggttaaacatattgtaataatatcttcctgatgtattctacaatattaatatcaatacagtatcataagcattcagtgtcactgtagaggtatttaattgaatgggaaatattcatagtacattatcaaataaaaacgtttaaaagatatagtaatttcttatctttgcaaaatagatatgcatatctatgcataaacaaaaacatgggaagatgacactaaaatgttaatagtggtgagtgatagatgatagatttctctctctctctctctctccacctctctctttgaagctgtattttacaaatttcctgaaattcacctgtattacttttgatataagcaaaaattattttaaaagtggttattttttaaaatatggcattaagtccaatttaaaaggtagtgagcaaatgttgggtcggcttctgtagtcttaattctggtatcctttcagagagggtcagtactccacgtctcattctttgttcttttgcaaaactttatttgaaggctttcatcaactggtcattcgacatgcacttaaacaggaacccaggtaataaattctgccttgagtttgttccaggaagcagtgcggcttgacacaaaggatgtgcatgctttatgttgtcagatgatataaactgtgttgccccagattctgccttttgccttagctcagagccacctggctgttttaatcatctcatctcagatgcctggcaacatctaattcctcagctccttttcagtaatttcagttctattttcttactctatcattctggtgttttcattgcattttcttataaaagagatccagatttattttggaaatagatttgaatgacgaaaacatcctatagaagcaaatcctaaacaaatataaatatttgaccatgattatgcaaagaaagctcctgcttcctcctctgtgtcacagagaccctcgggaggaactccagggagaatggaagcttgggagtcatcccaacccttgctcaggtgcgaaatcccctgccctctgcctggcactgatagggacggatcagtttctctgcctggagaggcagcctcctgtgacctggatacattggagcctgaacacgggaacagaagggtctctgggaatccaatctcagtctgttgggcttacaaagtgaccaaagtcaaatgctggtctgtgagagaaagaggaggcagacacatcgggggaccgagaagtactttgaagcaccccgctcaccatggtatggggaagaatttggccacatccctgccaactgctgcttctcttggactgggaaagggtcagttgcttgtttctatcagattcatggacaccaccaagaaaagaggccagtctgagacattcaatatttgttgaaacacagaggtttaactgatcattgaggtacacagggtgataggaagagtatgaacttgagaatctgatggattttgtttaaagttaggactaggctactgactacccaccctgctaattgtcttggggaagttatttaacctctctgaacctcagcttctcatccacaaaataggacactagcacacagtgggctatctatatatatttattgaattgaaatgggagtattcaaaattatttgggttgttggcttaaaataagcagaataattcaattcctgttcatctggaatctaattgtccaatttggagtttcagatgtaacaaagatcctaatgacctaatattattggggtaatcctaaaatttattaggtgatctgcaagttccatgatgattgtatactggaggaaatgcacaatgcacacagaccttcctaggagtaaaagactgatgtgaatttgcagcactacttaattataagtaattgttgcatgaacacacacacaaacacacacccacagaactcacactataagataggggggcaaataatgacatttgacaaaaatgagctcttgcagagctcaacgagtctaagtttcctccctaatatcttaacaggctacagtatacacaggcttttaagtaatgtacttgttatccaaacactagcagacatttaactggaatccaggagcattttgtcaagaaggaaaagaactaaccaaagaaaaagaaaagtagagagtttcccagctgttttaccacatcacaacttcaaaaaaaccaagcctgtccttgccttgtccctgatggctctgccagcagagtgaatgaattggagcagatttaggttttaaaatgcctcctaatatcatttgggcagattagcttacatggctggacattgtgctcccagccacagggaatgttcttttcctgttggaagctctgacagccactgccacggtgaaatatcaggagcctcctaacatttttcttgatttctttaagagtgaacattagacatattaaaaacaacaacccaatcattaagccctgtgaggttttcctaggagccagctctatcgctttaatcagattacggacaactcattctcatcccagccatttatcttctttgtttacacacacaccaagtggcattcttcttagcatcaaaaaatagtaatcaaaattgagaacaacaaaagacctttcattatttacagtgttaagtaacatctatttgccttcattagtttctaaacaacgaagtacactggttctgattaaagctggcatgtgttaattatatccgaggtctgggattgttttgtctacaataaaggattgctgaaagctgaaatttgaggcgcccaggccccagaagtcacctgcctgtatgtgtttcctcagtgagagtttccagcctgagaatggcagaagcggatgtgagcttgtcacagaaagttttttttgctttgttttgttttgtttggtttttaagccctcggttttattgcccattttatgggctggagttaaatggaagtacaatgcagtttgctctcttactgctcagcactaacagccatgatgagccataattagaagtaaaaccaccacataaataacatggtagaaaaattgccacagtgagaagccagactttggcgacgggaaacttcagcgggtcctgagtatccatcatacttaaggggcaccgcgtattttagcccatatttgtcttactaaagccaaaatgggagccatttagactttcgaacaagcttttaaaaatagagaatgtaggcttaaacagactgcctgctgctaagtgtgatgaagaaacctgtcacctggaggctacgacagctggaagggctgggagggagagccctgggagcccaggggttaggaagggaagataaacaggagaggaagaggaggcctggactctccacaacagcaaggtctagacatttcactgcaaagcctaagagtctgcacaccgttgagcacagcagcttagacttccgccggggaacgtgtgaggctgggacgccttgcagattttgctttcatgacctgtactcagcgatgaagtgggagcaggtagactagtttttttttttttttttaatggagtctcattctgtcacccaggctggagtgcagtggcgtgatctcggttcactgcaacctctgccacccatgttcaagcgattctcctgcctcagccccctgagtagctgggattacaggtgcctgccactgcgtctggctaatttttgtatttttagtagagatggggtttcaccatcttggccaggctggtcttgaactcctgaccttgtggtccacccgcctcggcctcccaaaatgctgggattacatgcatgagccacgcgcccagcctagactagcatttttgagtacccactatctccttggcattttacttccattttaattctcataacagccttaggacgccaatgaaaaggaagagaaaataaagtgtgttctgtgcctgaaaatggccttaaagaaacaaggaccaacagctggagcagagtggggctgcccatacgcaaagagacaacaagtaggaattaacataaggcatatcacgtggatgccatagaactatcacagcaatttcttttttccccaagtcagcctctcttgtacaggggattagaaaacaaacccaagagaataaacttgaaatggaaggaacgtgctttgtagtcgagtgtttttcaaagcctgcatcattttaaaaactgatttaagtatattcatttgctttctaaaataagtcatatgtatgtttctactgatcggccagaatagttaaggtctgtctgatcttcatatggaatgaaaggggacattctttggatattctggaagtccacacgtgttctttacagagtttggtttgctttctccgtttcttccttcctttgcaaaatcaaacaaacaggaataaaaaccaaaccaaaacaaaattaatgaaaacccttgtgttgaggactttgttttgttttaaatgtgtctggtattaagcagtatgtttagtgaaatgactttaaacttaagtaggaaatacagctccatttcacacgtggattttgtctgcatttacatctctgcaggcctcacatgccgtgacaccagacatttttttaattaagatatgaagtgctcattttttttttgtggaactgctgtattctaacaaatttactacacgtctcagaaaacacatagctttgccaaagttggtgagtagcccagcatggtttatctccagcccacagctctttccctgaattcaatactgcaggcacaatttaatgcaaacccaatttatgacttaatgctctagggaccgtagtgggagattgttacattattcttttctaatcctatttgtgttttaatttgctaagtctgtaatgaggtgcatgccttgaatattcaagatctttcacattgcttttgactttgtttaatataatagattttacagtttgcattaaatacccaggtgcttcggtcagtattatctctttattttctcaactagagtgaataaaattacacgatgaaagt

SEQ ID NO: 316209 - DNA, 658 bp, Homo sapiens
tttcatcgtatcaccttacctctagcattcaggtatatattactttgtttattactctttgggtgtctatatctaattttaccaagtagtttgtaaacccctttaggcagtttttgtactttctgttcttaaaagagctattacataagctgcttaacaatgaatttaattggtacatactgattggttggttgaatttctttgatttggaagtaagtgttttaaacttagaatgcctagtgcaggcctctggtgttcacagatgtcctttcagtacttaaaaagtagtaatgttggccgcgcgtggtggttcatgcctgtaatcccaacactttgggaggctgaggcgggtggatcacgaggtcaggagttcaagactagcctggccaagatggtgaaaccccgtctctactagaaatacaaaaaaaaatgcctctgtagtcccagctactcgggaggctgaggcagaagaaatgcttgaacccgggaggtggaggttacagtgagctgagatcatgccactgtacttcagcctgggcaacagagcaagattccgtctaaaaaaaaaaaatagtaatgtttaggtgatatgaatgactgtttattttgagttaactgaaaaactattgatttagtacactaacactgaaaccttaag

SEQ ID NO: 316210 - DNA, 1916 bp, Homo sapiens
agcggtagtctttggccgccgccgaaccccgcgcgccactcgctcgctcagagggaggagaaagtggcgagttccggatccctgcctagcgcggcccaacctttactccagagatcatggctgccgaggatgtggtggcgactggcgccgacccaagcgatctggagagcggcgggctgctgcatgagattttcacgtcgccgctcaacctgctgctgcttggcctctgcatcttcctgctctacaagatcgtgcgcggggaccagccggcggccagcggcgacagcgacgacgacgagccgccccctctgccccgcctcaagcggcgcgacttcacccccgccgagctgcggcgcttcgacggcgtccaggacccgcgcatactcatggccatcaacggcaaggtgttcgatgtgaccaaaggccgcaaattctacgggcccgaggggccgtatggggtctttgctggaagagatgcatccaggggccttgccacattttgcctggataaggaagcactgaaggatgagtacgatgacctttctgacctcactgctgcccagcaggagactctgagtgactgggagtctcagttcactttcaagtatcatcacgtgggcaaactgctgaaggagggggaggagcccactgtgtactcagatgaggaagaaccaaaagatgagagtgcccggaaaaatgattaaagcattcagtggaagtatatctatttttgtattttgcaaaatcatttgtaacagtccactctgtctttaaaacatagtgattacaatatttagaaagttttgagcacttgctataagttttttaattaacatcactagtgacactaataaaattaacttcttagaatgcatgatgtgtttgtgtgtcacaaatccagaaagtgaactgcagtgctgtaatacacatgttaatactgtttttcttctatctgtagttagtacaggatgaatttaaatgtgtttttcctgagagacaaggaagacttgggtatttcccaaaacaggtaaaaatcttaaatgtgcaccaagagcaaaggatcaacttttagtcatgatgttctgtaaagacaacaaatccctttttttttctcaattgacttaactgcatgatttctgttttatctacctctaaagcaaatctgcagtgttccaaagactttggtatggattaagcgctgtccagtaacaaaatgaaatctcaaaacagagctcagctgcaaaaaagcatattttctgtgtttctggactgcactgttgtccttgccctcacatagacactcagacaccctcacaaacacagtagtctatagttaggattaaaataggatctgaacattcaaaagaaagctttggaaaaaaagagctggctggcctaaaaacctaaatatatgatgaagattgtaggactgtcttcccaagccccatgttcatggtggggcaatggttatttggttattttactcaattggttactctcatttgaaatgagggagggacatacagaataggaacaggtgtttgctctcctaagagccttcatgcacacccctgaaccacgaggaaacagtacagtcgctagtcaagtggtttttaaagtaaagtatattcataaggtaacagttattctgttgttataaaactatacccactgcaaaagtagtagtcaagtgtctaggtctttgatattgctcttttggttaacactaagcttaagtagactatacagttgtatgaatttgtaaaagtatatgaacacctagtgagatttcaaacttgtaattgtggttaaatagtcattgtattttcttgtgaactgtgttttatgattttacctcaaatcagaaaacaaaatgatgtgctttggtcagttaataaaaatggttttacccacta

SEQ ID NO: 316211 - DNA, 773 bp, Homo sapiens
agcggtagtctttggccgccgccgaaccccgcgcgccactcgctcgctcagagggaggagaaagtggcgagttccggatccctgcctagcgcggcccaacctttactccagagatcatggctgccgaggatgtggtggcgactggcgccgacccaagcgatctggagagcggcgggctgctgcatgagattttcacgtcgccgctcaacctgctgctgcttggcctctgcatcttcctgctctacaagatcgtgcgcggggaccagccggcggccagcggcgacagcgacgacgacgagccgccccctctgccccgcctcaagcggcgcgacttcacccccgccgagctgcggcgcttcgacggcgtccaggacccgcgcatactcatggccatcaacggcaaggtgttcgatgtgaccaaaggccgcaaattctacgggcccgaggggccgtatggggtctttgctggaagagatgcatccaggggccttgccacattttgcctggataaggaagcactgaaggatgagtacgatgacctttctgacctcactgctgcccagcaggagactctgagtgactgggagtctcagttcactttcaagtatcatcacgtgggcaaactgctgaaggagggggaggagcccactgtgtactcagatgaggaagaaccaaaagatgagagtgcccggaaaaatgattaaagcattcagtggaagacagtgatattgatgatcctgaccctctgtaagcctaggctaatgtgtatgttt

SEQ ID NO: 316212 - DNA, 2178 bp, Homo sapiens
agcggtagtctttggccgccgccgaaccccgcgcgccactcgctcgctcagagggaggagaaagtggcgagttccggatccctgcctagcgcggcccaacctttactccagagatcatggctgccgaggatgtggtggcgactggcgccgacccaagcgatctggagagcggcgggctgctgcatgagattttcacgtcgccgctcaacctgctgctgcttggcctctgcatcttcctgctctacaagatcgtgcgcggggaccagccggcggccagcggcgacagcgacgacgacgagccgccccctctgccccgcctcaagcggcgcgacttcacccccgccgagctgcggcgcttcgacggcgtccaggacccgcgcatactcatggccatcaacggcaaggtgttcgatgtgaccaaaggccgcaaattctacgggcccgaggggccgtatggggtctttgctggaagagatgcatccaggggccttgccacattttgcctggataaggaagcactgaaggatgagtacgatgacctttctgacctcactgctgcccagcaggagactctgagtgactgggagtctcagttcactttcaagtatcatcacgtgggcaaactgctgaaggagggggaggagcccactgtgtactcagatgaggaagaaccaaaagatgagagtgcccggaaaaatgattaaagcattcagtggaagtatatctatttttgtattttgcaaaatcatttgtaacagtccactctgtctttaaaacatagtgattacaatatttagaaagttttgagcacttgctataagttttttaattaacatcactagtgacactaataaaattaacttcttagaatgcatgatgtgtttgtgtgtcacaaatccagaaagtgaactgcagtgctgtaatacacatgttaatactgtttttcttctatctgtagttagtacaggatgaatttaaatgtgtttttcctgagagacaaggaagacttgggtatttcccaaaacaggtaaaaatcttaaatgtgcaccaagagcaaaggatcaacttttagtcatgatgttctgtaaagacaacaaatccctttttttttctcaattgacttaactgcatgatttctgttttatctacctctaaagcaaatctgcagtgttccaaagactttggtatggattaagcgctgtccagtaacaaaatgaaatctcaaaacagagctcagctgcaaaaaagcatattttctgtgtttctggactgcactgttgtccttgccctcacatagacactcagacaccctcacaaacacagtagtctatagttaggattaaaataggatctgaacattcaaaagaaagctttggaaaaaaagagctggctggcctaaaaacctaaatatatgatgaagattgtaggactgtcttcccaagccccatgttcatggtggggcaatggttatttggttattttactcaattggttactctcatttgaaatgagggagggacatacagaataggaacaggtgtttgctctcctaagagccttcatgcacacccctgaaccacgaggaaacagtacagtcgctagtcaagtggtttttaaagtaaagtatattcataaggtaacagttattctgttgttataaaactatacccactgcaaaagtagtagtcaagtgtctaggtctttgatattgctcttttggttaacactaagcttaagtagactatacagttgtatgaatttgtaaaagtatatgaacacctagtgagatttcaaacttgtaattgtggttaaatagtcattgtattttcttgtgaactgtgttttatgattttacctcaaatcagaaaacaaaatgatgtgctttggtcagttaataaaaatggttttacccactaaaaaaaaaaaaacaaaacaaacgcaacggaccaacagtggtcgcagcgcagcaggcacaccccaagaaagaagccttcataagaaccacagtcggatggggaaggggggggccaccaaacagagtatggtagaaaactggggacctgacagccgtccccacagagaacacccgggcgcacaacaagaggcgcgggattcaccccccattaaaaaaccgccggggaaacgggaggtcggacaacacccagaggacacaggcgg

SEQ ID NO: 316213 - DNA, 1555 bp, Homo sapiens
aatagggaagccattttctgtgtataaatcacagagaaattgactgtctaataaagaattgatctttggttttgtttttgaagaggggccgtatggggtctttgctggaagagatgcatccaggggccttgccacattttgcctggataaggaagcactgaaggatgagtacgatgacctttctgacctcactgctgcccagcaggagactctgagtgactgggagtctcagttcactttcaagtatcatcacgtgggcaaactgctgaaggagggggaggagcccactgtgtactcagatgaggaagaaccaaaagatgagagtgcccggaaaaatgattaaagcattcagtggaagtatatctatttttgtattttgcaaaatcatttgtaacagtccactctgtctttaaaacatagtgattacaatatttagaaagttttgagcacttgctataagttttttaattaacatcactagtgacactaataaaattaacttcttagaatgcatgatgtgtttgtgtgtcacaaatccagaaagtgaactgcagtgctgtaatacacatgttaatactgtttttcttctatctgtagttagtacaggatgaatttaaatgtgtttttcctgagagacaaggaagacttgggtatttcccaaaacaggtaaaaatcttaaatgtgcaccaagagcaaaggatcaacttttagtcatgatgttctgtaaagacaacaaatccctttttttttctcaattgacttaactgcatgatttctgttttatctacctctaaagcaaatctgcagtgttccaaagactttggtatggattaagcgctgtccagtaacaaaatgaaatctcaaaacagagctcagctgcaaaaaagcatattttctgtgtttctggactgcactgttgtccttgccctcacatagacactcagacaccctcacaaacacagtagtctatagttaggattaaaataggatctgaacattcaaaagaaagctttggaaaaaaagagctggctggcctaaaaacctaaatatatgatgaagattgtaggactgtcttcccaagccccatgttcatggtggggcaatggttatttggttattttactcaattggttactctcatttgaaatgagggagggacatacagaataggaacaggtgtttgctctcctaagagccttcatgcacacccctgaaccacgaggaaacagtacagtcgctagtcaagtggtttttaaagtaaagtatattcataaggtaacagttattctgttgttataaaactatacccactgcaaaagtagtagtcaagtgtctaggtctttgatattgctcttttggttaacactaagcttaagtagactatacagttgtatgaatttgtaaaagtatatgaacacctagtgagatttcaaacttgtaattgtggttaaatagtcattgtattttcttgtgaactgtgttttatgattttacctcaaatcagaaaacaaaatgatgtgctttggtcagttaataaaaatggttttacccacta

SEQ ID NO: 316214 - DNA, 1760 bp, Homo sapiens
agcggtagtctttggccgccgccgaaccccgcgcgccactcgctcgctcagagggaggagaaagtggcgagttccggatccctgcctagcgcggcccaacctttactccagagatcatggctgccgaggatgtggtggcgactggcgccgacccaagcgatctggagagcggcgggctgctgcatgagattttcacgtcgccgctcaacctgctgctgcttggcctctgcatcttcctgctctacaagatcgtgcgcggggaccagccggcggccagcggcgacagcgacgacgacgagccgccccctctgccccgcctcaagcggcgcgacttcacccccgccgagctgcggcgcttcgacggcgtccaggacccgcgcatactcatggccatcaacggcaaggtgttcgatgtgaccaaaggccgcaaattctacgggcccgtcaagtatcatcacgtgggcaaactgctgaaggagggggaggagcccactgtgtactcagatgaggaagaaccaaaagatgagagtgcccggaaaaatgattaaagcattcagtggaagtatatctatttttgtattttgcaaaatcatttgtaacagtccactctgtctttaaaacatagtgattacaatatttagaaagttttgagcacttgctataagttttttaattaacatcactagtgacactaataaaattaacttcttagaatgcatgatgtgtttgtgtgtcacaaatccagaaagtgaactgcagtgctgtaatacacatgttaatactgtttttcttctatctgtagttagtacaggatgaatttaaatgtgtttttcctgagagacaaggaagacttgggtatttcccaaaacaggtaaaaatcttaaatgtgcaccaagagcaaaggatcaacttttagtcatgatgttctgtaaagacaacaaatccctttttttttctcaattgacttaactgcatgatttctgttttatctacctctaaagcaaatctgcagtgttccaaagactttggtatggattaagcgctgtccagtaacaaaatgaaatctcaaaacagagctcagctgcaaaaaagcatattttctgtgtttctggactgcactgttgtccttgccctcacatagacactcagacaccctcacaaacacagtagtctatagttaggattaaaataggatctgaacattcaaaagaaagctttggaaaaaaagagctggctggcctaaaaacctaaatatatgatgaagattgtaggactgtcttcccaagccccatgttcatggtggggcaatggttatttggttattttactcaattggttactctcatttgaaatgagggagggacatacagaataggaacaggtgtttgctctcctaagagccttcatgcacacccctgaaccacgaggaaacagtacagtcgctagtcaagtggtttttaaagtaaagtatattcataaggtaacagttattctgttgttataaaactatacccactgcaaaagtagtagtcaagtgtctaggtctttgatattgctcttttggttaacactaagcttaagtagactatacagttgtatgaatttgtaaaagtatatgaacacctagtgagatttcaaacttgtaattgtggttaaatagtcattgtattttcttgtgaactgtgttttatgattttacctcaaatcagaaaacaaaatgatgtgctttggtcagttaataaaaatggttttacccacta

SEQ ID NO: 316215 - DNA, 999 bp, Homo sapiens
gcacgagggtaaacatggcgctgtaccttaaatgtgcaccaagagcaaaggatcaacttttaagatttttacctgttttgggaaatacccaagtcttccttgtctctcaggtaaaaatcttaaatgtgcaccaagagcaaaggatcaacttttagtcatgatgttctgtaaagacaacaaatccctttttttttctcaattgacttaactgcatgatttctgttttatctacctctaaagcaaatctgcagtgttccaaagactttggtatggattaagcgctgtccagtaacaaaatgaaatctcaaaacagagctcagctgcaaaaaagcatattttctgtgtttctggactgcactgttgtccttgccctcacatagacactcagacaccctcacaaacacagtagtctatagttaggattaaaataggatctgaacattcaaaagaaagctttggaaaaaaagagctggctggcctaaaaacctaaatatatgatgaagattgtaggactgtcttcccaagccccatgttcatggtggggcaatggttatttggttattttactcaattggttactctcatttgaaatgagggagggacatacagaataggaacaggtgtttgctctcctaagagccttcatgcacacccctgaaccacgaggaaacagtacagtcgctagtcaagtggtttttaaagtaaagtatattcataaggtaacagttattctgttgttataaaactatacccactgcaaaagtagtagtcaagtgtctaggtctttgatattgctcttttggttaacactaagcttaagtagactatacagttgtatgaatttgtaaaagtatatgaacacctagtgagatttcaaacttgtaattgtggttaaatagtcattgtattttcttgtgaactgtgttttatgattttacctcaaatcagaaaacaaaatgatgtgctttggtcagttaataaaaatggttttacccacta

SEQ ID NO: 316216 - DNA, 545 bp, Homo sapiens
ttttgttttctgatttgaggtaaaatcataaaacacagttcacaagaaaatacaatgactgtcttcccaagccccatgttcatggtggggcaatggttatttggttattttactcaattggttactctcatttgaaatgagggagggacatacagaataggaacaggtgtttgctctcctaagagccttcatgcacacccctgaaccacgaggaaacagtacagtcgctagtcaagtggtttttaaagtaaagtatattcataaggtaacagttattctgttgttataaaactatacccactgcaaaagtagtagtcaagtgtctaggtctttgatattgctcttttggttaacactaagcttaagtagactatacagttgtatgaatttgtaaaagtatatgaacacctagtgagatttcaaacttgtaattgtggttaaatagtcattgtattttcttgtgaactgtgttttatgattttacctcaaatcagaaaacaaaatgatgtgctttggtcagttaataaaaatggttttacccacta

SEQ ID NO: 316217 - DNA, 909 bp, Homo sapiens
agcggtagtctttggccgccgccgaaccccgcgcgccactcgctcgctcagagggaggagaaagtggcgagttccggatccctgcctagcgcggcccaacctttactccagagatcatggctgccgaggatgtggtggcgactggcgccgacccaagcgatctggagagcggcgggctgctgcatgagattttcacgtcgccgctcaacctgctgctgcttggcctctgcatcttcctgctctacaagatcgtgcgcggggaccagccggcggccagcggcgacagcgacgacgacgagccgccccctctgccccgcctcaagcggcgcgacttcacccccgccgagctgcggcgcttcgacggcgtccaggacccgcgcatactcatggccatcaacggcaaggtgttcgatgtgaccaaaggccgcaaattctacgggcccgaggggccgtatggggtctttgctggaagagatgcatccaggggccttgccacattttgcctggataaggaagcactgaaggatgagtacgatgacctttctgacctcactgctgcccagcaggagactctgagtgactgggagtctcagttcactttcaagtatcatcacgtgggcaaactgctgaaggagggggaggagcccactgtgtactcagatgaggaagaaccaaaagatgagagtgcccggaactgataagcctcagggacgatacatctggatcgcaatcatggtaccgtcctcggtttcacttggatccattccagttggctgctaagtttatactctttgccataatatctaatgtggtgggtcacaagacggggcagttggctcctcagaaagtcacgcggtcgcttgcttttacctctgtgtctgtatcaccagtcccataccctcagcaccc

SEQ ID NO: 316218 - DNA, 1862 bp, Homo sapiens
agcggtagtctttggccgccgccgaaccccgcgcgccactcgctcgctcagagggaggagaaagtggcgagttccggatccctgcctagcgcggcccaacctttactccagagatcatggctgccgaggatgtggtggcgactggcgccgacccaagcgatctggagagcggcgggctgctgcatgagattttcacgtcgccgctcaacctgctgctgcttggcctctgcatcttcctgctctacaagatcgtgcgcggggaccagccggcggccagcggcgacagcgacgacgacgagccgccccctctgccccgcctcaagcggcgcgacttcacccccgccgagctgcggcgcttcgacggcgtccaggacccgcgcatactcatggccatcaacggcaaggtgttcgatgtgaccaaaggccgcaaattctacgggcccgaggggccgtatggggtctttgctggaagagatgcatccaggggccttgccacattttgcctggataaggaagcactgaaggatgagtacgatgacctttctgacctcactgctgcccagcaggagactctgagtgactgggagtctcagttcactttcaagtatcatcacgtgggcaaactgctgaaggagggggaggagcccactgtgtactcagatgaggaagaaccaaaagatgagagtgcccggaaaaatgattaaagcattcagtggaagtatatctatttttgtattttgcaaaatcatttgtaacagtccactctgtctttaaaacatagtgattacaatatttagaaagttttgagcacttgctataagttttttaattaacatcactagtgacactaataaaattaacttcttagaatgcatgatgtgtttgtgtgtcacaaatccagaaagtgaactgcagtgctgtaatacacatgttaatactgtttttcttctatctgtagttagtacaggatgaatttaaatgtgtttttcctgagagacaaggaagacttgggtatttcccaaaacaggtaaaaatcttaaatgtgcaccaagagcaaaggatcaacttttagtcatgatgttctgtaaagacaacaaatccctttttttttctcaattgacttaactgcatgatttctgttttatctacctctaaagcaaatctgcagtgttccaaagactttggtatggattaagcgctgtccagtaacaaaatgaaatctcaaaacagagctcagctgcaaaaaagcatattttctgtgtttctggactgcactgttgtccttgccctcacatagacactcagacaccctcacaaacacagtagtctatagttaggattaaaataggatctgaacattcaaaagaaagctttggaaaaaaagagctggctggcctaatggtggggcaatggttatttggttattttactcaattggttactctcatttgaaatgagggagggacatacagaataggaacaggtgtttgctctcctaagagccttcatgcacacccctgaaccacgaggaaacagtacagtcgctagtcaagtggtttttaaagtaaagtatattcataaggtaacagttattctgttgttataaaactatacccactgcaaaagtagtagtcaagtgtctaggtctttgatattgctcttttggttaacactaagcttaagtagactatacagttgtatgaatttgtaaaagtatatgaacacctagtgagatttcaaacttgtaattgtggttaaatagtcattgtattttcttgtgaactgtgttttatgattttacctcaaatcagaaaacaaaatgatgtgctttggtcagttaataaaaatggttttacccacta

SEQ ID NO: 316219 - DNA, 1327 bp, Homo sapiens
cctactgaaggggtctagaggttttctcaactaaagctgttctagaattttaaaaattaataacataattgagtttttcagcataaatttaaaatcatattttacacagattataaatttatttcaatcatgttttatgaatcaagttgaacattcttactaaactgaatttccaagtgtatttatttatttagagacagggtattactctgtcacccaggctggagtgcaatggcatgatcatagctcactgtaacctcccactcctgggcttgagtgagcctcctgcctcagcctcccgagtagctagggctacaggtgtgcacaatcatacctggctagttttttgttttttcttagagatgggaccttgctatgttgcccaggctgtccttgaactcccagtgtcaagcagtcctcccatcttggcctcccaaagctctgggattataggcatgaaccactgtgcccagcccatccacatgtattttaaatgatttttttttatttcactgaaagaggttatgaaacaggctctcacttaggacacctaagaaccaaagataatgtgtggactttgattgggcctggtgtgaaaaaacagctggaaaaggcattactgggataacggaacacttaaataggatctcagtattaaataatattaaataattattgacaattgttaattgtgataataataccgttaaacctaggtgatgagtttgaatgatggatttgaagcccagctcttgctttccagctttgtgagcttgggcaaattgtttagcttttgtgctttcgtagctgtttaatgacatagtatagcgcttgacaaaagtaagtgttcaatttattttttattgtaactaatattgcatgtttaatccccaggatttctggtactctctttttggtactttcttccatctcttgttacttaccttgattaggatcttgaatcaagaacttcctgggtctctattccaatacctttttcttaagaaactattccctcacctttcttattgacagaatagaaaaagagagctcttctttgcttttcctcttctctcattctccttcctggatttctggttaagaagaataaattagaataagcaaaacagttttgaggtaggacatatattttaatgattaactcaatcaaggtctgtgcagctttattctagcgacttattcctcttctcaagtttgtatattacagtaaaggtgaatggatacacacacacacacacacacacacatgtatttgtatatgtgtgcagaggatgttttcttaagaagaacctagatcatagagtgc

SEQ ID NO: 316220 - DNA, 1339 bp, Homo sapiens
tcagcatgcattggggattggttccaggatgcccgctataccaaaatctgcacgtactcgagtcccacagtcgaccctgcagaatccacagacaggaaaatttggctgttaggtttcgcatcccatgaatactgtattttcaatctatggttggaaaaaatccacgtgtaagtggaactgcacagtccaaacccatgctgttcaagggttaactgtagattgtcgtatactaatttgtatttccttgatttctaaagagttggagtctttttcatatttattgtctgtttatatgtcttcttttatgaattactcctttgggtgttttacaattatttaacggtatgtatatctttttctttttgatttagtttagtttagttttgagacagtgtcttgctctgttgcccaggctgtgtgcagtggtgtgattatggctcactgcagcctcaacctcctaggctcaagtgatcctcccacctcagcctcccaagtagctggaactacagaagtgggccaccatgcctggatatttttcttattttttaatagagactggggtctccctatgttgcccaggctggtctcaaacttctagtctcaagtgatcctatcacctcagcctcccaaagtgctaggattacaggcatgagccaccatgcctggccttttattcttttttaagagttctttgcatattacaaacttatctgccttctgtgttgcaaatcttctcagtttgtcattttctttggatgtttattatgaattttttcaatgtaattgcagtgtaatttatataatttacatacaataaaatgcatccatttaaagtatataattcagtgagttttgataaatgtgtaacaacataaccttgaccataaggaagatatagaatatttctgtcacctccaaaagttctcttgtgccattttatatggatctaatttccataattttaggttacttttttcctattcttggatttcatataaatgaaataatataatacatacttttccacaaagcatgattttgaggctcacccatgctgtcgtattagtagtttgttcctttttatcgttgtatagttttccattgtatgattatcattttgattatacatttgattatccatttgatttgattaatttgattatccattcacctattgatgaacaggaggtttgatttgatttgattatccattcacctattgatgaacaggaggtttttcagttttggtctcatgagtaaggctgatatggacttctgagtacaaatccttttgtggacatacattttcatttctcttgggtgaatatctagaagcaga

SEQ ID NO: 316221 - DNA, 1069 bp, Homo sapiens
gcaggagaatcacttgaacccgggaggtggaggctgcagtgaacagagatcacgccattgcactccagcctgggcgacaagagtgaaactctgtctcaaaaaaaaaaaaaaaaagaatagctgcctttgaatcatgttgaggattaaatgccatggtaaatgaaaacgctttgcaaacaccaatatgtcatacaacgggaaagttttattttctgactctttaaagttgccctgggtgatttggctgtctgcaaataactcaaagttaatgagtttattttttagagacagtgaggacctttcttttgtagtttaggtgatgtgtttgcatgctgctagatcacccactggcaatttggcagtttacaaagtcctttcttccacattatttcaactaggatgccattgggcaagttacttaaactctctccaaaccttagttttctaatctttaaatggtacagatacctactcacagggttttcgaggggattagatgggcatggtggctcacgcctgtgaccccaggactttgggaggctgaggcaggcagatcacttgaggtcaggagttcaagaccagcctggccaacatggtgaaaccctgactctactaaaaaatacaaattagccggctgtggtagcagatgcctgtaatctcagctacttgggaagctgaggcaggagaatcacttgaaccagggaggcggaggttgtagtgagccgagatcatgccactggctgcactccagcctggagatagaacgacactccgtctcaaaaaggaaaaaaaaaaaaaaagaaattaccattatgacttctgggcctttgagatttttgttgataaatcatgaataagcaccatcaaaaacacatcttttttttttttctccatggttatttcagttctaacctttgcgggttttaggagaatattgcctttgatgatgagttttacaagaagataatataatgacagaaaaggatatatgttagggacagtagtagagatgaagtgaggaacatgtttcccaagttttagtctattgtacactagcctgcctattttt

SEQ ID NO: 316222 - DNA, 617 bp, Homo sapiens
ttcaagaccagcctgggcaacatggcgaacaccccatttctactaaaaatacaaaaattagctggggcgaggggataggccgagttccgggtgtaagggggccattagggagagcagagcgaggcagctgatcttccggattgggggccttgcccggaagctggacctcacggagatgaaacggaagatgcacgaggatatgatctccatacagaactttctcatctacgtggccctgctgcgagtcactccatttatcttaaagaaattggacagcatatgaagattggacatcacatgtgaatgcatgatatgaagagcctggttacagtttctactgttctctgcaagtaaataggcccagaaaggtataagagactctttgaatggacataaaaattctgcttgttaagaacaagttgagctctggtaactgatcttaatagctaaaatataaaaatatttgggaagtctgaaatgaggtctcctggccctggtgtgcccttaatgcctgtgacagttggcctctgtgaatattggtataattgtaaataatgtcaaactccattttctagcaagtattaataattaagggaagtatgtctgaaatggcactg

SEQ ID NO: 316223 - DNA, 1831 bp, Homo sapiens
tacaagctctccgatagagaactttcaggcagatcccaccattagcctgtaaacaaaaggtttggcaccagccacctgggaccaaataagaattcaattgtgcttgtccagatatgaacaaatatgtagtgagtatagagtttaccataatcataacaaatattaaagatttccttggagtcagagtaaaaaacaaacaattataatgttgtctagggacgacatgatatgctacctcctttttcctgaagttttattccattatattgacaagatggagaaagcaagatcacgaaggtgtgcaaatgattcttaaggcatggacgaggatttttcaatttattttttaaactgtttccataccctttctttgtctttcttgctttttgtttttgccgttgtatttatgtttgagacacaaccagtcattggtggcaggggcatatagtggtcagtctgaaagggaggctctcttaagagctgtgtgccttccacccagagccttgtgggagacccagtagaaagaaacagcatcctgggaaatccagctaccatggccctcccagtggaggcatcttacatttaggatacttcaagtatcctcagaaatgtattctgcacccccggccccacccatgctgagggaaggggagcagttgccaatatttgcaccatcttcacatgcacctgttgcaacaagagcttctgggaaggtaagtggcattggagctagatcacgtttcacaattagtggttgttcttttctgtgtttgtcttgcactttaaaaaagagagaacacatgcaaatgaacttgcttgtgtgtatttgatggctctaagggctataaattacaaacaaaacacatcccagacattaggagttcataagtgtatttaatgaaattggtggttttaggaagtcaactttagttttgctttgtttgcatgtccactaatttttttattttgatatttgtcttttttttaaattttacagtagtcatcgaaagttatgtttctttgcttacttcatttttttctctaatcaagactggaacaaaagtataaatattatttatttcaggtagcatttttttcgtgtagttttttaatatatacttgaaggaaatgtttcaccttatttttggtctttgtttattcatttagaccctgcaagttgattctcattaattgtcagattccactaccctttcttcctcatagatagtaattaccaatgtaactaagtatttgtgttctgatatctgaggccagtaactattaatatctagttctcagagcatttggaaaggttatcttaaatggctacctaaattgaaatccttttcagaaaaaatataattgcaagtaggtaggactggcctaaattgtctaatgtaataaagtcagacaaaatgcatactttatagtttcaagattttcagtatataaaatctgtccattcccattaaaaagtggaagattttaaataatttctttacagatgttttatttaagcaggtagctcaatctactaatgttgtttgatctgtgtttgttatactggttgtaattaatttttttaattcatgaactagcagaaaatttattaaattaactattaactacattcaccttgtaaattactgtataaaacttgttgacaatgcactgactttagaaagatgttaatgtacataaatagagtgtaaataaaatagtgttgatgtaccgaaatatgaactgtataaaaagtattggtaattgtatatggggtgtacctgtttatctgtaactagtatacaaacaaattaaatactgtggatgcctc

SEQ ID NO: 316224 - DNA, 1872 bp, Homo sapiens
tacaagctctccgatagagaactttcaggcagatcccaccattagcctgtaaacaaaaggtttggcaccagccacctgggaccaaataagaattcaattgtgcttgtccagatatgaacaaatatgtagtgagtatagagtttaccataatcataacaaatattaaagatttccttggagtcagagtaaaaaacaaacaattataatgttgtctagggacgacatgatatgctacctcctttttcctgaagttttattccattatattgacaagatggagaaagcaagatcacgaaggtgtgcaaatgattcttaaggcatggacgaggatttttcaatttattttttaaactgtttccataccctttctttgtctttcttgctttttgtttttgccgttgtatttatgtttgagacacaaccagtcattggtggcaggggcatatagtggtcagtctgaaagggaggctctcttaagagctgtgtgccttccacccagagccttgtgggagacccagtagaaagaaacagcatcctgggaaatccagctaccatggccctcccagtggaggcatcttacatttaggatacttcaagtatcctcagaaatgtattctgcacccccggccccacccatgctgagggaaggggagcagttgccaatatttgcaccatcttcacatgcacctgttgcaacaagagcttctgggaaggtaagtggcattggagctagatcacgtttcacaattagtggttgttcttttctgtgtttgtcttgcactttaaaaaagagagaacacatgcaaatgaacttgcttgtgtgtatttgatggctctaagggctataaattacaaacaaaacacatcccagacattaggagttcataagtgtatttaatgaaattggtggttttaggaagtcaactttagttttgctttgtttgcatgtccactaatttttttattttgatatttgtcttttttttaaattttacagtagtcatcgaaagttatgtttctttgcttacttcatttttttctctaatcaagactggaacaaaagtataaatattatttatttcaggtagcatttttttcgtgtagttttttaatatatacttgaaggaaatgtttcaccttatttttggtctttgtttattcatttagaccctgcaagttgattctcattaattgtcagattccactaccctttcttcctcatagatagtaattaccaatgtaactaagtatttgtgttctgatatctgaggccagtaactattaatatctagttctcagagcatttggaaaggttatcttaaatggctacctaaattgaaatccttttcagaaaaaatataattgcaagtaggtaggactggcctaaattgtctaatgtaataaagtcagacaaaatgcatactttatagtttcaagattttcagtatataaaatctgtccattcccattaaaaagtggaagattttaaataatttctttacagatgttttatttaagcaggtagctcaatctactaatgttgtttgatctgtgtttgttatactggttgtaattaatttttttaattcatgaactagcagaaaatttattaaattaactattaactacattcaccttgtaaattactgtataaaacttgttgacaatgcactgactttagaaagatgttaatgtacataaatagagtgtaaataaaatagtgttgatgtaccgaaatatgaactgtataaaaagtattggtaattgtatatggggtgtacctgtttatctgtaactagtatacaaacaaattaaatactgtggatgcctccatgtgccgtttttcctcatacaagtaaacacagaaagaca

SEQ ID NO: 316225 - DNA, 666 bp, Homo sapiens
cggagaacactggttgtgcagttgaggcacagggtctagggccagacagacgtgggttccacccttgtgtttcacttgacgggagactctgagttagctatggagcctctctaaggttcatctgtaaaatgagaataggacttcacaagcctcctgtgaggatcacagaacatcactgcaaatgacagggcgtggggcaccagggggaccatgagactgagctcctgagtgagccgcttgcaaacaccatgtgaggagagcggagctcaggcggagggacatgccagtgggagatcacagggtggaaagtagctggtggtattcagccggtgtgggacaggtgtgctgagtaaaagggataattttacaggacgaggtcagtgagggaagcagagctgatcatgtccctctggagggcagtgaatgtaacccagcaaaaattagtgaaggaggaccaggcaccgtggctaacgcctgtaatcccagtcctttgggaggccaaggcgggtggatcaactgaggtctggagttcgagaccagcctggccaaaatggtgacaccccatctctactaaaaatacaaaaaatcagctgggcttggtggcacacgcctgtattcccagctactcgggtggctgaggcaggagaattgcttgaacccagaagg

SEQ ID NO: 316226 - DNA, 589 bp, Homo sapiens
taccagcctcctcagcaacgcacgtccatcaggcctggcctcagtggccagccacattgatgtcacactggaattgttaccccagagagggcgaagagataggctatctccccacctcccaccctactccccactatattcccgttttgaccacctcagcccctcagctgccccctctcactttggccaatcccaggcaccaatcagacttcctcctccacctggagcccctagcatttccttgtcccctcttccccaaaacctctgtaaagggtacgagagggaccccctgccgagccgctgcattggagggaacgtgacaggcaggtgtggaatagggacttctcttccggtcagagcaagggtcgtccgaaaccaaaacaaccctcttcccttcatctcgccccggatccaaagtctgggggctaggctggggcgggagtggcacggagatgtagggcgcccctttaagctgcgcacagaacgaaagaactcgttttttctttaagtgagtgtgcttgggtgacgcttagggcgccctccagcagtgcgcgcaggaaagcagcactgaggctccgagtcgctgatt

SEQ ID NO: 316227 - DNA, 227 bp, Homo sapiens
  misc_feature (120)..(120): n is a, c, g, or t
gttggaaagccctgtattaagttttgagaatgtctcagttttatttagacaagccctttacaaaggctaaaagttcacttgtttaaagcacaacaagaccttgaaaggtcaataatattntaccatcctctccccaccctccctatcggggtacttcactgtttcttttctacttgtgtatactcgagaaagggaagatggttaataaaagggatttgtgctgctga

SEQ ID NO: 316228 - DNA, 868 bp, Homo sapiens
taggttctccatttggatctcggcattttgatatgaaacttattagggcatgccgtctcattgaggactgtgcttgtcctctgcgtgcgatggtctgtggtggctctcctcctcacccagccagctcctcagagacctggacagctgcactagtgaccctgtggctgtggcctggcttgctttgtggacaggagtctgaggacgggcattgcctcagtcctcaggggttttgtggacattaacaagtaaaggattaaggtgactctgacatagggtcttccccaaggtcaggcacagaggaggtggcatccatgggacttagcatgttgtagaaacagagcatattgggacaaaagggacgttgaagatcacctggaatcctttagcgtccatccccatacattgggaccgacctagttcaatgaatctaagaagcagaagctggttggaggctggctgggcctctgtccagtccccagatggataaactgccttttctcacatcccctcttggtgcctgatcttctctgcccccggggccagacccactgtgctgttttctgtcagtctgtggcacagcaccaagctctgccagcaccagtccctgacagggctaggaggacagcctggtcagcagggctgcagtcccccagtgccgtgtttcgggggtcaagggatgtaagtggagtcattgcacagagacagaccagtcaggagaaggagctggaatctggcctcttgtcctaacctcaggagccccctcccatcctctccccaccctccctatcggggtacttcactgtttcttttctacttgtgtatactcgagaaagggaagatggttaataaaagggatttgtgctgctga

SEQ ID NO: 316229 - DNA, 764 bp, Homo sapiens
taccagcctcctcagcaacgcacgtccatcaggcctggcctcagtggccagccacattgatgtcacactggaattgttaccccagagagggcgaagagataggctatctccccacctcccaccctactccccactatattcccgttttgaccacctcagcccctcagctgccccctctcactttggccaatcccaggcaccaatcagacttcctcctccacctggagcccctagcatttccttgtcccctcttccccaaaacctctgtaaagggtacgagagggaccccctgccgagccgcccgccactcagggcagtccgatctaagaagcagaagctggttggaggctggctgggcctctgtccagtccccagatggataaactgccttttctcacatcccctcttggtgcctgatcttctctgcccccggggccagacccactgtgctgttttctgtcagtctgtggcacagcaccaagctctgccagcaccagtccctgacagggctaggaggacagcctggtcagcagggctgcagtcccccagtgccgtgtttcgggggtcaagggatgtaagtggagtcattgcacagagacagaccagtcaggagaaggagctggaatctggcctcttgtcctaacctcaggagccccctcccatcctctccccaccctccctatcggggtacttcactgtttcttttctacttgtgtatactcgagaaagggaagatggttaataaaagggatttgtgctgctga

SEQ ID NO: 316230 - DNA, 1046 bp, Homo sapiens
gaggtaggctgcaaatgattctcctatttctttccctgagttcagaacataggaattagattgatagacatcaacatacccgctttattgctgactcatgacaactaatgggaagacatggctcagatgtgcagccacagtgagcttctgaacatttcttctcagactaagctcttacacacagttgcagttgaaagaaagaattgcttgacatggccacaggagcaggcagcttcctgcagacatgacagtcaacgcaaactcatgtcactgtgggcagacacatgtttgcaaagagactcagagccaaacaagcacactcaatgtgctttgcccaaatttacccattaggtaaatcttccctcctcccaagaagaaagtggagagagcatgagtcctcacatggaaacttgaagtcagggaaatgaaggctcaccaattatttgtgcatgggtttaagttttccttgaaattaagttcaggtttgtctttgtgtgtaccaattaatgacaagaggttagatagaagtatgctagatggcaaagagaaatatgttttgtgtcttcaattttgctaaaaataacccagaacatggataattcatttattaattgattttggtaagccaagtcctatttggagaaaattaatagtttttctaaaaaagaattttctcaatatcacctggcttgataacatttttctccttcgagttcctttttctggagtttaacaaacttgttctttacaaatagattatattgactacctctcactgatgttatgatattagtttctattgcttactttgtatttctaattttaggattcacaatttagctggagaactattttttaacctgttgcacctaaacatgattgagctagaagacagttttaccatatgcatgcattttctctgagttatattttaaaatctatacatttctcctaaatatggaggaaatcactggcatcaaatgccagtctcagacggaagacctaaagcccatttctggcctggagctacttggctttgtgaccta

SEQ ID NO: 316231 - DNA, 3177 bp, Homo sapiens
gcaaaactgaaagccggaccccaggccgccgcgctgccgcccggcctccccgccagcgcgccaccatgggcagtcccggtttccccttgtaaagatggcggtgagggatcgctgcaacctttagactaatgactgtccgaaacatcgcctccatctgtaatatgggcaccaatgcctctgctctggaaaaagacattggtccagagcagtttccaatcaatgaacactatttcggattggtcaattttggaaacacatgctactgtaactccgtgcttcaggcattgtacttctgccgtccattccgggagaatgtgttggcatacaaggcccagcaaaagaagaaggaaaacttgctgacgtgcctggcggaccttttccacagcattgccacacagaagaagaaggttggcgtcatcccaccaaagaagttcatttcaaggctgagaaaagagaatgatctctttgataactacatgcagcaggatgctcatgaatttttaaattatttgctaaacactattgcggacatccttcaggaggagaagaaacaggaaaaacaaaatggaaaattaaaaaatggcaacatgaacgaacctgcggaaaataataaaccagaactcacctgggtccatgagatttttcagggaacgcttaccaatgaaactcgatgcttgaactgtgaaactgttagtagcaaagatgaagattttcttgacctttctgttgatgtggagcagaatacatccattacccactgtctaagagacttcagcaacacagaaacactgtgtagtgaacaaaaatattattgtgaaacatgctgcagcaaacaagaagcccagaaaaggatgagggtaaaaaagctgcccatgatcttggccctgcacctaaagcggttcaagtacatggagcagctgcacagatacaccaagctgtcttaccgtgtggtcttccctctggaactccggctcttcaacacctccagtgatgcagtgaacctggaccgcatgtatgacttggttgcggtggtcgttcactgtggcagtggtcctaatcgtgggcattatatcactattgtgaaaagtcacggcttctggcttttgtttgatgatgacattgtagagaaaatagatgctcaagctattgaagaattctatggcctgacgtcagatatatcaaaaaattcagaatctggatatattttattctatcagtcaagagagtaactgaaagacctgcgggactgattcacgtggggagaatgttcacagcactgtcacccggcttctccgcaggctttcctcttccccagtggcccactaatggtatcactccgagtctcaatggtctggctgtgttagactctctccttttgtgtttttacatgcagcactactcttggttttatttcagtctgacatagagttaactgcaatcagattgtagtctgatttatatgaataacggttgctaattttaggactgggtgaaagctatgccattcattatgtctggctgtattagaatgacatttcctatgaatgtctacggtctgttttaggtgtttgctaaacttctatggcttccagggtcttcttacaatgcattcctttaacttgtccctggaagcattgctacccattttcagcttctctgcctctcttctgatacaaggacagaagaattgggtagatattcaccttttaggggtgcaagtatagctttaagtttgtgcaagtgaaaatgttgaaaagtgagtaacctcgatattaaaatcatccttgacatgaaacagggtgaagagaagctgtccgtggcggctggtgttggctggcattggcactgggctgtgctgacctagccattacaattccaggggctaagaaggctcagggcagacaaagtcaagaggaggaagtttttgtggacaatgaaaagttattttcgtacctttctaccaaaaccaagtttcaggaaaataactctatgttgtttattttcagtgacacttatgtaaggccctgtgagttgtatttatcctgtatccggcactgctaagcttttcaaggtatctttccaatcctgctgatgtggcagtcaatggctgcagggctggcaaacctccccttagccagtcagcacggcattgttccttatcaggaataacaaaggtactacatctttccagccatcagcacgttgtacaacttaactttttaacatagtccgtctgtttactgaggcactggcgagtcccagggctgatacagaaccttccctagagggaataccagagttagctgggtatagaggtggctcaaaggaagtgtccgtgggcagggggaggaatgaacaaaatggcgctgtttctttggctcagactcctagaatgcttgacaagacagaatttttttggaagaacctcatctcactatagttacttttttcacttttgttatatatgtatttattagagcatttgaatattggtacctttaaaagggtcatttggtgttttgctgttgagctggtttttgagtcatagatcttggcttcctttagaagccacttaacttccatacactataataaactgtgaacatatttttgttacctaatgcatccactgatgaacatgcaaactttgggcataatgtgaactaaaattgaaatggaaaatgttagtggccattttgcaacaatgaagaggatagcactttatctagatgaaaactggatttcttatctttgaaatatcttgaactgtttattgctcagaacttaagtaagcatgccaacatttcgtttgtttatgcttgaagtgaaatgttttacttttcactggagaagacaaaacagggtgatcttcatgttattgttttatacaagtgatggaaatgtaccttgccttgtttagaggcaatttcacatttataaatatttttttttcctccatgaaacttacgcagtaatcactacctggaaggtgagttttgatctctttttaaggagaggcactttccaactgaaggtgattgatgtagggaaatgtttgtactatatagaatccatatatttgactgcaagttacaaagttttaagaacatgatggttggtctctaatatatttggaactgattcataagaaaagttattaaaattatctttgaaaca

SEQ ID NO: 316232 - DNA, 4693 bp, Homo sapiens
gcaaaactgaaagccggaccccaggccgccgcgctgccgcccggcctccccgccagcgcgccaccatgggcagtcccggtttccccttgtaaagatggcggtgagggatcgctgcaacctttagactaatgactgtccgaaacatcgcctccatctgtaatatgggcaccaatgcctctgctctggaaaaagacattggtccagagcagtttccaatcaatgaacactatttcggattggtcaattttggaaacacatgctactgtaactccgtgcttcaggcattgtacttctgccgtccattccgggagaatgtgttggcatacaaggcccagcaaaagaagaaggaaaacttgctgacgtgcctggcggaccttttccacagcattgccacacagaagaagaaggttggcgtcatcccaccaaagaagttcatttcaaggctgagaaaagagaatgatctctttgataactacatgcagcaggatgctcatgaatttttaaattatttgctaaacactattgcggacatccttcaggaggagaagaaacaggaaaaacaaaatggaaaattaaaaaatggcaacatgaacgaacctgcggaaaataataaaccagaactcacctgggtccatgagatttttcagggaacgcttaccaatgaaactcgatgcttgaactgtgaaactgttagtagcaaagatgaagattttcttgacctttctgttgatgtggagcagaatacatccattacccactgtctaagagacttcagcaacacagaaacactgtgtagtgaacaaaaatattattgtgaaacatgctgcagcaaacaagaagcccagaaaaggatgagggtaaaaaagctgcccatgatcttggccctgcacctaaagcggttcaagtacatggagcagctgcacagatacaccaagctgtcttaccgtgtggtcttccctctggaactccggctcttcaacacctccagtgatgcagtgaacctggaccgcatgtatgacttggttgcggtggtcgttcactgtggcagtggtcctaatcgtgggcattatatcactattgtgaaaagtcacggcttctggcttttgtttgatgatgacattgtagagaaaatagatgctcaagctattgaagaattctatggcctgacgtcagatatatcaaaaaattcagaatctggatatattttattctatcagtcaagagagtaactgaaagacctgcgggactgattcacgtggggagaatgttcacagcactgtcacccggcttctccgcaggctttcctcttccccagtggcccactaatggtatcactccgagtctcaatggtctggctgtgttagactctctccttttgtgtttttacatgcagcactactcttggttttatttcagtctgacatagagttaactgcaatcagattgtagtctgatttatatgaataacggttgctaattttaggactgggtgaaagctatgccattcattatgtctggctgtattagaatgacatttcctatgaatgtctacggtctgttttaggtgtttgctaaacttctatggcttccagggtcttcttacaatgcattcctttaacttgtccctggaagcattgctacccattttcagcttctctgcctctcttctgatacaaggacagaagaattgggtagatattcaccttttaggggtgcaagtatagctttaagtttgtgcaagtgaaaatgttgaaaagtgagtaacctcgatattaaaatcatccttgacatgaaacagggtgaagagaagctgtccgtggcggctggtgttggctggcattggcactgggctgtgctgacctagccattacaattccaggggctaagaaggctcagggcagacaaagtcaagaggaggaagtttttgtggacaatgaaaagttattttcgtacctttctaccaaaaccaagtttcaggaaaataactctatgttgtttattttcagtgacacttatgtaaggccctgtgagttgtatttatcctgtatccggcactgctaagcttttcaaggtatctttccaatcctgctgatgtggcagtcaatggctgcagggctggcaaacctccccttagccagtcagcacggcattgttccttatcaggaataacaaaggtactacatctttccagccatcagcacgttgtacaacttaactttttaacatagtccgtctgtttactgaggcactggcgagtcccagggctgatacagaaccttccctagagggaataccagagttagctgggtatagaggtggctcaaaggaagtgtccgtgggcagggggaggaatgaacaaaatggcgctgtttctttggctcagactcctagaatgcttgacaagacagaatttttttggaagaacctcatctcactatagttacttttttcacttttgttatatatgtatttattagagcatttgaatattggtacctttaaaagggtcatttggtgttttgctgttgagctggtttttgagtcatagatcttggcttcctttagaagccacttaacttccatacactataataaactgtgaacatatttttgttacctaatgcatccactgatgaacatgcaaactttgggcataatgtgaactaaaattgaaatggaaaatgttagtggccattttgcaacaatgaagaggatagcactttatctagatgaaaactggatttcttatctttgaaatatcttgaactgtttattgctcagaacttaagtaagcatgccaacatttcgtttgtttatgcttgaagtgaaatgttttacttttcactggagaagacaaaacagggtgatcttcatgttattgttttatacaagtgatggaaatgtaccttgccttgtttagaggcaatttcacatttataaatatttttttttcctccatgaaacttacgcagtaatcactacctggaaggtgagttttgatctctttttaaggagaggcactttccaactgaaggtgattgatgtagggaaatgtttgtactatatagaatccatatatttgactgcaagttacaaagttttaagaacatgatggttggtctctaatatatttggaactgattcataagaaaagttattaaaattatctttgaaacacctcttgaagctaatttattagaaaaaatatttcagttggaaggctgtagaagtaatgtttaaatgctaagtcataagttcaggatatttcttttctatttggttgtgcaaaatgtttttcccagttatttaatcgaagtaattccttttaatagaaagagtcagttaaaattcagcattcatggatagatttttggaacgaaaaagggtaagtataagaaaatattgcaaacacattaaaacagttgtatggtgcaggaaaagaagattggaaaaagaccaaaacacacttctccagcaacactccatcagctttttaaaatttagagctatctgctaattttttccctcttccttctcaataaatgaaacaaacactgggcagctgcaggtttctcccaatcatgtctctttatgtaaagacagtaacatgcaaacacttttagtttacatccctcattcacagtgtaaagcaggaaatggtgtgggagatgtgagaccattctgaggtcagcgatagcccaaaggctctgcagtattccctccaatggccaaggattccgtgtgtcatctgcaggagtgagtaggcctgctgtatttcttgtaactgctgggtgttacaaaataagttacaatgttttacactttaaaaaaaaaacagaaggaacatttgctttattggttacttactagtttagcctctaggttatggcacagcatgctaaaaaatcatgtgtttaaaagtaaatgttggtaaaatgctggcatctggtcctattgtgttgatgcattttcacttctgtggtcataggaaatggactggtctaaagagagtgaggcacaacacaagcagggcattagtttgaataggaagtcaatcatatttggttttatggcctggtgtattttgggtttaagataaaatagggaaaaatgtcagaaatgatccctatgcatttattttcatggatacccttaatttcatgggcatgcctaataatgatctatgttctaactggagcttagggcttattttagatattggagtgtagctttattacagatggattttatctttcaacattgcattttgatcaactttgtatattcacgtgtattaaaatattgtgcactaaatgttttgcccttgtttgctattatatggtcaaggcatttatcagcactattgtaatgaactcatgtaagtggcatgggtcagggaaaattatttcctacttttctgcctaattaaatttctgttttccagtattacattaatttatttttggcttccatttctgtataaccaaaatagttactgtatttgtgtggcattcctattattttgttgctaaaaatattgtagtttttatttaaaataatctgtaccttaattttttaaaatgtaaccaattcaagcactttaagcaataatgtcaatcttgtgaaattttaatcagtttaacaccctgcctctaaaattgtttgcaaaaaataaataaatgaataaaatggg

SEQ ID NO: 316233 - DNA, 5461 bp, Homo sapiens
gcaaaactgaaagccggaccccaggccgccgcgctgccgcccggcctccccgccagcgcgccaccatgggcagtcccggtttccccttgtaaagatggcggtgagggatcgctgcaacctttagactaatgactgtccgaaacatcgcctccatctgtaatatgggcaccaatgcctctgctctggaaaaagacattggtccagagcagtttccaatcaatgaacactatttcggattggtcaattttggaaacacatgctactgtaactccgtgcttcaggcattgtacttctgccgtccattccgggagaatgtgttggcatacaaggcccagcaaaagaagaaggaaaacttgctgacgtgcctggcggaccttttccacagcattgccacacagaagaagaaggttggcgtcatcccaccaaagaagttcatttcaaggctgagaaaagagaatgatctctttgataactacatgcagcaggatgctcatgaatttttaaattatttgctaaacactattgcggacatccttcaggaggagaagaaacaggaaaaacaaaatggaaaattaaaaaatggcaacatgaacgaacctgcggaaaataataaaccagaactcacctgggtccatgagatttttcagggaacgcttaccaatgaaactcgatgcttgaactgtgaaactgttagtagcaaagatgaagattttcttgacctttctgttgatgtggagcagaatacatccattacccactgtctaagagacttcagcaacacagaaacactgtgtagtgaacaaaaatattattgtgaaacatgctgcagcaaacaagaagcccagaaaaggatgagggtaaaaaagctgcccatgatcttggccctgcacctaaagcggttcaagtacatggagcagctgcacagatacaccaagctgtcttaccgtgtggtcttccctctggaactccggctcttcaacacctccagtgatgcagtgaacctggaccgcatgtatgacttggttgcggtggtcgttcactgtggcagtggtcctaatcgtgggcattatatcactattgtgaaaagtcacggcttctggcttttgtttgatgatgacattgtagagaaaatagatgctcaagctattgaagaattctatggcctgacgtcagatatatcaaaaaattcagaatctggatatattttattctatcagtcaagagagtaactgaaagacctgcgggactgattcacgtggggagaatgttcacagcactgtcacccggcttctccgcaggctttcctcttccccagtggcccactaatggtatcactccgagtctcaatggtctggctgtgttagactctctccttttgtgtttttacatgcagcactactcttggttttatttcagtctgacatagagttaactgcaatcagattgtagtctgatttatatgaataacggttgctaattttaggactgggtgaaagctatgccattcattatgtctggctgtattagaatgacatttcctatgaatgtctacggtctgttttaggtgtttgctaaacttctatggcttccagggtcttcttacaatgcattcctttaacttgtccctggaagcattgctacccattttcagcttctctgcctctcttctgatacaaggacagaagaattgggtagatattcaccttttaggggtgcaagtatagctttaagtttgtgcaagtgaaaatgttgaaaagtgagtaacctcgatattaaaatcatccttgacatgaaacagggtgaagagaagctgtccgtggcggctggtgttggctggcattggcactgggctgtgctgacctagccattacaattccaggggctaagaaggctcagggcagacaaagtcaagaggaggaagtttttgtggacaatgaaaagttattttcgtacctttctaccaaaaccaagtttcaggaaaataactctatgttgtttattttcagtgacacttatgtaaggccctgtgagttgtatttatcctgtatccggcactgctaagcttttcaaggtatctttccaatcctgctgatgtggcagtcaatggctgcagggctggcaaacctccccttagccagtcagcacggcattgttccttatcaggaataacaaaggtactacatctttccagccatcagcacgttgtacaacttaactttttaacatagtccgtctgtttactgaggcactggcgagtcccagggctgatacagaaccttccctagagggaataccagagttagctgggtatagaggtggctcaaaggaagtgtccgtgggcagggggaggaatgaacaaaatggcgctgtttctttggctcagactcctagaatgcttgacaagacagaatttttttggaagaacctcatctcactatagttacttttttcacttttgttatatatgtatttattagagcatttgaatattggtacctttaaaagggtcatttggtgttttgctgttgagctggtttttgagtcatagatcttggcttcctttagaagccacttaacttccatacactataataaactgtgaacatatttttgttacctaatgcatccactgatgaacatgcaaactttgggcataatgtgaactaaaattgaaatggaaaatgttagtggccattttgcaacaatgaagaggatagcactttatctagatgaaaactggatttcttatctttgaaatatcttgaactgtttattgctcagaacttaagtaagcatgccaacatttcgtttgtttatgcttgaagtgaaatgttttacttttcactggagaagacaaaacagggtgatcttcatgttattgttttatacaagtgatggaaatgtaccttgccttgtttagaggcaatttcacatttataaatatttttttttcctccatgaaacttacgcagtaatcactacctggaaggtgagttttgatctctttttaaggagaggcactttccaactgaaggtgattgatgtagggaaatgtttgtactatatagaatccatatatttgactgcaagttacaaagttttaagaacatgatggttggtctctaatatatttggaactgattcataagaaaagttattaaaattatctttgaaacacctcttgaagctaatttattagaaaaaatatttcagttggaaggctgtagaagtaatgtttaaatgctaagtcataagttcaggatatttcttttctatttggttgtgcaaaatgtttttcccagttatttaatcgaagtaattccttttaatagaaagagtcagttaaaattcagcattcatggatagatttttggaacgaaaaagggtaagtataagaaaatattgcaaacacattaaaacagttgtatggtgcaggaaaagaagattggaaaaagaccaaaacacacttctccagcaacactccatcagctttttaaaatttagagctatctgctaattttttccctcttccttctcaataaatgaaacaaacactgggcagctgcaggtttctcccaatcatgtctctttatgtaaagacagtaacatgcaaacacttttagtttacatccctcattcacagtgtaaagcaggaaatggtgtgggagatgtgagaccattctgaggtcagcgatagcccaaaggctctgcagtattccctccaatggccaaggattccgtgtgtcatctgcaggagtgagtaggcctgctgtatttcttgtaactgctgggtgttacaaaataagttacaatgttttacactttaaaaaaaaaacagaaggaacatttgctttattggttacttactagtttagcctctaggttatggcacagcatgctaaaaaatcatgtgtttaaaagtaaatgttggtaaaatgctggcatctggtcctattgtgttgatgcattttcacttctgtggtcataggaaatggactggtctaaagagagtgaggcacaacacaagcagggcattagtttgaataggaagtcaatcatatttggttttatggcctggtgtattttgggtttaagataaaatagggaaaaatgtcagaaatgatccctatgcatttattttcatggatacccttaatttcatgggcatgcctaataatgatctatgttctaactggagcttagggcttattttagatattggagtgtagctttattacagatggattttatctttcaacattgcattttgatcaactttgtatattcacgtgtattaaaatattgtgcactaaatgttttgcccttgtttgctattatatggtcaaggcatttatcagcactattgtaatgaactcatgtaagtggcatgggtcagggaaaattatttcctacttttctgcctaattaaatttctgttttccagtattacattaatttatttttggcttccatttctgtataaccaaaatagttactgtatttgtgtggcattcctattattttgttgctaaaaatattgtagtttttatttaaaataatctgtaccttaattttttaaaatgtaaccaattcaagcactttaagcaataatgtcaatcttgtgaaattttaatcagtttaacaccctgcctctaaaattgtttgcaaaaaataaataaatgaataaaatgggaattctctttctagagaattatatccgggtaatgctacacacatggacttaaaatcctttttataaagtgtgagtcagtggcaggtcttatgtccaagtaattattacaaacaattttgaagcagtggaaatgtacagaacattctgatcattataatatataaaggcagtattactctcaaggttgataaaaatcaatgttctggagataactcatcactttttttgagtgaaaaagatcaacagaatttaattcaggaaatggtatctggagaatagcaaattgagaatatcagtgaaaagaatttagggatagttaactaggcatcacagtgaatttatttttggggactttgcatataaaatccttttaaccagttatgaaatgaaagatccattccccaaataagaaggcagcttccagtatctggtttctaggaaggagtaggactgtgattggtccctggtgccctgacttctgggcctgtttctgagccatgggggaccccccagcttcagaaatactcacgtgggttcacaccactccctgccccagaaggagggcaggcacaggtccatgccatgtggcctcagtgaagcctacagtaactatgggtagggctgcttttccctgtcaatcacccagggcacctgtgggtggacagaagattgtcatcggaatacatgcttgggcccaattatgggaataaaacctcatagaccaagagcagggaatgtgccagtaagtgttgagtctcccagctgctg

SEQ ID NO: 316234 - DNA, 4752 bp, Homo sapiens
gcaaaactgaaagccggaccccaggccgccgcgctgccgcccggcctccccgccagcgcgccaccatgggcagtcccggtttccccttgtaaagatggcggtgagggatcgctgcaacctttagactaatgactgtccgaaacatcgcctccatctgtaatatgggcaccaatgcctctgctctggaaaaagacattggtccagagcagtttccaatcaatgaacactatttcggattggtcaattttggaaacacatgctactgtaactccgtgcttcaggcattgtacttctgccgtccattccgggagaatgtgttggcatacaaggcccagcaaaagaagaaggaaaacttgctgacgtgcctggcggaccttttccacagcattgccacacagaagaagaaggttggcgtcatcccaccaaagaagttcatttcaaggctgagaaaagagaatgatctctttgataactacatgcagcaggatgctcatgaatttttaaattatttgctaaacactattgcggacatccttcaggaggagaagaaacaggaaaaacaaaatggaaaattaaaaaatggcaacatgaacgaacctgcggaaaataataaaccagaactcacctgggtccatgagatttttcagggaacgcttaccaatgaaactcgatgcttgaactgtgaaactgttagtagcaaagatgaagattttcttgacctttctgttgatgtggagcagaatacatccattacccactgtctaagagacttcagcaacacagaaacactgtgtagtgaacaaaaatattattgtgaaacatgctgcagcaaacaagaagcccagaaaaggatgagggtaaaaaagctgcccatgatcttggccctgcacctaaagcggttcaagtacatggagcagctgcacagatacaccaagctgtcttaccgtgtggtcttccctctggaactccggctcttcaacacctccagtgatgcagtgaacctggaccgcatgtatgacttggttgcggtggtcgttcactgtggcagtggtcctaatcgtgggcattatatcactattgtgaaaagtcacggcttctggcttttgtttgatgatgacattgtagaggttggtttgcagattattctccagtagtcatagagcatcagtagtatttcggagaatgtaaaatagatgctcaagctattgaagaattctatggcctgacgtcagatatatcaaaaaattcagaatctggatatattttattctatcagtcaagagagtaactgaaagacctgcgggactgattcacgtggggagaatgttcacagcactgtcacccggcttctccgcaggctttcctcttccccagtggcccactaatggtatcactccgagtctcaatggtctggctgtgttagactctctccttttgtgtttttacatgcagcactactcttggttttatttcagtctgacatagagttaactgcaatcagattgtagtctgatttatatgaataacggttgctaattttaggactgggtgaaagctatgccattcattatgtctggctgtattagaatgacatttcctatgaatgtctacggtctgttttaggtgtttgctaaacttctatggcttccagggtcttcttacaatgcattcctttaacttgtccctggaagcattgctacccattttcagcttctctgcctctcttctgatacaaggacagaagaattgggtagatattcaccttttaggggtgcaagtatagctttaagtttgtgcaagtgaaaatgttgaaaagtgagtaacctcgatattaaaatcatccttgacatgaaacagggtgaagagaagctgtccgtggcggctggtgttggctggcattggcactgggctgtgctgacctagccattacaattccaggggctaagaaggctcagggcagacaaagtcaagaggaggaagtttttgtggacaatgaaaagttattttcgtacctttctaccaaaaccaagtttcaggaaaataactctatgttgtttattttcagtgacacttatgtaaggccctgtgagttgtatttatcctgtatccggcactgctaagcttttcaaggtatctttccaatcctgctgatgtggcagtcaatggctgcagggctggcaaacctccccttagccagtcagcacggcattgttccttatcaggaataacaaaggtactacatctttccagccatcagcacgttgtacaacttaactttttaacatagtccgtctgtttactgaggcactggcgagtcccagggctgatacagaaccttccctagagggaataccagagttagctgggtatagaggtggctcaaaggaagtgtccgtgggcagggggaggaatgaacaaaatggcgctgtttctttggctcagactcctagaatgcttgacaagacagaatttttttggaagaacctcatctcactatagttacttttttcacttttgttatatatgtatttattagagcatttgaatattggtacctttaaaagggtcatttggtgttttgctgttgagctggtttttgagtcatagatcttggcttcctttagaagccacttaacttccatacactataataaactgtgaacatatttttgttacctaatgcatccactgatgaacatgcaaactttgggcataatgtgaactaaaattgaaatggaaaatgttagtggccattttgcaacaatgaagaggatagcactttatctagatgaaaactggatttcttatctttgaaatatcttgaactgtttattgctcagaacttaagtaagcatgccaacatttcgtttgtttatgcttgaagtgaaatgttttacttttcactggagaagacaaaacagggtgatcttcatgttattgttttatacaagtgatggaaatgtaccttgccttgtttagaggcaatttcacatttataaatatttttttttcctccatgaaacttacgcagtaatcactacctggaaggtgagttttgatctctttttaaggagaggcactttccaactgaaggtgattgatgtagggaaatgtttgtactatatagaatccatatatttgactgcaagttacaaagttttaagaacatgatggttggtctctaatatatttggaactgattcataagaaaagttattaaaattatctttgaaacacctcttgaagctaatttattagaaaaaatatttcagttggaaggctgtagaagtaatgtttaaatgctaagtcataagttcaggatatttcttttctatttggttgtgcaaaatgtttttcccagttatttaatcgaagtaattccttttaatagaaagagtcagttaaaattcagcattcatggatagatttttggaacgaaaaagggtaagtataagaaaatattgcaaacacattaaaacagttgtatggtgcaggaaaagaagattggaaaaagaccaaaacacacttctccagcaacactccatcagctttttaaaatttagagctatctgctaattttttccctcttccttctcaataaatgaaacaaacactgggcagctgcaggtttctcccaatcatgtctctttatgtaaagacagtaacatgcaaacacttttagtttacatccctcattcacagtgtaaagcaggaaatggtgtgggagatgtgagaccattctgaggtcagcgatagcccaaaggctctgcagtattccctccaatggccaaggattccgtgtgtcatctgcaggagtgagtaggcctgctgtatttcttgtaactgctgggtgttacaaaataagttacaatgttttacactttaaaaaaaaaacagaaggaacatttgctttattggttacttactagtttagcctctaggttatggcacagcatgctaaaaaatcatgtgtttaaaagtaaatgttggtaaaatgctggcatctggtcctattgtgttgatgcattttcacttctgtggtcataggaaatggactggtctaaagagagtgaggcacaacacaagcagggcattagtttgaataggaagtcaatcatatttggttttatggcctggtgtattttgggtttaagataaaatagggaaaaatgtcagaaatgatccctatgcatttattttcatggatacccttaatttcatgggcatgcctaataatgatctatgttctaactggagcttagggcttattttagatattggagtgtagctttattacagatggattttatctttcaacattgcattttgatcaactttgtatattcacgtgtattaaaatattgtgcactaaatgttttgcccttgtttgctattatatggtcaaggcatttatcagcactattgtaatgaactcatgtaagtggcatgggtcagggaaaattatttcctacttttctgcctaattaaatttctgttttccagtattacattaatttatttttggcttccatttctgtataaccaaaatagttactgtatttgtgtggcattcctattattttgttgctaaaaatattgtagtttttatttaaaataatctgtaccttaattttttaaaatgtaaccaattcaagcactttaagcaataatgtcaatcttgtgaaattttaatcagtttaacaccctgcctctaaaattgtttgcaaaaaataaataaatgaataaaatggg

SEQ ID NO: 316235 - DNA, 4812 bp, Homo sapiens
gcaaccactaatataaacacctcccatgtataggaaggctggagtgggaatccttaaccccgccccctgctcaggtcaatcccccacccaccgcccccactgtccctcccagtcttccttcccagaggagaaggctgggtatgaggaaactgctgtcttttcactggatcagacgtaaatattaactggacctctctttagattctttgctcaataatgaattgttttcagggcaccaatgcctctgctctggaaaaagacattggtccagagcagtttccaatcaatgaacactatttcggattggtcaatgagttgtccactgaattggggccaagcgttactgaagggtgtctggggaaagtttggaaacacatgctactgtaactccgtgcttcaggcattgtacttctgccgtccattccgggagaatgtgttggcatacaaggcccagcaaaagaagaaggaaaacttgctgacgtgcctggcggaccttttccacagcattgccacacagaagaagaaggttggcgtcatcccaccaaagaagttcatttcaaggctgagaaaagagaatgatctctttgataactacatgcagcaggatgctcatgaatttttaaattatttgctaaacactattgcggacatccttcaggaggagaagaaacaggaaaaacaaaatggaaaattaaaaaatggcaacatgaacgaacctgcggaaaataataaaccagaactcacctgggtccatgagatttttcagggaacgcttaccaatgaaactcgatgcttgaactgtgaaactgttagtagcaaagatgaagattttcttgacctttctgttgatgtggagcagaatacatccattacccactgtctaagagacttcagcaacacagaaacactgtgtagtgaacaaaaatattattgtgaaacatgctgcagcaaacaagaagcccagaaaaggatgagggtaaaaaagctgcccatgatcttggccctgcacctaaagcggttcaagtacatggagcagctgcacagatacaccaagctgtcttaccgtgtggtcttccctctggaactccggctcttcaacacctccagtgatgcagtgaacctggaccgcatgtatgacttggttgcggtggtcgttcactgtggcagtggtcctaatcgtgggcattatatcactattgtgaaaagtcacggcttctggcttttgtttgatgatgacattgtagagaaaatagatgctcaagctattgaagaattctatggcctgacgtcagatatatcaaaaaattcagaatctggatatattttattctatcagtcaagagagtaactgaaagacctgcgggactgattcacgtggggagaatgttcacagcactgtcacccggcttctccgcaggctttcctcttccccagtggcccactaatggtatcactccgagtctcaatggtctggctgtgttagactctctccttttgtgtttttacatgcagcactactcttggttttatttcagtctgacatagagttaactgcaatcagattgtagtctgatttatatgaataacggttgctaattttaggactgggtgaaagctatgccattcattatgtctggctgtattagaatgacatttcctatgaatgtctacggtctgttttaggtgtttgctaaacttctatggcttccagggtcttcttacaatgcattcctttaacttgtccctggaagcattgctacccattttcagcttctctgcctctcttctgatacaaggacagaagaattgggtagatattcaccttttaggggtgcaagtatagctttaagtttgtgcaagtgaaaatgttgaaaagtgagtaacctcgatattaaaatcatccttgacatgaaacagggtgaagagaagctgtccgtggcggctggtgttggctggcattggcactgggctgtgctgacctagccattacaattccaggggctaagaaggctcagggcagacaaagtcaagaggaggaagtttttgtggacaatgaaaagttattttcgtacctttctaccaaaaccaagtttcaggaaaataactctatgttgtttattttcagtgacacttatgtaaggccctgtgagttgtatttatcctgtatccggcactgctaagcttttcaaggtatctttccaatcctgctgatgtggcagtcaatggctgcagggctggcaaacctccccttagccagtcagcacggcattgttccttatcaggaataacaaaggtactacatctttccagccatcagcacgttgtacaacttaactttttaacatagtccgtctgtttactgaggcactggcgagtcccagggctgatacagaaccttccctagagggaataccagagttagctgggtatagaggtggctcaaaggaagtgtccgtgggcagggggaggaatgaacaaaatggcgctgtttctttggctcagactcctagaatgcttgacaagacagaatttttttggaagaacctcatctcactatagttacttttttcacttttgttatatatgtatttattagagcatttgaatattggtacctttaaaagggtcatttggtgttttgctgttgagctggtttttgagtcatagatcttggcttcctttagaagccacttaacttccatacactataataaactgtgaacatatttttgttacctaatgcatccactgatgaacatgcaaactttgggcataatgtgaactaaaattgaaatggaaaatgttagtggccattttgcaacaatgaagaggatagcactttatctagatgaaaactggatttcttatctttgaaatatcttgaactgtttattgctcagaacttaagtaagcatgccaacatttcgtttgtttatgcttgaagtgaaatgttttacttttcactggagaagacaaaacagggtgatcttcatgttattgttttatacaagtgatggaaatgtaccttgccttgtttagaggcaatttcacatttataaatatttttttttcctccatgaaacttacgcagtaatcactacctggaaggtgagttttgatctctttttaaggagaggcactttccaactgaaggtgattgatgtagggaaatgtttgtactatatagaatccatatatttgactgcaagttacaaagttttaagaacatgatggttggtctctaatatatttggaactgattcataagaaaagttattaaaattatctttgaaacacctcttgaagctaatttattagaaaaaatatttcagttggaaggctgtagaagtaatgtttaaatgctaagtcataagttcaggatatttcttttctatttggttgtgcaaaatgtttttcccagttatttaatcgaagtaattccttttaatagaaagagtcagttaaaattcagcattcatggatagatttttggaacgaaaaagggtaagtataagaaaatattgcaaacacattaaaacagttgtatggtgcaggaaaagaagattggaaaaagaccaaaacacacttctccagcaacactccatcagctttttaaaatttagagctatctgctaattttttccctcttccttctcaataaatgaaacaaacactgggcagctgcaggtttctcccaatcatgtctctttatgtaaagacagtaacatgcaaacacttttagtttacatccctcattcacagtgtaaagcaggaaatggtgtgggagatgtgagaccattctgaggtcagcgatagcccaaaggctctgcagtattccctccaatggccaaggattccgtgtgtcatctgcaggagtgagtaggcctgctgtatttcttgtaactgctgggtgttacaaaataagttacaatgttttacactttaaaaaaaaaacagaaggaacatttgctttattggttacttactagtttagcctctaggttatggcacagcatgctaaaaaatcatgtgtttaaaagtaaatgttggtaaaatgctggcatctggtcctattgtgttgatgcattttcacttctgtggtcataggaaatggactggtctaaagagagtgaggcacaacacaagcagggcattagtttgaataggaagtcaatcatatttggttttatggcctggtgtattttgggtttaagataaaatagggaaaaatgtcagaaatgatccctatgcatttattttcatggatacccttaatttcatgggcatgcctaataatgatctatgttctaactggagcttagggcttattttagatattggagtgtagctttattacagatggattttatctttcaacattgcattttgatcaactttgtatattcacgtgtattaaaatattgtgcactaaatgttttgcccttgtttgctattatatggtcaaggcatttatcagcactattgtaatgaactcatgtaagtggcatgggtcagggaaaattatttcctacttttctgcctaattaaatttctgttttccagtattacattaatttatttttggcttccatttctgtataaccaaaatagttactgtatttgtgtggcattcctattattttgttgctaaaaatattgtagtttttatttaaaataatctgtaccttaattttttaaaatgtaaccaattcaagcactttaagcaataatgtcaatcttgtgaaattttaatcagtttaacaccctgcctctaaaattgtttgcaaaaaataaataaatgaataaaatggg

SEQ ID NO: 316236 - DNA, 2018 bp, Homo sapiens
cagatacgaatcgagccggacccgcataggagcaacactccatcagctttttaaaatttagagctatctgctaattttttccctcttccttctcaataaatgaaacaaacactgggcagctgcaggtttctcccaatcatgtctctttatgtaaagacagtaacatgcaaacacttttagtttacatccctcattcacagtgtaaagcaggaaatggtgtgggagatgtgagaccattctgaggtcagcgatagcccaaaggctctgcagtattccctccaatggccaaggattccgtgtgtcatctgcaggagtgagtaggcctgctgtatttcttgtaactgctgggtgttacaaaataagttacaatgttttacactttaaaaaaaaaacagaaggaacatttgctttattggttacttactagtttagcctctaggttatggcacagcatgctaaaaaatcatgtgtttaaaagtaaatgttggtaaaatgctggcatctggtcctattgtgttgatgcattttcacttctgtggtcataggaaatggactggtctaaagagagtgaggcacaacacaagcagggcattagtttgaataggaagtcaatcatatttggttttatggcctggtgtattttgggtttaagataaaatagggaaaaatgtcagaaatgatccctatgcatttattttcatggatacccttaatttcatgggcatgcctaataatgatctatgttctaactggagcttagggcttattttagatattggagtgtagctttattacagatggattttatctttcaacattgcattttgatcaactttgtatattcacgtgtattaaaatattgtgcactaaatgttttgcccttgtttgctattatatggtcaaggcatttatcagcactattgtaatgaactcatgtaagtggcatgggtcagggaaaattatttcctacttttctgcctaattaaatttctgttttccagtattacattaatttatttttggcttccatttctgtataaccaaaatagttactgtatttgtgtggcattcctattattttgttgctaaaaatattgtagtttttatttaaaataatctgtaccttaattttttaaaatgtaaccaattcaagcactttaagcaataatgtcaatcttgtgaaattttaatcagtttaacaccctgcctctaaaattgtttgcaaaaaataaataaatgaataaaatgggaattctctttctagagaattatatccgggtaatgctacacacatggacttaaaatcctttttataaagtgtgagtcagtggcaggtcttatgtccaagtaattattacaaacaattttgaagcagtggaaatgtacagaacattctgatcattataatatataaaggcagtattactctcaaggttgataaaaatcaatgttctggagataactcatcactttttttgagtgaaaaagatcaacagaatttaattcaggaaatggtatctggagaatagcaaattgagaatatcagtgaaaagaatttagggatagttaactaggcatcacagtgaatttatttttggggactttgcatataaaatccttttaaccagttatgaaatgaaagatccattccccaaataagaaggcagcttccagtatctggtttctaggaaggagtaggactgtgattggtccctggtgccctgacttctgggcctgtttctgagccatgggggaccccccagcttcagaaatactcacgtgggttcacaccactccctgccccagaaggagggcaggcacaggtccatgccatgtggcctcagtgaagcctacagtaactatgggtagggctgcttttccctgtcaatcacccagggcacctgtgggtggacagaagattgtcatcggaatacatgcttgggcccaattatgggaataaaacctcatagaccaagagcagggaatgtgccagtaagtgttgagtctcccagctgctg

SEQ ID NO: 316237 - DNA, 834 bp, Homo sapiens
  misc_feature (741)..(741): n is a, c, g, or t
  misc_feature (744)..(744): n is a, c, g, or t
  misc_feature (756)..(756): n is a, c, g, or t
  misc_feature (784)..(784): n is a, c, g, or t
gcaaaactgaaagccggaccccaggccgccgcgctgccgcccggcctccccgccagcgcgccaccatgggcagtcccggtttccccttgtaaagatggcggtgagggatcgctgcaacctttagactaatgactgtccgaaacatcgcctccatctgtaatatgggcaccaatgcctctgctctggaaaaagacattggtccagagcagtttccaatcaatgaacactatttcggattggtcaattttggaaacacatgctactgtaactccgtgcttcaggcattgtacttctgccgtccattccgggagaatgtgttggcatacaaggcccagcaaaagaagaaggaaaacttgctgacgtgcctggcggaccttttccacagcattgccacacagaagaagaaggttggcgtcatcccaccaaagaagttcatttcaaggctgagaaaagagaatgatctctttgataactacatgcagcaggatgctcatgaatttttaaattatttgctaaacactattgcggacatccttcaggaggagaagaaacaggaaaaacaaaatggaaaattaaatcaggatgctgagggggaacaggattgctggccatgaattttaattgaatttttgacggggcaagctacgttacattatggcagaaaaaaagtgcaactgacatactacaaagagattttttaagtttaaaaaaagtttggatcttttggatttcttttttttnttngggtcttaatgngcttaaataacgctgaattataattagncacacaaataatgagagtttattttttttgctggctcactccaaatcagc

SEQ ID NO: 316238 - DNA, 180 bp, Homo sapiens
tatcttgcctgtgggcttgacacaggggttgctgggtgattgaattaacctctgacatcttctgggctgtgcaaaatgataagttcaaaaaaaaaatgcagccattagactccttctcattgtttcttccttgaagcctttgtaatctttcttaatgtggttaaattcaagttatttcca

SEQ ID NO: 316239 - DNA, 629 bp, Homo sapiens
tagagcaacagtggtgatttactcagaacaggaggaaaagccctgcattcaattttagatgaagttattttcaagcttttttcaactcctagtccagttataagaagtactgctacaaaactcctactgttgatggctgaatcccatcaggaaattttgattttactgagacaaagtacctgctacaaaggactcagacgtctactaagtaaacaggaaactgggactgaattcagtcaagaacttagacagcttgttggccttttaagcccaatggtctatcaggaagtagaagagcagaaactacatcaagcagcatgcttgattcaagcctattggaagggttttcagacaagaaagagattaaagaagcttccatctgctgtgattgctttgcagaggagtttcagatccaaacgatcaaagatgttgctggagataaataggcagaaggaagaagaggacctcaaattacaattgcaacttcaaagacagagagccatgagactttcccaagaattgtggctgagtatgctcaaagtagttcatccaggtcaagtggagaaacacaattgggaaatggaagagaaatcagcactgattatccagaaacattggagagggtacag

SEQ ID NO: 316240 - DNA, 695 bp, Homo sapiens
tagagcaacagtggtgatttactcagaacaggaggaaaagccctgcattcaattttagatgaagttattttcaagcttttttcaactcctagtccagttataagaagtactgctacaaaactcctactgttgatggctgaatcccatcaggaaattttgattttactgagacaaagtacctgctacaaaggactcagacgtctactaagtaaacaggaaactgggactgaattcagtcaagaacttagacagcttgttggccttttaagcccaatggtctatcaggaagtagaagagcagaaactacatcaagcagcatgcttgattcaagcctattggaagggttttcagacaagaaagagattaaagaagcttccatctgctgtgattgctttgcagaggagtttcaggtaaaaaaatttggtgaggggattgatgatcatagaatcttactagagtacagttgaattgaaatttaggtgatttttttttaatttcctagtatgtttcttgttatcttttcattttttttccatacgtttctgggtaccagcactccagtaaccagatgcactttcaaagcaaaggatgtaagacaggaatctgatgtgtcaaatatgcaatcctatccacttaataagatatttggggaggggccaagcctacaaagggagccaatgatagttatattatta

SEQ ID NO: 316241 - DNA, 940 bp, Homo sapiens
gctgaggatctcatcaccctaaatttattatgcagtaagtctgcctagtaattacaagattttgtaattatatcagtctttaagttgtaatgctttccccaaaatgtatcactattataatatctagttttatgcttataataaagcgacagtttctgtcataaacatctgctggtcgttttcttagtcctcttccttgttttcagatgggcactcatagtaacccatttagcagattgtacattctctcttttttttttttttttggaaactgagtttggctcttgtggcccaggtgtgaagtgcaagggggtgatctgggctcactgcaacctctgcctcccaggttcaagcgattctcctgcctcagcctcctgagtagctgggattacaggcgcacaccaccatgcccagctaatttttggtatttttagtaaagatggggttcaccatgttggccaggctggtctcgaactcctgaccttgtgatccacctgtctgggcctcccaaagtgctgggattacaggtgcgagccactgcacctggcctgtacattctttgaaaaggatatcataataaattattatatagtaaaaattaaccagactgttctaagaaatggaatgtaattagattaattaaattgtctggctaattgggtactaaaaccggaaaatccttgttgttcttgttcttgttaaaaatacatatgccaaaaataatagaaatgtccttttgtaattgaattttgtagcacttgaataagcatcaaggttttcctataggtatagaagatttggttgattatttgtgtgattcttttatgcataacctaaatggttatgtatacttgatgtcgagaatttgggaagtcctctaggacaagagtacgagatgatattataaattctgttatgagaaatgctatcaagggcaacc

SEQ ID NO: 316242 - DNA, 756 bp, Homo sapiens
aacatctttacacttagggtttgagtttctgtatctataaaaaagggtttggattaagtgatccctggcacttataaaatgttagggcttaatattattcatagatcgaggatagtttcattcttagtcgcctccttagtcactcttcctataccaatctgagaccattttacaatttagaaaagacaaataactggttgggttacttgatagtataataaccaagaaaaataattttagaaggaattaagtttgaaaccacatgttaacaaattctaccaaagtgggatttgcctgtgattaaagatgctgtaaacatttgggccagtagttataatttgaaaaatgtttatagccatatatataattttttatttaaatatacagtttcatcagtctattagtatttcattaagtctaagatgccatcagtggttagcaaacaccactgttttatgcactgctaagaaagaataaagggctgtgtgcagtggctcacacctgtgggacgccaaggcaggagcatcacttgaggccagaagttcaagaccaacctggtcaacattgtaagaccctgtctctacaaaaaaaaaaaagttaaaaattagctgggtgcggtggcacatgcctgtagttccagctactctggaggctaaggtgggaggattgctagagccacggtgttggaagctgcagtgagctgtgaccacaccactgcgctccagcctgggcaacagagtgagaccctgtttctaa

SEQ ID NO: 316243 - DNA, 433 bp, Homo sapiens
  misc_feature (45)..(45): n is a, c, g, or t
agggaccatgatgggaaaaaaccggaccatttttcccagagcccntttttaccctttgagtctagagagaagatgctaaggtactggacaatgatactgtatttgatttggggagtaaaaaacggggaaggaaatgaactttggcttttttccagtgggttattttccctttcaaggtgactgtgctgatttgtttgttttatcaattttatgcataatatgtgactgtaaaaccttatatatctcttaagtaactaaaaatcattgtctattatttaaagccaacaaaacagtgtaacagttttaagttcaataatgttaagtattgtatagaaatatattggaggcaaagttcagttgatgacaattgtgtatatgttactgatgctgtaaattatttttaataaagaaaattgtattatcaaaaaaaaat

SEQ ID NO: 316244 - DNA, 6263 bp, Homo sapiens
gcccccttcttcccccgctggccccctccccggagggataatatggtctccggcgatggacgccccaaaagcaggatacgcctttgagtaccttattgaaacattaaatgacagttcacataagaagttcttcgatgtatctaaacttggcaccaagtatgatgttctgccttactcaatacgggtcttgttggaagctgctgtacgaaattgtgatggctttttaatgaagaaggaagatgttatgaacattttagactggaaaaccaaacaaagcaatgttgaagtgccctttttccctgcccgtgttcttcttcaagattttactggaataccagcaatggtggattttgctgctatgagggaggcagtgaaaactcttggaggtgatcctgagaaagtccatcctgcttgtccgacagatcttacagttgaccattctttacaaattgacttcagtaaatgtgcaatacagaatgcaccaaatcctggaggtggtgacctgcagaaagcaggaaagctctctccacttaaagtgcagcctaagaagcttccctgcagaggccagactacctgccgaggatcttgtgattctggagaactaggccgaaactcaggaacattttcttcgcagattgagaatacacccatcctgtgtccttttcatttgcaaccagtgcctgaacctgaaacagtgttaaaaaatcaagaagtagaattcggcagaaatcgagagaggcttcagttttttaagtggagttcaagagtttttaagaatgtggcagtgatccctcctggaactggaatggctcatcaaataaacttagaatatttgtcaagagtggtttttgaagaaaaagacctcctcttcccagacagtgtagtcggcacagattcacacataacgatggtgaatggtttagggattctggggtggggggttggaggcattgaaacagaagcagttatgcttggtctgccagtttctcttactttaccagaggtggttggatgtgagttaactgggtcatcaaacccttttgttacatccatagatgttgttcttggtattacaaagcacctcaggcaagtaggagtggctggaaagtttgttgagttttttggaagtggagtttcacaattatctatagttgatcgaactacaatagcaaacatgtgtccggaatatggtgctatcctcagctttttccctgttgacaatgtgacattaaaacatttagaacatacaggttttagcaaagccaaactcgaatcaatggaaacataccttaaagctgtgaaattgtttcgaaatgaccagaattcttcaggagaacctgaatactcccaggtgatccagattaatctgaattcaatagttccatctgttagtggtccaaaaagacctcaggatagagttgctgtgacagatatgaaaagcgatttccaggcttgcttaaatgaaaaggttggatttaaaggcttccaaattgcagctgaaaaacaaaaggatattgtctccattcattatgaaggaagtgaatataagctgtctcatggatcagtggtcattgctgcagttatcagttgtaccaataattgcaatccatctgtcatgcttgctgcaggtcttttggctaaaaaggctgttgaagctggtctgcgtgttaaaccttatataagaacaagtttatctccaggcagtgggatggttacacattacctcagttcaagtggagtattaccatatctaagtaagcttggatttgaaatcgttggctatggatgttcaacttgtgtgggaaatacagcacccttatcagacgcagttttaaatgcagtaaaacagggtgatttggttacctgtggaattttatctggaaacaaaaattttgaaggtcgtctttgtgattgtgttcgtgccaattatcttgcctctccacccttagtggtagcttatgccatagcaggcacagtgaatatagatttccagacagaacctttaggtactgaccccaccggcaagaacatttacctgcatgatatttggcctagtcgagaagaagttcatcgagtagaggaagaacatgttatactatccatgtttaaagcattaaaagataaaatagaaatggggaataaacggtggaattccttagaagcaccggattcagttttgtttccatgggacttaaagtctacttatatcagatgcccttcattttttgataaacttaccaaagagccaattgcactccaggctattgaaaatgcccatgtcttattatatttgggagactctgtcacaacagatcatatatcacctgcaggaagtatcgctaggaatagtgctgccgctaagtatttgacaaacagaggccttacccctcgtgaattcaactcttacggagctcgaagaggtaatgatgctgtaatgacaagaggcacttttgcaaatatcaagctttttaataagtttattggaaaaccagctcctaaaacaattcattttccatcaggacagacgctagatgtatttgaggctgcagagctgtaccagaaagaaggtatcccactgattattttagcaggaaagaaatatggttcaggaaactccagagactgggctgccaaaggaccgtatttactgggtgtgaaagctgttttggctgaaagttatgaaaaaatacacaaagatcatttgattggaattggcatagctccacttcagttccttccaggagaaaatgcagattccttgggcctctccggtagagaaacattttctttaacatttcctgaagaactgtctcctggaattacattgaatatacagacaagcactggaaaagtattcagcgtgattgcttcgtttgaagatgatgtggaaataacattatacaaacatggaggattattaaactttgtggcacgaaaattctcatagtatctacttaccatagatacctttcataactggtaactgcaaagccttttgtgctggacccaggaatccttaccatggagcagcagatagtcccagtatactcacttatctcatccatggatgtaaatgatgatgaatcaacatagtaactgaaatgaaatcttcttgattttaaataatatacgaatggtgctattaatattgctaaaatcaacgtgtgaagtgtgttgtggaagagacctgtaagtatgggggggggcgatattttatcagaccattttgtaaataaaggcagaatttgtgttgaagattcttatatgaataaccttcctggatttgtttagttttgcaccaataaaactgtgtactactgtttgttggtttaagagtagcagattgaaatataagaagccagattagactctaaaattgtggccattggaatctcatttataaatggaccttttaagtatattaattcctcttcagaattgagctggacacatttggcattcttagtttgtcatataaccaggtttatccttagtctaactgcaagggatagaacctgccccaggtcacaatcattctgtccaatccagccaaggttccctccacatatgaagatggaccatggcaggatacaactgattgtgtggcaccatgtattagcagtgggaatatgtatcacatatgatgcagcctttcatatttcagcagtttgccactgtgactgtctggcaagcccccagatggcgttatattaattggattagattattttgctcaccttatgtaatactgtaacttcctataacctaatattttcggtatcattaaccaaaatttcacactcatagttgctaaagagaatgttattcaatcattaaactctgaactgatttcttctatacatttaaattatccaccctcaataatacgggtgctcaaccctatgcattttttaagtgttgctatttcttaattaaattgatttcctgtcattttgaatcatttatcacctgcgatgcatgattctattaattttgttatgttactgttttaaccaaagctgaccgtaaggataaaacacttaagttgttgctgagtactatatatcctcaatatgcatgtctgcccatcacatcaaatgttctgtcaacaagatgtttggtaattttttttaaaaaggttggaaaattaattatagaaggttctatactgtttttttaattaagaaactaaatctagcaggctaaaggttaattgtagtgattttttttcacatagatatctttctatgacctagttagttactgcaattcagaattagttcacattgcataaagaattacttgttgtaagcaaaatgctgaaactaccaaaccagtggatgaagaccactaagaactttgcacataatcatacaatcttttgaaaatattttgcaaatatgtgtttagacaataagatggactagagttcgacaaaatgatttctttatttaaattttgtataagtattttcttcgacactttcaaattatattgtgttcttgatatatgctgtatatttatttgttagtgcatgtgtttttaatttacatgaaaacatgagttaggagaaattacaggttgaaagatgaaatgcctgtatgtgctctgaagaaatggtaattccagattgtgcagggggaaacaaatctattttgttttgttttgttttttgagacggagtcttgccctgtggctgggctggagtgcaatggcgcgatcttggctcactgcaacctccgcctcccgggttcaggggattctcctgcctcagcctcctgagtagctgggactacaagcatgcaccaccacgcccagctaatttttgtagttttagtagagatggggtttcaccatgctggccagatgatctgaatctcttgacctcgtgatccgcccgccttggcctccacaagtgctgggattacaggtgtgagccaccacacccggcctatattgttttgaaagcatactctatatatagttatgggcagaggcacaggcatcctcagcagctgattcaggagatgatggtaaagctagctaactatgaattaaacattcacatatccagtctacctggtccagtaataatacaagcaaatcttgtatttcaggaacaaatcaaggttctcttaattttttggcttatatacaatgaagtaaaaacttgataaacatggtttcaaattgaggaggagagtcttggatgtatgttttaatatgtataccttataattctgcctctagccaaatgctatgtttgcaaaatgtggcatctgttagtttttattgtctgtgtcttctttgtttactataccttgggtaattttgtgttaccaaaaaaaaaaaaaaaaaaggaagtgtaatgtcagacacacaagaaaagcaaatcagtgttgtaagcttaaagtacaatttcaaaggtcattaccaacagcagggtttttttttatactttaaaaacattatgctacatatcattgccattttcatattttggggttttgctactcttatacaatggaatcaatggaaatgtcatccagccactgaattgccattattatatctaaaaagtttctaagatgacagttatcactattttgttttatctccatgctgacatttgaaagaaggtactagtatccctctagccagattgcttagtttttcgttggtaatcaaacaacagttgtactaaaggaaagtaaagctaggacctaaatcagaatcatagttgcctgcatatatggtaacaaggtcgtgtgcatttgctttcacagtgatgagtgagaggatgagaagaaattatttgacatttttctgtggttgaatagaagacacctttcttttgtctttaggtttaggaggagatactaagatactggatgtttatcctatcttagtttggttggagtaataagagagaagaagagggtggactttggcttttcagtgttttttcccctaaagagtgatattgctgacgtttctatcaattttacacataatatgtggctatgaaaccatatatctcacttaagtaacaaagtaatcactttgtctatcactaagtaatagacaaaaatcattgtctattatttaaagccaacaaaacagtgtaacagttttaagttcaataatgttaagtattgtatagaaatatattggaggcaaagttcagttgatgacaattgtgtatatgttactgatgctgtaaattatttttaataaagaaaattgtattatcaaaaaaaaat

SEQ ID NO: 316245 - DNA, 6091 bp, Homo sapiens
gcccccttcttcccccgctggccccctccccggagggataatatggtctccggcgatggacgccccaaaagcaggatacgcctttgagtaccttattgaaacattaaatgacagttcacataagaagttcttcgatgtatctaaacttggcaccaagtatgatgttctgccttactcaatacgggtcttgttggaagctgctgtacgaaattgtgatggctttttaatgaagaaggaagatgttatgaacattttagactggaaaaccaaacaaagcaatgttgaagtgccctttttccctgcccgtgttcttcttcaagattttactggaataccagcaatggtggattttgctgctatgagggaggcagtgaaaactcttggaggtgatcctgagaaagtccatcctgcttgtccgacagatcttacagttgaccattctttacaaattgacttcagtaaatgtgcaatacagaatgcaccaaatcctggaggtggtgacctgcagaaagcaggaaagctctctccacttaaagtgcagcctaagaagcttccctgcagaggccagactacctgccgaggatcttgtgattctggagaactaggccgaaactcaggaacattttcttcgcagattgagaatacacccatcctgtgtccttttcatttgcaaccagtgcctgaacctgaaacagtgttaaaaaatcaagaagtagaattcggcagaaatcgagagaggcttcagttttttaagtggagttcaagagtttttaagaatgtggcagtgatccctcctggaactggaatggctcatcaaataaacttagaatatttgtcaagagtggtttttgaagaaaaagacctcctcttcccagacagtgtagtcggcacagattcacacataacgatggtgaatggtttagggattctggggtggggggttggaggcattgaaacagaagcagttatgcttggtctgccagtttctcttactttaccagaggtggttggatgtgagttaactgggtcatcaaacccttttgttacatccatagatgttgttcttggtattacaaagcacctcaggcaagtaggagtggctggaaagtttgttgagttttttggaagtggagtttcacaattatctatagttgatcgaactacaatagcaaacatgtgtccggaatatggtgctatcctcagctttttccctgttgacaatgtgacattaaaacatttagaacatacaggttttagcaaagccaaactcgaatcaatggaaacataccttaaagctgtgaaattgtttcgaaatgaccagaattcttcaggagaacctgaatactcccaggtgatccagattaatctgaattcaatagttccatctgttagtggtccaaaaagacctcaggatagagttgctgtgacagatatgaaaagcgatttccaggcttgcttaaatgaaaaggttggatttaaaggcttccaaattgcagctgaaaaacaaaaggatattgtctccattcattatgaaggaagtgaatataagctgtctcatggatcagtggtcattgctgcagttatcagttgtaccaataattgcaatccatctgtcatgcttgctgcaggtcttttggctaaaaaggctgttgaagctggtctgcgtgttaaaccttatataagaacaagtttatctccaggcagtgggatggttacacattacctcagttcaagtggagtattaccatatctaagtaagcttggatttgaaatcgttggctatggatgttcaacttgtgtgggaaatacagcacccttatcagacgcagttttaaatgcagtaaaacagggtgatttggttacctgtggaattttatctggaaacaaaaattttgaaggtcgtctttgtgattgtgttcgtgccaattatcttgcctctccacccttagtggtagcttatgccatagcaggcacagtgaatatagatttccagacagaacctttaggtactgaccccaccggcaagaacatttacctgcatgatatttggcctagtcgagaagaagttcatcgagtagaggaagaacatgttatactatccatgtttaaagcattaaaagataaaatagaaatggggaataaacggtggaattccttagaagcaccggattcagttttgtttccatgggacttaaagtctacttatatcagatgcccttcattttttgataaacttaccaaagagccaattgcactccaggctattgaaaatgcccatgtcttattatatttgggagactctgtcacaacagatcatatatcacctgcaggaagtatcgctaggaatagtgctgccgctaagtatttgacaaacagaggccttacccctcgtgaattcaactcttacggagctcgaagaggtaatgatgctgtaatgacaagaggcacttttgcaaatatcaagctttttaataagtttattggaaaaccagctcctaaaacaattcattttccatcaggacagacgctagatgtatttgaggctgcagagctgtaccagaaagaaggtatcccactgattattttagcaggaaagaaatatggttcaggaaactccagagactgggctgccaaaggaccgtatttactgggtgtgaaagctgttttggctgaaagttatgaaaaaatacacaaagatcatttgattggaattggcatagctccacttcagttccttccaggagaaaatgcagattccttgggcctctccggtagagaaacattttctttaacatttcctgaagaactgtctcctggaattacattgaatatacagacaagcactggaaaagtattcagcgtgattgcttcgtttgaagatgatgtggaaataacattatacaaacatggaggattattaaactttgtggcacgaaaattctcatagtatctacttaccatagatacctttcataactggtaactgcaaagccttttgtgctggacccaggaatccttaccatggagcagcagatagtcccagtatactcacttatctcatccatggatgtaaatgatgatgaatcaacatagtaactgaaatgaaatcttcttgattttaaataatatacgaatggtgctattaatattgctaaaatcaacgtgtgaagtgtgttgtggaagagacctgtaagtatgggggggggcgatattttatcagaccattttgtaaataaaggcagaatttgtgttgaagattcttatatgaataaccttcctggatttgtttagttttgcaccaataaaactgtgtactactgtttgttggtttaagagtagcagattgaaatataagaagccagattagactctaaaattgtggccattggaatctcatttataaatggaccttttaagtatattaattcctcttcagaattgagctggacacatttggcattcttagtttgtcatataaccaggtttatccttagtctaactgcaagggatagaacctgccccaggtcacaatcattctgtccaatccagccaaggttccctccacatatgaagatggaccatggcaggatacaactgattgtgtggcaccatgtattagcagtgggaatatgtatcacatatgatgcagcctttcatatttcagcagtttgccactgtgactgtctggcaagcccccagatggcgttatattaattggattagattattttgctcaccttatgtaatactgtaacttcctataacctaatattttcggtatcattaaccaaaatttcacactcatagttgctaaagagaatgttattcaatcattaaactctgaactgatttcttctatacatttaaattatccaccctcaataatacgggtgctcaaccctatgcattttttaagtgttgctatttcttaattaaattgatttcctgtcattttgaatcatttatcacctgcgatgcatgattctattaattttgttatgttactgttttaaccaaagctgaccgtaaggataaaacacttaagttgttgctgagtactatatatcctcaatatgcatgtctgcccatcacatcaaatgttctgtcaacaagatgtttggtaattttttttaaaaaggttggaaaattaattatagaaggttctatactgtttttttaattaagaaactaaatctagcaggctaaaggttaattgtagtgattttttttcacatagatatctttctatgacctagttagttactgcaattcagaattagttcacattgcataaagaattacttgttgtaagcaaaatgctgaaactaccaaaccagtggatgaagaccactaagaactttgcacataatcatacaatcttttgaaaatattttgcaaatatgtgtttagacaataagatggactagagttcgacaaaatgatttctttatttaaattttgtataagtattttcttcgacactttcaaattatattgtgttcttgatatatgctgtatatttatttgttagtgcatgtgtttttaatttacatgaaaacatgagttaggagaaattacaggttgaaagatgaaatgcctgtatgtgctctgaagaaatggtaattccagattgtgcagggggaaacaaatctattttgttttgttttgttttttgagacggagtcttgccctgtggctgggctggagtgcaatggcgcgatcttggctcactgcaacctccgcctcccgggttcaggggattctcctgcctcagcctcctgagtagctgggactacaagcatgcaccaccacgcccagctaatttttgtagttttagtagagatggggtttcaccatgctggccagatgatctgaatctcttgacctcgtgatccgcccgccttggcctccacaagtgctgggattacaggtgtgagccaccacacccggcctatattgttttgaaagcatactctatatatagttatgggcagaggcacaggcatcctcagcagctgattcaggagatgatggtaaagctagctaactatgaattaaacattcacatatccagtctacctggtccagtaataatacaagcaaatcttgtatttcaggaacaaatcaaggttctcttaattttttggcttatatacaatgaagtaaaaacttgataaacatggtttcaaattgaggaggagagtcttggatgtatgttttaatatgtataccttataattctgcctctagccaaatgctatgtttgcaaaatgtggcatctgttagtttttattgtctgtgtcttctttgtttactataccttgggtaattttgtgttaccaaaaaaaaaaaaaaagaggtggttcttggtcccggaacccacaagaaaagagccaatatcccagggttggtcagagctcttaaagagttggcaatttccaagggtccattaccaaacagagagggttttttttatatccatctttaaaaactttttggtctcctttatcctatggcccatttcccatatattgggggggtttgggctaaactccttattcacaagggcactccaccgggaacgggtcttccagcccattgattggcctttatttttttctaacacaggttcctaagagtgacggctcattcacatattgggttttatccccatgggctgactttggcacagagggtccttagttattccctcttggccagttgggttagtttttgcgtgggtaattccaacccaccgggtcgggtctaagggacagtcaacgtttgggacctaattccgaaactcatagtggcggctatttggtacccaggcgtggtgcatgtgttcccagtgatgagtgggaggtgaaaagaaatttggacctcttcgggggtggataagaagaacccttcttggttagggtaggagggatcacagatgggggtgaccaactaaggggggcacaagagaacaagagggtgggttcagggtttccaaaggatagggggtttaattacttttggttacctttctagaaagactggtccaataaacgtttttcaagtgatcaatttatggacaagttggtat

SEQ ID NO: 316246 - DNA, 5419 bp, Homo sapiens
gcccccttcttcccccgctggccccctccccggagggataatatggtctccggcgatggacgccccaaaagcaggatacgcctttgagtaccttattgaaacattaaatgacaagaagcagttatgcttggtctgccagtttctcttactttaccagaggtggttggatgtgagttaactgggtcatcaaacccttttgttacatccatagatgttgttcttggtattacaaagcacctcaggcaagtaggagtggctggaaagtttgttgagttttttggaagtggagtttcacaattatctatagttgatcgaactacaatagcaaacatgtgtccggaatatggtgctatcctcagctttttccctgttgacaatgtgacattaaaacatttagaacatacaggttttagcaaagccaaactcgaatcaatggaaacataccttaaagctgtgaaattgtttcgaaatgaccagaattcttcaggagaacctgaatactcccaggtgatccagattaatctgaattcaatagttccatctgttagtggtccaaaaagacctcaggatagagttgctgtgacagatatgaaaagcgatttccaggcttgcttaaatgaaaaggttggatttaaaggcttccaaattgcagctgaaaaacaaaaggatattgtctccattcattatgaaggaagtgaatataagctgtctcatggatcagtggtcattgctgcagttatcagttgtaccaataattgcaatccatctgtcatgcttgctgcaggtcttttggctaaaaaggctgttgaagctggtctgcgtgttaaaccttatataagaacaagtttatctccaggcagtgggatggttacacattacctcagttcaagtggagtattaccatatctaagtaagcttggatttgaaatcgttggctatggatgttcaacttgtgtgggaaatacagcacccttatcagacgcagttttaaatgcagtaaaacagggtgatttggttacctgtggaattttatctggaaacaaaaattttgaaggtcgtctttgtgattgtgttcgtgccaattatcttgcctctccacccttagtggtagcttatgccatagcaggcacagtgaatatagatttccagacagaacctttaggtactgaccccaccggcaagaacatttacctgcatgatatttggcctagtcgagaagaagttcatcgagtagaggaagaacatgttatactatccatgtttaaagcattaaaagataaaatagaaatggggaataaacggtggaattccttagaagcaccggattcagttttgtttccatgggacttaaagtctacttatatcagatgcccttcattttttgataaacttaccaaagagccaattgcactccaggctattgaaaatgcccatgtcttattatatttgggagactctgtcacaacagatcatatatcacctgcaggaagtatcgctaggaatagtgctgccgctaagtatttgacaaacagaggccttacccctcgtgaattcaactcttacggagctcgaagaggtaatgatgctgtaatgacaagaggcacttttgcaaatatcaagctttttaataagtttattggaaaaccagctcctaaaacaattcattttccatcaggacagacgctagatgtatttgaggctgcagagctgtaccagaaagaaggtatcccactgattattttagcaggaaagaaatatggttcaggaaactccagagactgggctgccaaaggaccgtatttactgggtgtgaaagctgttttggctgaaagttatgaaaaaatacacaaagatcatttgattggaattggcatagctccacttcagttccttccaggagaaaatgcagattccttgggcctctccggtagagaaacattttctttaacatttcctgaagaactgtctcctggaattacattgaatatacagacaagcactggaaaagtattcagcgtgattgcttcgtttgaagatgatgtggaaataacattatacaaacatggaggattattaaactttgtggcacgaaaattctcatagtatctacttaccatagatacctttcataactggtaactgcaaagccttttgtgctggacccaggaatccttaccatggagcagcagatagtcccagtatactcacttatctcatccatggatgtaaatgatgatgaatcaacatagtaactgaaatgaaatcttcttgattttaaataatatacgaatggtgctattaatattgctaaaatcaacgtgtgaagtgtgttgtggaagagacctgtaagtatgggggggggcgatattttatcagaccattttgtaaataaaggcagaatttgtgttgaagattcttatatgaataaccttcctggatttgtttagttttgcaccaataaaactgtgtactactgtttgttggtttaagagtagcagattgaaatataagaagccagattagactctaaaattgtggccattggaatctcatttataaatggaccttttaagtatattaattcctcttcagaattgagctggacacatttggcattcttagtttgtcatataaccaggtttatccttagtctaactgcaagggatagaacctgccccaggtcacaatcattctgtccaatccagccaaggttccctccacatatgaagatggaccatggcaggatacaactgattgtgtggcaccatgtattagcagtgggaatatgtatcacatatgatgcagcctttcatatttcagcagtttgccactgtgactgtctggcaagcccccagatggcgttatattaattggattagattattttgctcaccttatgtaatactgtaacttcctataacctaatattttcggtatcattaaccaaaatttcacactcatagttgctaaagagaatgttattcaatcattaaactctgaactgatttcttctatacatttaaattatccaccctcaataatacgggtgctcaaccctatgcattttttaagtgttgctatttcttaattaaattgatttcctgtcattttgaatcatttatcacctgcgatgcatgattctattaattttgttatgttactgttttaaccaaagctgaccgtaaggataaaacacttaagttgttgctgagtactatatatcctcaatatgcatgtctgcccatcacatcaaatgttctgtcaacaagatgtttggtaattttttttaaaaaggttggaaaattaattatagaaggttctatactgtttttttaattaagaaactaaatctagcaggctaaaggttaattgtagtgattttttttcacatagatatctttctatgacctagttagttactgcaattcagaattagttcacattgcataaagaattacttgttgtaagcaaaatgctgaaactaccaaaccagtggatgaagaccactaagaactttgcacataatcatacaatcttttgaaaatattttgcaaatatgtgtttagacaataagatggactagagttcgacaaaatgatttctttatttaaattttgtataagtattttcttcgacactttcaaattatattgtgttcttgatatatgctgtatatttatttgttagtgcatgtgtttttaatttacatgaaaacatgagttaggagaaattacaggttgaaagatgaaatgcctgtatgtgctctgaagaaatggtaattccagattgtgcagggggaaacaaatctattttgttttgttttgttttttgagacggagtcttgccctgtggctgggctggagtgcaatggcgcgatcttggctcactgcaacctccgcctcccgggttcaggggattctcctgcctcagcctcctgagtagctgggactacaagcatgcaccaccacgcccagctaatttttgtagttttagtagagatggggtttcaccatgctggccagatgatctgaatctcttgacctcgtgatccgcccgccttggcctccacaagtgctgggattacaggtgtgagccaccacacccggcctatattgttttgaaagcatactctatatatagttatgggcagaggcacaggcatcctcagcagctgattcaggagatgatggtaaagctagctaactatgaattaaacattcacatatccagtctacctggtccagtaataatacaagcaaatcttgtatttcaggaacaaatcaaggttctcttaattttttggcttatatacaatgaagtaaaaacttgataaacatggtttcaaattgaggaggagagtcttggatgtatgttttaatatgtataccttataattctgcctctagccaaatgctatgtttgcaaaatgtggcatctgttagtttttattgtctgtgtcttctttgtttactataccttgggtaattttgtgttaccaaaaaaaaaaaaaaaaaaggaagtgtaatgtcagacacacaagaaaagcaaatcagtgttgtaagcttaaagtacaatttcaaaggtcattaccaacagcagggtttttttttatactttaaaaacattatgctacatatcattgccattttcatattttggggttttgctactcttatacaatggaatcaatggaaatgtcatccagccactgaattgccattattatatctaaaaagtttctaagatgacagttatcactattttgttttatctccatgctgacatttgaaagaaggtactagtatccctctagccagattgcttagtttttcgttggtaatcaaacaacagttgtactaaaggaaagtaaagctaggacctaaatcagaatcatagttgcctgcatatatggtaacaaggtcgtgtgcatttgctttcacagtgatgagtgagaggatgagaagaaattatttgacatttttctgtggttgaatagaagacacctttcttttgtctttaggtttaggaggagatactaagatactggatgtttatcctatcttagtttggttggagtaataagagagaagaagagggtggactttggcttttcagtgttttttcccctaaagagtgatattgctgacgtttctatcaattttacacataatatgtggctatgaaaccatatatctcacttaagtaacaaagtaatcactttgtctatcactaagtaatagacaaaaatcattgtctattatttaaagccaacaaaacagtgtaacagttttaagttcaataatgttaagtattgtatagaaatatattggaggcaaagttcagttgatgacaattgtgtatatgttactgatgctgtaaattatttttaataaagaaaattgtattatcaaaaaaaaat

SEQ ID NO: 316247 - DNA, 5780 bp, Homo sapiens
cctcatcgggtgatgatagccaaggtggggataagtgtggtttcgaagaagatataaaatatgattagttctgtggctgtgaatgttataattaaggagatttgtagggagattagtatagagaggtagagtttttttcgtgatagtggtaatagtttatgcacagcataaactattgttactctaacttcattcctgttaacagtatatacactgtattttctgagatttaattaaattttgtatgtattttatgacttgcttttattcctttagcattacttttaatccctttagtaatagtttatgctgttattctggaatggctcatcaaataaacttagaatatttgtcaagagtggtttttgaagaaaaagacctcctcttcccagacagtgtagtcggcacagattcacacataacgatggtgaatggtttagggattctggggtggggggttggaggcattgaaacagaagcagttatgcttggtctgccagtttctcttactttaccagaggtggttggatgtgagttaactgggtcatcaaacccttttgttacatccatagatgttgttcttggtattacaaagcacctcaggcaagtaggagtggctggaaagtttgttgagttttttggaagtggagtttcacaattatctatagttgatcgaactacaatagcaaacatgtgtccggaatatggtgctatcctcagctttttccctgttgacaatgtgacattaaaacatttagaacatacaggttttagcaaagccaaactcgaatcaatggaaacataccttaaagctgtgaaattgtttcgaaatgaccagaattcttcaggagaacctgaatactcccaggtgatccagattaatctgaattcaatagttccatctgttagtggtccaaaaagacctcaggatagagttgctgtgacagatatgaaaagcgatttccaggcttgcttaaatgaaaaggttggatttaaaggcttccaaattgcagctgaaaaacaaaaggatattgtctccattcattatgaaggaagtgaatataagctgtctcatggatcagtggtcattgctgcagttatcagttgtaccaataattgcaatccatctgtcatgcttgctgcaggtcttttggctaaaaaggctgttgaagctggtctgcgtgttaaaccttatataagaacaagtttatctccaggcagtgggatggttacacattacctcagttcaagtggagtattaccatatctaagtaagcttggatttgaaatcgttggctatggatgttcaacttgtgtgggaaatacagcacccttatcagacgcagttttaaatgcagtaaaacagggtgatttggttacctgtggaattttatctggaaacaaaaattttgaaggtcgtctttgtgattgtgttcgtgccaattatcttgcctctccacccttagtggtagcttatgccatagcaggcacagtgaatatagatttccagacagaacctttaggtactgaccccaccggcaagaacatttacctgcatgatatttggcctagtcgagaagaagttcatcgagtagaggaagaacatgttatactatccatgtttaaagcattaaaagataaaatagaaatggggaataaacggtggaattccttagaagcaccggattcagttttgtttccatgggacttaaagtctacttatatcagatgcccttcattttttgataaacttaccaaagagccaattgcactccaggctattgaaaatgcccatgtcttattatatttgggagactctgtcacaacagatcatatatcacctgcaggaagtatcgctaggaatagtgctgccgctaagtatttgacaaacagaggccttacccctcgtgaattcaactcttacggagctcgaagaggtaatgatgctgtaatgacaagaggcacttttgcaaatatcaagctttttaataagtttattggaaaaccagctcctaaaacaattcattttccatcaggacagacgctagatgtatttgaggctgcagagctgtaccagaaagaaggtatcccactgattattttagcaggaaagaaatatggttcaggaaactccagagactgggctgccaaaggaccgtatttactgggtgtgaaagctgttttggctgaaagttatgaaaaaatacacaaagatcatttgattggaattggcatagctccacttcagttccttccaggagaaaatgcagattccttgggcctctccggtagagaaacattttctttaacatttcctgaagaactgtctcctggaattacattgaatatacagacaagcactggaaaagtattcagcgtgattgcttcgtttgaagatgatgtggaaataacattatacaaacatggaggattattaaactttgtggcacgaaaattctcatagtatctacttaccatagatacctttcataactggtaactgcaaagccttttgtgctggacccaggaatccttaccatggagcagcagatagtcccagtatactcacttatctcatccatggatgtaaatgatgatgaatcaacatagtaactgaaatgaaatcttcttgattttaaataatatacgaatggtgctattaatattgctaaaatcaacgtgtgaagtgtgttgtggaagagacctgtaagtatgggggggggcgatattttatcagaccattttgtaaataaaggcagaatttgtgttgaagattcttatatgaataaccttcctggatttgtttagttttgcaccaataaaactgtgtactactgtttgttggtttaagagtagcagattgaaatataagaagccagattagactctaaaattgtggccattggaatctcatttataaatggaccttttaagtatattaattcctcttcagaattgagctggacacatttggcattcttagtttgtcatataaccaggtttatccttagtctaactgcaagggatagaacctgccccaggtcacaatcattctgtccaatccagccaaggttccctccacatatgaagatggaccatggcaggatacaactgattgtgtggcaccatgtattagcagtgggaatatgtatcacatatgatgcagcctttcatatttcagcagtttgccactgtgactgtctggcaagcccccagatggcgttatattaattggattagattattttgctcaccttatgtaatactgtaacttcctataacctaatattttcggtatcattaaccaaaatttcacactcatagttgctaaagagaatgttattcaatcattaaactctgaactgatttcttctatacatttaaattatccaccctcaataatacgggtgctcaaccctatgcattttttaagtgttgctatttcttaattaaattgatttcctgtcattttgaatcatttatcacctgcgatgcatgattctattaattttgttatgttactgttttaaccaaagctgaccgtaaggataaaacacttaagttgttgctgagtactatatatcctcaatatgcatgtctgcccatcacatcaaatgttctgtcaacaagatgtttggtaattttttttaaaaaggttggaaaattaattatagaaggttctatactgtttttttaattaagaaactaaatctagcaggctaaaggttaattgtagtgattttttttcacatagatatctttctatgacctagttagttactgcaattcagaattagttcacattgcataaagaattacttgttgtaagcaaaatgctgaaactaccaaaccagtggatgaagaccactaagaactttgcacataatcatacaatcttttgaaaatattttgcaaatatgtgtttagacaataagatggactagagttcgacaaaatgatttctttatttaaattttgtataagtattttcttcgacactttcaaattatattgtgttcttgatatatgctgtatatttatttgttagtgcatgtgtttttaatttacatgaaaacatgagttaggagaaattacaggttgaaagatgaaatgcctgtatgtgctctgaagaaatggtaattccagattgtgcagggggaaacaaatctattttgttttgttttgttttttgagacggagtcttgccctgtggctgggctggagtgcaatggcgcgatcttggctcactgcaacctccgcctcccgggttcaggggattctcctgcctcagcctcctgagtagctgggactacaagcatgcaccaccacgcccagctaatttttgtagttttagtagagatggggtttcaccatgctggccagatgatctgaatctcttgacctcgtgatccgcccgccttggcctccacaagtgctgggattacaggtgtgagccaccacacccggcctatattgttttgaaagcatactctatatatagttatgggcagaggcacaggcatcctcagcagctgattcaggagatgatggtaaagctagctaactatgaattaaacattcacatatccagtctacctggtccagtaataatacaagcaaatcttgtatttcaggaacaaatcaaggttctcttaattttttggcttatatacaatgaagtaaaaacttgataaacatggtttcaaattgaggaggagagtcttggatgtatgttttaatatgtataccttataattctgcctctagccaaatgctatgtttgcaaaatgtggcatctgttagtttttattgtctgtgtcttctttgtttactataccttgggtaattttgtgttaccaaaaaaaaaaaaaaaaaaggaagtgtaatgtcagacacacaagaaaagcaaatcagtgttgtaagcttaaagtacaatttcaaaggtcattaccaacagcagggtttttttttatactttaaaaacattatgctacatatcattgccattttcatattttggggttttgctactcttatacaatggaatcaatggaaatgtcatccagccactgaattgccattattatatctaaaaagtttctaagatgacagttatcactattttgttttatctccatgctgacatttgaaagaaggtactagtatccctctagccagattgcttagtttttcgttggtaatcaaacaacagttgtactaaaggaaagtaaagctaggacctaaatcagaatcatagttgcctgcatatatggtaacaaggtcgtgtgcatttgctttcacagtgatgagtgagaggatgagaagaaattatttgacatttttctgtggttgaatagaagacacctttcttttgtctttaggtttaggaggagatactaagatactggatgtttatcctatcttagtttggttggagtaataagagagaagaagagggtggactttggcttttcagtgttttttcccctaaagagtgatattgctgacgtttctatcaattttacacataatatgtggctatgaaaccatatatctcacttaagtaacaaagtaatcactttgtctatcactaagtaatagacaaaaatcattgtctattatttaaagccaacaaaacagtgtaacagttttaagttcaataatgttaagtattgtatagaaatatattggaggcaaagttcagttgatgacaattgtgtatatgttactgatgctgtaaattatttttaataaagaaaattgtattatcaaaaaaaaat

SEQ ID NO: 316248 - DNA, 4516 bp, Homo sapiens
agtcgttatatttttgaaatgtttcttagaccatctattctttgaattatttcaggaagacgtatgataatgtatagttattaatttctgtgtttatgtgaagaaaataaaatgtacaggtaattagttcttccagccgcttaagcctgaagcaccctgttgaatcatttacttgatttccatgatatgtctttgaaaaggtatgaacattttcagagttatttttttactgagtatcatgttcaaaaattttaaccaggtactgaccccaccggcaagaacatttacctgcatgatatttggcctagtcgagaagaagttcatcgagtagaggaagaacatgttatactatccatgtttaaagcattaaaagataaaatagaaatggggaataaacggtggaattccttagaagcaccggattcagttttgtttccatgggacttaaagtctacttatatcagatgcccttcattttttgataaacttaccaaagagccaattgcactccaggctattgaaaatgcccatgtcttattatatttgggagactctgtcacaacagatcatatatcacctgcaggaagtatcgctaggaatagtgctgccgctaagtatttgacaaacagaggccttacccctcgtgaattcaactcttacggagctcgaagaggtaatgatgctgtaatgacaagaggcacttttgcaaatatcaagctttttaataagtttattggaaaaccagctcctaaaacaattcattttccatcaggacagacgctagatgtatttgaggctgcagagctgtaccagaaagaaggtatcccactgattattttagcaggaaagaaatatggttcaggaaactccagagactgggctgccaaaggaccgtatttactgggtgtgaaagctgttttggctgaaagttatgaaaaaatacacaaagatcatttgattggaattggcatagctccacttcagttccttccaggagaaaatgcagattccttgggcctctccggtagagaaacattttctttaacatttcctgaagaactgtctcctggaattacattgaatatacagacaagcactggaaaagtattcagcgtgattgcttcgtttgaagatgatgtggaaataacattatacaaacatggaggattattaaactttgtggcacgaaaattctcatagtatctacttaccatagatacctttcataactggtaactgcaaagccttttgtgctggacccaggaatccttaccatggagcagcagatagtcccagtatactcacttatctcatccatggatgtaaatgatgatgaatcaacatagtaactgaaatgaaatcttcttgattttaaataatatacgaatggtgctattaatattgctaaaatcaacgtgtgaagtgtgttgtggaagagacctgtaagtatgggggggggcgatattttatcagaccattttgtaaataaaggcagaatttgtgttgaagattcttatatgaataaccttcctggatttgtttagttttgcaccaataaaactgtgtactactgtttgttggtttaagagtagcagattgaaatataagaagccagattagactctaaaattgtggccattggaatctcatttataaatggaccttttaagtatattaattcctcttcagaattgagctggacacatttggcattcttagtttgtcatataaccaggtttatccttagtctaactgcaagggatagaacctgccccaggtcacaatcattctgtccaatccagccaaggttccctccacatatgaagatggaccatggcaggatacaactgattgtgtggcaccatgtattagcagtgggaatatgtatcacatatgatgcagcctttcatatttcagcagtttgccactgtgactgtctggcaagcccccagatggcgttatattaattggattagattattttgctcaccttatgtaatactgtaacttcctataacctaatattttcggtatcattaaccaaaatttcacactcatagttgctaaagagaatgttattcaatcattaaactctgaactgatttcttctatacatttaaattatccaccctcaataatacgggtgctcaaccctatgcattttttaagtgttgctatttcttaattaaattgatttcctgtcattttgaatcatttatcacctgcgatgcatgattctattaattttgttatgttactgttttaaccaaagctgaccgtaaggataaaacacttaagttgttgctgagtactatatatcctcaatatgcatgtctgcccatcacatcaaatgttctgtcaacaagatgtttggtaattttttttaaaaaggttggaaaattaattatagaaggttctatactgtttttttaattaagaaactaaatctagcaggctaaaggttaattgtagtgattttttttcacatagatatctttctatgacctagttagttactgcaattcagaattagttcacattgcataaagaattacttgttgtaagcaaaatgctgaaactaccaaaccagtggatgaagaccactaagaactttgcacataatcatacaatcttttgaaaatattttgcaaatatgtgtttagacaataagatggactagagttcgacaaaatgatttctttatttaaattttgtataagtattttcttcgacactttcaaattatattgtgttcttgatatatgctgtatatttatttgttagtgcatgtgtttttaatttacatgaaaacatgagttaggagaaattacaggttgaaagatgaaatgcctgtatgtgctctgaagaaatggtaattccagattgtgcagggggaaacaaatctattttgttttgttttgttttttgagacggagtcttgccctgtggctgggctggagtgcaatggcgcgatcttggctcactgcaacctccgcctcccgggttcaggggattctcctgcctcagcctcctgagtagctgggactacaagcatgcaccaccacgcccagctaatttttgtagttttagtagagatggggtttcaccatgctggccagatgatctgaatctcttgacctcgtgatccgcccgccttggcctccacaagtgctgggattacaggtgtgagccaccacacccggcctatattgttttgaaagcatactctatatatagttatgggcagaggcacaggcatcctcagcagctgattcaggagatgatggtaaagctagctaactatgaattaaacattcacatatccagtctacctggtccagtaataatacaagcaaatcttgtatttcaggaacaaatcaaggttctcttaattttttggcttatatacaatgaagtaaaaacttgataaacatggtttcaaattgaggaggagagtcttggatgtatgttttaatatgtataccttataattctgcctctagccaaatgctatgtttgcaaaatgtggcatctgttagtttttattgtctgtgtcttctttgtttactataccttgggtaattttgtgttaccaaaaaaaaaaaaaaaaaaggaagtgtaatgtcagacacacaagaaaagcaaatcagtgttgtaagcttaaagtacaatttcaaaggtcattaccaacagcagggtttttttttatactttaaaaacattatgctacatatcattgccattttcatattttggggttttgctactcttatacaatggaatcaatggaaatgtcatccagccactgaattgccattattatatctaaaaagtttctaagatgacagttatcactattttgttttatctccatgctgacatttgaaagaaggtactagtatccctctagccagattgcttagtttttcgttggtaatcaaacaacagttgtactaaaggaaagtaaagctaggacctaaatcagaatcatagttgcctgcatatatggtaacaaggtcgtgtgcatttgctttcacagtgatgagtgagaggatgagaagaaattatttgacatttttctgtggttgaatagaagacacctttcttttgtctttaggtttaggaggagatactaagatactggatgtttatcctatcttagtttggttggagtaataagagagaagaagagggtggactttggcttttcagtgttttttcccctaaagagtgatattgctgacgtttctatcaattttacacataatatgtggctatgaaaccatatatctcacttaagtaacaaagtaatcactttgtctatcactaagtaatagacaaaaatcattgtctattatttaaagccaacaaaacagtgtaacagttttaagttcaataatgttaagtattgtatagaaatatattggaggcaaagttcagttgatgacaattgtgtatatgttactgatgctgtaaattatttttaataaagaaaattgtattatcaaaaaaaaat

SEQ ID NO: 316249 - DNA, 3254 bp, Homo sapiens
gcccccttcttcccccgctggccccctccccggagggataatatggtctccggcgatggacgccccaaaagcaggatacgcctttgagtaccttattgaaacattaaatgacagttcacataagaagttcttcgatgtatctaaacttggcaccaagtatgatgttctgccttactcaatacgggtcttgttggaagctgctgtacgaaattgtgatggctttttaatgaagaaggaagatgttatgaacattttagactggaaaaccaaacaaagcaatgttgaagtgccctttttccctgcccgtgttcttcttcaagattttactggaataccagcaatggtggattttgctgctatgagggaggcagtgaaaactcttggaggtgatcctgagaaagtccatcctgcttgtccgacagatcttacagttgaccattctttacaaattgacttcagtaaatgtgcaatacagaatgcaccaaatcctggaggtggtgacctgcagaaagcaggaaagctctctccacttaaagtgcagcctaagaagcttccctgcagaggccagactacctgccgaggatcttgtgattctggagaactaggccgaaactcaggaacattttcttcgcagattgagaatacacccatcctgtgtccttttcatttgcaaccagtgcctgaacctgaaacagtgttaaaaaatcaagaagtagaattcggcagaaatcgagagaggcttcagttttttaagtggagttcaagagtttttaagaatgtggcagtgatccctcctggaactggaatggctcatcaaataaacttagaatatttgtcaagagtggtttttgaagaaaaagacctcctcttcccagacagtgtagtcggcacagattcacacataacgatggtgaatggtttagggattctggggtggggggttggaggcattgaaacagaagcagttatgcttggtctgccagtttctcttactttaccagaggtggttggatgtgagttaactgggtcatcaaacccttttgttacatccatagatgttgttcttggtattacaaagcacctcaggcaagtaggagtggctggaaagtttgttgagttttttggaagtggagtttcacaattatctatagttgatcgaactacaatagcaaacatgtgtccggaatatggtgctatcctcagctttttccctgttgacaatgtgacattaaaacatttagaacatacaggttttagcaaagccaaactcgaatcaatggaaacataccttaaagctgtgaaattgtttcgaaatgaccagaattcttcaggagaacctgaatactcccaggtgatccagattaatctgaattcaatagttccatctgttagtggtccaaaaagacctcaggatagagttgctgtgacagatatgaaaagcgatttccaggcttgcttaaatgaaaaggttggatttaaaggcttccaaattgcagctgaaaaacaaaaggatattgtctccattcattatgaaggaagtgaatataagctgtctcatggatcagtggtcattgctgcagttatcagttgtaccaataattgcaatccatctgtcatgcttgctgcaggtcttttggctaaaaaggctgttgaagctggtctgcgtgttaaaccttatataagaacaagtttatctccaggcagtgggatggttacacattacctcagttcaagtggagtattaccatatctaagtaagcttggatttgaaatcgttggctatggatgttcaacttgtgtgggaaatacagcacccttatcagacgcagttttaaatgcagtaaaacagggtgatttggttacctgtggaattttatctggaaacaaaaattttgaaggtcgtctttgtgattgtgttcgtgccaattatcttgcctctccacccttagtggtagcttatgccatagcaggcacagtgaatatagatttccagacagaacctttaggtactgaccccaccggcaagaacatttacctgcatgatatttggcctagtcgagaagaagttcatcgagtagaggaagaacatgttatactatccatgtttaaagcattaaaagataaaatagaaatggggaataaacggtggaattccttagaagcaccggattcagttttgtttccatgggacttaaagtctacttatatcagatgcccttcattttttgataaacttaccaaagagccaattgcactccaggctattgaaaatgcccatgtcttattatatttgggagactctgtcacaacagatcatatatcacctgcaggaagtatcgctaggaatagtgctgccgctaagtatttgacaaacagaggccttacccctcgtgaattcaactcttacggagctcgaagaggtaatgatgctgtaatgacaagaggcacttttgcaaatatcaagctttttaataagtttattggaaaaccagctcctaaaacaattcattttccatcaggacagacgctagatgtatttgaggctgcagagctgtaccagaaagaaggtatcccactgattattttagcaggaaagaaatatggttcaggaaactccagagactgggctgccaaaggaccgtatttactgggtgtgaaagctgttttggctgaaagttatgaaaaaatacacaaagatcatttgattggaattggcatagctccacttcagttccttccaggagaaaatgcagattccttgggcctctccggtagagaaacattttctttaacatttcctgaagaactgtctcctggaattacattgaatatacagacaagcactggaaaagtattcagcgtgattgcttcgtttgaagatgatgtggaaataacattatacaaacatggaggattattaaactttgtggcacgaaaattctcatagtatctacttaccatagatacctttcataactggtaactgcaaagccttttgtgctggacccaggaatccttaccatggagcagcagatagtcccagtatactcacttatctcatccatggatgtaaatgatgatgaatcaacatagtaactgaaatgaaatcttcttgattttaaataatatacgaatggtgctattaatattgctaaaatcaacgtgtgaagtgtgttgtggaagagacctgtaagtatgggggggggcgatattttatcagaccattttgtaaataaaggcagaatttgtgttga

SEQ ID NO: 316250 - DNA, 3750 bp, Homo sapiens
gagtaggagttactgattacatgcaatcaatatttggtgtaaaatgaatgtgagtagtgagtataacttccccaattaataagtcaaaatctaaatgcagctatttttctacttaactatgaagcccatggtcaggtatctcaggtgtttttcaagcagcagcaaagtttcaggcaatcagaatataagaaattagaaccaagataaatcagacagaatctgtggcaagtatagtcattaaatatgaagacaaatggtcttaaccatcaagtagcacctggaagatttacttgctcacatgagatgtttttgctcctttcaagacaagcactggaaaagtattcagcgtgattgcttcgtttgaagatgatgtggaaataacattatacaaacatggaggattattaaactttgtggcacgaaaattctcatagtatctacttaccatagatacctttcataactggtaactgcaaagccttttgtgctggacccaggaatccttaccatggagcagcagatagtcccagtatactcacttatctcatccatggatgtaaatgatgatgaatcaacatagtaactgaaatgaaatcttcttgattttaaataatatacgaatggtgctattaatattgctaaaatcaacgtgtgaagtgtgttgtggaagagacctgtaagtatgggggggggcgatattttatcagaccattttgtaaataaaggcagaatttgtgttgaagattcttatatgaataaccttcctggatttgtttagttttgcaccaataaaactgtgtactactgtttgttggtttaagagtagcagattgaaatataagaagccagattagactctaaaattgtggccattggaatctcatttataaatggaccttttaagtatattaattcctcttcagaattgagctggacacatttggcattcttagtttgtcatataaccaggtttatccttagtctaactgcaagggatagaacctgccccaggtcacaatcattctgtccaatccagccaaggttccctccacatatgaagatggaccatggcaggatacaactgattgtgtggcaccatgtattagcagtgggaatatgtatcacatatgatgcagcctttcatatttcagcagtttgccactgtgactgtctggcaagcccccagatggcgttatattaattggattagattattttgctcaccttatgtaatactgtaacttcctataacctaatattttcggtatcattaaccaaaatttcacactcatagttgctaaagagaatgttattcaatcattaaactctgaactgatttcttctatacatttaaattatccaccctcaataatacgggtgctcaaccctatgcattttttaagtgttgctatttcttaattaaattgatttcctgtcattttgaatcatttatcacctgcgatgcatgattctattaattttgttatgttactgttttaaccaaagctgaccgtaaggataaaacacttaagttgttgctgagtactatatatcctcaatatgcatgtctgcccatcacatcaaatgttctgtcaacaagatgtttggtaattttttttaaaaaggttggaaaattaattatagaaggttctatactgtttttttaattaagaaactaaatctagcaggctaaaggttaattgtagtgattttttttcacatagatatctttctatgacctagttagttactgcaattcagaattagttcacattgcataaagaattacttgttgtaagcaaaatgctgaaactaccaaaccagtggatgaagaccactaagaactttgcacataatcatacaatcttttgaaaatattttgcaaatatgtgtttagacaataagatggactagagttcgacaaaatgatttctttatttaaattttgtataagtattttcttcgacactttcaaattatattgtgttcttgatatatgctgtatatttatttgttagtgcatgtgtttttaatttacatgaaaacatgagttaggagaaattacaggttgaaagatgaaatgcctgtatgtgctctgaagaaatggtaattccagattgtgcagggggaaacaaatctattttgttttgttttgttttttgagacggagtcttgccctgtggctgggctggagtgcaatggcgcgatcttggctcactgcaacctccgcctcccgggttcaggggattctcctgcctcagcctcctgagtagctgggactacaagcatgcaccaccacgcccagctaatttttgtagttttagtagagatggggtttcaccatgctggccagatgatctgaatctcttgacctcgtgatccgcccgccttggcctccacaagtgctgggattacaggtgtgagccaccacacccggcctatattgttttgaaagcatactctatatatagttatgggcagaggcacaggcatcctcagcagctgattcaggagatgatggtaaagctagctaactatgaattaaacattcacatatccagtctacctggtccagtaataatacaagcaaatcttgtatttcaggaacaaatcaaggttctcttaattttttggcttatatacaatgaagtaaaaacttgataaacatggtttcaaattgaggaggagagtcttggatgtatgttttaatatgtataccttataattctgcctctagccaaatgctatgtttgcaaaatgtggcatctgttagtttttattgtctgtgtcttctttgtttactataccttgggtaattttgtgttaccaaaaaaaaaaaaaaaaaaggaagtgtaatgtcagacacacaagaaaagcaaatcagtgttgtaagcttaaagtacaatttcaaaggtcattaccaacagcagggtttttttttatactttaaaaacattatgctacatatcattgccattttcatattttggggttttgctactcttatacaatggaatcaatggaaatgtcatccagccactgaattgccattattatatctaaaaagtttctaagatgacagttatcactattttgttttatctccatgctgacatttgaaagaaggtactagtatccctctagccagattgcttagtttttcgttggtaatcaaacaacagttgtactaaaggaaagtaaagctaggacctaaatcagaatcatagttgcctgcatatatggtaacaaggtcgtgtgcatttgctttcacagtgatgagtgagaggatgagaagaaattatttgacatttttctgtggttgaatagaagacacctttcttttgtctttaggtttaggaggagatactaagatactggatgtttatcctatcttagtttggttggagtaataagagagaagaagagggtggactttggcttttcagtgttttttcccctaaagagtgatattgctgacgtttctatcaattttacacataatatgtggctatgaaaccatatatctcacttaagtaacaaagtaatcactttgtctatcactaagtaatagacaaaaatcattgtctattatttaaagccaacaaaacagtgtaacagttttaagttcaataatgttaagtattgtatagaaatatattggaggcaaagttcagttgatgacaattgtgtatatgttactgatgctgtaaattatttttaataaagaaaattgtattatcaaaaaaaaat

SEQ ID NO: 316251 - DNA, 1658 bp, Homo sapiens
cgattactttcaaaaagtgaatcgtgtttaaaatactactaaagaaaattactgtttccactgttctgtgaggtgagcatgtcaaaggtggggtatattcggcctctatcactgtgtcattcgtttatcttttgtcttctcttttagtggtcacactcgtgttgcaaagcctcctgagtagctgggactacaagcatgcaccaccacgcccagctaatttttgtagttttagtagagatggggtttcaccatgctggccagatgatctgaatctcttgacctcgtgatccgcccgccttggcctccacaagtgctgggattacaggtgtgagccaccacacccggcctatattgttttgaaagcatactctatatatagttatgggcagaggcacaggcatcctcagcagctgattcaggagatgatggtaaagctagctaactatgaattaaacattcacatatccagtctacctggtccagtaataatacaagcaaatcttgtatttcaggaacaaatcaaggttctcttaattttttggcttatatacaatgaagtaaaaacttgataaacatggtttcaaattgaggaggagagtcttggatgtatgttttaatatgtataccttataattctgcctctagccaaatgctatgtttgcaaaatgtggcatctgttagtttttattgtctgtgtcttctttgtttactataccttgggtaattttgtgttaccaaaaaaaaaaaaaaaaaaggaagtgtaatgtcagacacacaagaaaagcaaatcagtgttgtaagcttaaagtacaatttcaaaggtcattaccaacagcagggtttttttttatactttaaaaacattatgctacatatcattgccattttcatattttggggttttgctactcttatacaatggaatcaatggaaatgtcatccagccactgaattgccattattatatctaaaaagtttctaagatgacagttatcactattttgttttatctccatgctgacatttgaaagaaggtactagtatccctctagccagattgcttagtttttcgttggtaatcaaacaacagttgtactaaaggaaagtaaagctaggacctaaatcagaatcatagttgcctgcatatatggtaacaaggtcgtgtgcatttgctttcacagtgatgagtgagaggatgagaagaaattatttgacatttttctgtggttgaatagaagacacctttcttttgtctttaggtttaggaggagatactaagatactggatgtttatcctatcttagtttggttggagtaataagagagaagaagagggtggactttggcttttcagtgttttttcccctaaagagtgatattgctgacgtttctatcaattttacacataatatgtggctatgaaaccatatatctcacttaagtaacaaagtaatcactttgtctatcactaagtaatagacaaaaatcattgtctattatttaaagccaacaaaacagtgtaacagttttaagttcaataatgttaagtattgtatagaaatatattggaggcaaagttcagttgatgacaattgtgtatatgttactgatgctgtaaattatttttaataaagaaaattgtattatcaaaaaaaaat

SEQ ID NO: 316252 - DNA, 2864 bp, Homo sapiens
gcccccttcttcccccgctggccccctccccggagggataatatggtctccggcgatggacgccccaaaagcaggatacgcctttgagtaccttattgaaacattaaatgacagttcacataagaagttcttcgatgtatctaaacttggcaccaagtatgatgttctgccttactcaatacgggtcttgttggaagctgctgtacgaaattgtgatggctttttaatgaagaaggaagatgttatgaacattttagactggaaaaccaaacaaagcaatgttgaagtgccctttttccctgcccgtgttcttcttcaagattttactggaataccagcaatggtggattttgctgctatgagggaggcagtgaaaactcttggaggtgatcctgagaaagtccatcctgcttgtccgacagatcttacagttgaccattctttacaaattgacttcagtaaatgtgcaatacagaatgcaccaaatcctggaggtggtgacctgcagaaagcaggaaagctctctccacttaaagtgcagcctaagaagcttccctgcagaggccagactacctgccgaggatcttgtgattctggagaactaggccgaaactcaggaacattttcttcgcagattgagaatacacccatcctgtgtccttttcatttgcaaccagtgcctgaacctgaaacagtgttaaaaaatcaagaagtagaattcggcagaaatcgagagaggcttcagttttttaagtggagttcaagagtttttaagaatgtggcagtgatccctcctggaactggaatggctcatcaaataaacttagaatatttgtcaagagtggtttttgaagaaaaagacctcctcttcccagacagtgtagtcggcacagattcacacataacgatggtgaatggtttagggattctggggtggggggttggaggcattgaaacagaagcagttatgcttggtctgccagtttctcttactttaccagaggtggttggatgtgagttaactgggtcatcaaacccttttgttacatccatagatgttgttcttggtattacaaagcacctcaggcaagtaggagtggctggaaagtttgttgagttttttggaagtggagtttcacaattatctatagttgatcgaactacaatagcaaacatgtgtccggaatatggtgctatcctcagctttttccctgttgacaatgtgacattaaaacatttagaacatacaggttttagcaaagccaaactcgaatcaatggaaacataccttaaagctgtgaaattgtttcgaaatgaccagaattcttcaggagaacctgaatactcccaggtgatccagattaatctgaattcaatagttccatctgttagtggtccaaaaagacctcaggatagagttgctgtgacagatatgaaaagcgatttccaggcttgcttaaatgaaaaggttggatttaaaggcttccaaattgcagctgaaaaacaaaaggatattgtctccattcattatgaaggaagtgaatataagctgtctcatggatcagtggtcattgctgcagttatcagttgtaccaataattgcaatccatctgtcatgcttgctgcaggtcttttggctaaaaaggctgttgaagctggtctgcgtgttaaaccttatataagaacaagtttatctccaggcagtgggatggttacacattacctcagttcaagtggagtattaccatatctaagtaagcttggatttgaaatcgttggctatggatgttcaacttgtgtgggaaatacagcacccttatcagacgcagttttaaatgcagtaaaacagggtgatttggttacctgtggaattttatctggaaacaaaaattttgaaggtcgtctttgtgattgtgttcgtgccaattatcttgcctctccacccttagtggtagcttatgccatagcaggcacagtgaatatagatttccagacagaacctttaggtactgaccccaccggcaagaacatttacctgcatgatatttggcctagtcgagaagaagttcatcgagtagaggaagaacatgttatactatccatgtttaaagcattaaaagataaaatagaaatggggaataaacggtggaattccttagaagcaccggattcagttttgtttccatgggacttaaagtctacttatatcagatgcccttcattttttgataaacttaccaaagagccaattgcactccaggctattgaaaatgcccatgtcttattatatttgggagactctgtcacaacagatcatatatcacctgcaggaagtatcgctaggaatagtgctgccgctaagtatttgacaaacagaggccttacccctcgtgaattcaactcttacggagctcgaagaggtaatgatgctgtaatgacaagaggcacttttgcaaatatcaagctttttaataagtttattggaaaaccagctcctaaaacaattcattttccatcaggacagacgctagatgtatttgaggctgcagagctgtaccagaaagaaggtatcccactgattattttagcaggaaagaaatatggttcaggaaactccagagactgggctgccaaaggaccgtatttactgggtgtgaaagctgttttggctgaaagttatgaaaaaatacacaaagatcatttgattggaattggcatagctccacttcagttccttccaggagaaaatgcagattccttgggcctctccggtagagaaacattttctttaacatttcctgaagaactgtctcctggaattacattgaatatacaggtatctctaaatttttcaaatatatgat

SEQ ID NO: 316253 - DNA, 183 bp, Homo sapiens
tcacacataacgatggtgaatggtttagggattctggggtggggtaagtaaatgactaaatatatttcatttcttttggggtaaggatgtcaagaacattgtaaaagaacataaattattgagtttgtatagcctctttgaggctctgtgtttttcatctgtaataacagcagcaacaacaaa

SEQ ID NO: 316254 - DNA, 155 bp, Homo sapiens
cagcaatggtggattttgctgctatgagggaggcagtgaaaactcttggaggtgatcctgagaaagtccatcctgcttgtccgacagatcttacagttgaccattctttacaaattgacttcagtaaatggtacttcaatgcagatatttataga

SEQ ID NO: 316255 - DNA, 748 bp, Homo sapiens
ggattgctagagccacggtgttggaagctgcagtgagctgtgaccacaccactgcgctccagcctgggcaacagagtgagaccctgtttctaaaagaaagaaagaaaaagggctgccacctaaacagacacactattgagttgaggtaccctgatttcaaagacatgaaaatgttaattatagccaccttgagctttcaggcccctttctaccctgattaacagtgacattggaccagtcttctctttacttcttatcttaaaatacccccaaaaccagaatgagttgattcataaggacaatgaaggatctcattccttcaccatcactagtattggttaaaaattttattttatagttttcagacaatcgttgctaatcttatctttgcaattttgtatgtgtttctgtgtattccttatatagcacctcaggcaagtaggagtggctggaaagtttgttgagttttttggaagtggagtttcacaattatctatagttgatcgaactacaatagcaaacatgtgtccggaatatggtgctatcctcagctttttccctgttgacaatgtgacattaaaacatttagaacatacaggtaagaagataaaagatcactagaataaacatgttacatttccaatgtgtttgataatattttataaattactaccttatccatgttatttactattcacaaaattacattatgttgaaacaacaactttcaagcaaacatcagatgtct

SEQ ID NO: 316256 - DNA, 1694 bp, Homo sapiens
tcctgcagaccagagaggacgcacccccacccctaaacactttctggtgaggcggaccctgccccgcagccttcagcagatgagggaagctcccctccgagactctggatagccgccgggggggcgttgcctggccggctggttgcgtagcaacggcaggcggtgcgtgacgtgcgcagcgcgttccgtcctgaggcgcgcccgccccggggtaagctcgcgccgccgcgtcagctcagcgctgggtctctcggtcccgcagccgtgaggaggacggtctgcatactcgctgcccgccggctccctcccccgcgtccctgcgaccgccgcggcgaagatggcctcaggagtgcaagtagctgatgaagtatgtcgcattttttatgacatgaaagttcgtaaatgctccacaccagaagaaatcaagaaaagaaagaaggctgtcattttttgtctcagtgcagacaaaaagtgcatcattgtagaagaaggcaaagagatcttggttggagatgttggtgtaaccataactgatcctttcaagcattttgtgggaatgcttcctgaaaaagattgtcgctatgctttgtatgatgcaagctttgaaacaaaagaatccagaaaagaagagttgatgttttttttgtgggcaccagaactagcacctctgaaaagtaaaatgatctatgcaagctccaaggatgcaattaaaaagaaatttcaaggcataaaacatgaatgtcaagcaaatggaccagaagatctcaatcgggcttgtattgctgaaaagttaggtggatccttaattgtagcctttgaaggatgccctgtgtagattattcagtgccacaaattgaaagcttccatgtttaatgttatcctcttgctatataaataaagcaaatatatttaggccagggtctcactgagggggagctgtcttgtcatcttttagagtaaactattctataaacatatgcaaacagccctaaataaatctaaagtctaaagttttattgatgtgaaattaaattcttattggccaaatgcctgttttgatgagttgatttataaagatttttgttaagctcaggattttaaattacacagttcacaaacagtaaaggccatgtgaagagaattattacatctttattaacctcagcatttactttgtttcttttgcttaggaaattgctcataatctggttataattttggtccaaattctttattcttccttgagctaagcagaataatggaatataatatgtcttcataatataacaacactaatacactaatagtaagattaagttaggcagtcttctaccaaatgtgtaatggagattgcctcaaaattgtgtccacataatccacgctcatcttgcaaagcgctatttcaggcacatcattggaatacaggaagtagccctgcacctgccagtgagctcgccattcactgattggaagagtgacctggcatcttggaaatcattgtgtgtcttcaggagaatgtgcagtgtcttgtaacaactaattataatgcaaattagggctacattgtaatctgctttgttaatgaaaatgataaaacagaatattgacaagctaggacacctgtggtatctttaattgtatctccttcagaagtttgcttcttatggtataataaagtatggaagaatattgag

SEQ ID NO: 316257 - DNA, 1015 bp, Homo sapiens
tcctgcagaccagagaggacgcacccccacccctaaacactttctggtgaggcggaccctgccccgcagccttcagcagatgagggaagctcccctccgagactctggatagccgccgggggggcgttgcctggccggctggttgcgtagcaacggcaggcggtgcgtgacgtgcgcagcgcgttccgtcctgaggcgcgcccgccccggggtaagctcgcgccgccgcgtcagctcagcgctgggtctctcggtcccgcagccgtgaggaggacggtctgcatactcgctgcccgccggctccctcccccgcgtccctgcgaccgccgcggcgaagatggcctcaggagtgcaagtagctgatgaagtatgtcgcattttttatgacatgaaagttcgtaaatgctccacaccagaagaaatcaagaaaagaaagaaggctgtcattttttgtctcagtgcagacaaaaagtgcatcattgtagaagaaggcaaagagatcttggttggagatgttggtgtaaccataactgatcctttcaagcattttgtgggaatgcttcctgaaaaagattgtcgctatgctttgtatgatgcaagctttgaaacaaaagaatccagaaaagaagagttgatgttttttttgtgggcaccagaactagcacctctgaaaagtaaaatgatctatgcaagctccaaggatgcaattaaaaagaaatttcaaggcataaaacatgaatgtcaagcaaatggaccagaagatctcaatcgggcttgtattgctgaaaagttaggtggatccttaattgtagcctttgaaggatgccctgtgtagattattcagtgccacaaattgaaagcttccatgtttaatgttatcctcttgctatataaataaagcaaatatatttaggccagggtctcactgagggggagctgtcttgtcatcttttagagtaaactattctataaacatatgcaaacagccctaaataaatctaaagtctaaagtttt

SEQ ID NO: 316258 - DNA, 1045 bp, Homo sapiens
tcctgcagaccagagaggacgcacccccacccctaaacactttctggtgaggcggaccctgccccgcagccttcagcagatgagggaagctcccctccgagactctggatagccgccgggggggcgttgcctggccggctggttgcgtagcaacggcaggcggtgcgtgacgtgcgcagcgcgttccgtcctgaggcgcgcccgccccggggtaagctcgcgccgccgcgtcagctcagcgctgggtctctcggtcccgcagccgtgaggaggacggtctgcatactcgctgcccgccggctccctcccccgcgtccctgcgaccgccgcggcgaagatggcctcaggagtgcaagtagctgatgaagtatgtcgcattttttatgacatgaaagttcgtaaatgctccacaccagaagaaatcaagaaaagaaagaaggctgtcattttttgtctcagtgcagacaaaaagtgcatcattgtagaagaaggcaaagagatcttggttggagatgttggtgtaaccataactgatcctttcaagcattttgtgggaatgcttcctgaaaaagattgtcgctatgctttgtatgatgcaagctttgaaacaaaagaatccagaaaagaagagttgatgttttttttgtgggcaccagaactagcacctctgaaaagtaaaatgatctatgcaagctccaaggatgcaattaaaaagaaatttcaaggcataaaacatgaatgtcaagcaaatggaccagaagatctcaatcgggcttgtattgctgaaaagttaggtggatccttaattgtagcctttgaaggatgccctgtgtagattattcagtgccacaaattgaaagcttccatgtttaatgttatcctcttgctatataaataaagcaaatatatttaggccagggtctcactgagggggagctgtcttgtcatcttttagagtaaactattctataaacatatgcaaacagccctaaataaatctaaagtctaaagttttattgatgtgaaattaaattcttattggcca

SEQ ID NO: 316259 - DNA, 831 bp, Homo sapiens
tcctgcagaccagagaggacgcacccccacccctaaacactttctggtgaggcggaccctgccccgcagccttcagcagatgagggaagctcccctccgagactctggatagccgccgggggggcgttgcctggccggctggttgcgtagcaacggcaggcggtgcgtgacgtgcgcagcgcgttccgtcctgaggcgcgcccgccccggggtaagctcgcgccgccgcgtcagctcagcgctgggtctctcggtcccgcagccgtgaggaggacggtctgcatactcgctgcccgccggctccctcccccgcgtccctgcgaccgccgcggcgaagatggcctcaggagtgcaagtagctgatgaagtatgtcgcattttttatgacatgaaagttcgtaaatgctccacaccagaagaaatcaagaaaagaaagaaggctgtcattttttgtctcagtgcagacaaaaagtgcatcattgtagaagaaggcaaagagatcttggttggagatgttggtgtaaccataactgatcctttcaagcattttgtgggaatgcttcctgaaaaagattgtcgctatgctttgtatgatgcaagctttgaaacaaaagaatccagaaaagaagagttgatgttttttttgtggtaagcatgttagaaatattgagcctctgtaaaactcattttgttagcactcgggaagaccagttccagcaccaaagtaatttttattcaaactatttgcagttgttgtcatttaatttttatttacaggtttcataatgttaccagggctgatgtttatgggacccaaactaaattttgact

SEQ ID NO: 316260 - DNA, 574 bp, Homo sapiens
atgctatacctatatatataatagaatatatgcattttaaatctggattctttcagtgaatgctgtttgtgaggcccatctatcttgatgcatgtagttacaattattttttctcgttactgtgtagtattccgtgtttgtatataccccagtttatccagattagaactggtcttttaaaagtttggttatcttagagaaagaggtaaactgctgccataattgtaaatagaagtgttgttttttctctctaggcataaaacatgaatgtcaagcaaatggaccagaagatctcaatcgggcttgtattgctgaaaagttaggtggatccttaattgtagcctttgaaggatgccctgtgtagattattcagtgccacaaattgaaagcttccatgtttaatgttatcctcttgctatataaataaagcaaatatatttaggccagggtctcactgagggggagctgtcttgtcatcttttagagtaaactattctataaacatatgcaaacagccctaaataaatctaaagtctaaagttttattgatgtgaaattaaattcttattggcca

SEQ ID NO: 316261 - DNA, 1931 bp, Homo sapiens
tcctgcagaccagagaggacgcacccccacccctaaacactttctggtgaggcggaccctgccccgcagccttcagcagatgagggaagctcccctccgagactctggatagccgccgggggggcgttgcctggccggctggttgcgtagcaacggcaggcggtgcgtgacgtgcgcagcgcgttccgtcctgaggcgcgcccgccccggggtaagctcgcgccgccgcgtcagctcagcgctgggtctctcggtcccgcagccgtgaggaggacggtctgcatactcgctgcccgccggctccctcccccgcgtccctgcgaccgccgcggcgaagatggcctcaggagtgcaagtagctgatgaagtatgtcgcattttttatgacatgaaagttcgtaaatgctccacaccagaagaaatcaagaaaagaaagaaggctgtcattttttgtctcagtgcagacaaaaagtgcatcattgtagaagaaggcaaagagatcttggttggagatgttggtgtaaccataactgatcctttcaagcattttgtgggaatgcttcctgaaaaagattgtcgctatgctttgtatgatgcaagctttgaaacaaaagaatccagaaaagaagagttgatgttttttttgtgggcaccagaactagcacctctgaaaagtaaaatgatctatgcaagctccaaggatgcaattaaaaagaaatttcaaggcataaaacatgaatgtcaagcaaatggaccagaagatctcaatcgggcttgtattgctgaaaagttaggtggatccttaattgtagcctttgaaggatgccctgtgtagattattcagtgccacaaattgaaagcttccatgtttaatgttatcctcttgctatataaataaagcaaatatatttaggccagggtctcactgagggggagctgtcttgtcatcttttagagtaaactattctataaacatatgcaaacagccctaaataaatctaaagtctaaagttttattgatgtgaaattaaattcttattggccaaatgcctgttttgatgagttgatttataaagatttttgttaagctcaggattttaaattacacagttcacaaacagtaaaggccatgtgaagagaattattacatctttattaacctcagcatttactttgtttcttttgcttaggaaattgctcataatctggttataattttggtccaaattctttattcttccttgagctaagcagaataatggaatataatatgtcttcataatataacaacactaatacactaatagtaagattaagttaggcagtcttctaccaaatgtgtaatggagattgcctcaaaattgtgtccacataatccacgctcatcttgcaaagcgctatttcaggcacatcattggaatacaggaagtagccctgcacctgccagtgagctcgccattcactgattggaagagtgacctggcatcttggaaatcattgtgtgtcttcaggagaatgtgcagtgtcttgtaacaactaattataatgcaaattagggctacattgtaatctgctttgttaatgaaaatgataaaacagaatattgacaagctaggacacctgtggtatctttaattgtatctccttcagaagtttgcttcttatggtataataaagtatggaagaatattgagtatatgtttactctgggcctgggagaacttaactttctagagcagtttgttgacttgtgtgcaatggggagaggtaccatgatgacactcacagggagccactgttcactgacacttggaagcggtcattgttaatatcacgggcgtaacactttgaacgatatagagatgcacaaacagttgaacttagaagtagcagtattggctttatgtaataaaggaagcatttttgactta

SEQ ID NO: 316262 - DNA, 2648 bp, Homo sapiens
tcctgcagaccagagaggacgcacccccacccctaaacactttctggtgaggcggaccctgccccgcagccttcagcagatgagggaagctcccctccgagactctggatagccgccgggggggcgttgcctggccggctggttgcgtagcaacggcaggcggtgcgtgacgtgcgcagcgcgttccgtcctgaggcgcgcccgccccggggtaagctcgcgccgccgcgtcagctcagcgctgggtctctcggtcccgcagccgtgaggaggacggtctgcatactcgctgcccgccggctccctcccccgcgtccctgcgaccgccgcggcgaagatggcctcaggagtgcaagtagctgatgaagtatgtcgcattttttatgacatgaaagttcgtaaatgctccacaccagaagaaatcaagaaaagaaagaaggctgtcattttttgtctcagtgcagacaaaaagtgcatcattgtagaagaaggcaaagagatcttggttggagatgttggtgtaaccataactgatcctttcaagcattttgtgggaatgcttcctgaaaaagattgtcgctatgctttgtatgatgcaagctttgaaacaaaagaatccagaaaagaagagttgatgttttttttgtgggcaccagaactagcacctctgaaaagtaaaatgatctatgcaagctccaaggatgcaattaaaaagaaatttcaaggcataaaacatgaatgtcaagcaaatggaccagaagatctcaatcgggcttgtattgctgaaaagttaggtggatccttaattgtagcctttgaaggatgccctgtgtagattattcagtgccacaaattgaaagcttccatgtttaatgttatcctcttgctatataaataaagcaaatatatttaggccagggtctcactgagggggagctgtcttgtcatcttttagagtaaactattctataaacatatgcaaacagccctaaataaatctaaagtctaaagttttattgatgtgaaattaaattcttattggccaaatgcctgttttgatgagttgatttataaagatttttgttaagctcaggattttaaattacacagttcacaaacagtaaaggccatgtgaagagaattattacatctttattaacctcagcatttactttgtttcttttgcttaggaaattgctcataatctggttataattttggtccaaattctttattcttccttgagctaagcagaataatggaatataatatgtcttcataatataacaacactaatacactaatagtaagattaagttaggcagtcttctaccaaatgtgtaatggagattgcctcaaaattgtgtccacataatccacgctcatcttgcaaagcgctatttcaggcacatcattggaatacaggaagtagccctgcacctgccagtgagctcgccattcactgattggaagagtgacctggcatcttggaaatcattgtgtgtcttcaggagaatgtgcagtgtcttgtaacaactaattataatgcaaattagggctacattgtaatctgctttgttaatgaaaatgataaaacagaatattgacaagctaggacacctgtggtatctttaattgtatctccttcagaagtttgcttcttatggtataataaagtatggaagaatattgagtatatgtttactctgggcctgggagaacttaactttctagagcagtttgttgacttgtgtgcaatggggagaggtaccatgatgacactcacagggagccactgttcactgacacttggaagcggtcattgttaatatcacgggcgtaacactttgaacgatatagagatgcacaaacagttgaacttagaagtagcagtattggctttatgtaataaaggaagcatttttgacttacctctcgtgtaattttcatgtgtgaattgggaatacaggattttgccttccatatggggtaaggcattgaggtttgggtatttccaataattaagagttaaggttggctgagtgtccttggcctcctaaagtgctgtgattacaggtgtgagccactgtgtcctgctagtgattgtgattaacaggcctccagggaagtgccataagcccaagactgccgtactcaaaagtcagccatgtaggtaaagcaagatatttggtcaaggagttttagaaggagatttttcctgtggtgttggcttaagtgtggcactgttgtgcgtgtgtgaggtgtcttctgtgggaaggatttcaaacagtacaaagggatgtgatgtaagcatccagaactcactccagaaattgaataaaatgctagtagttagtctctaggggaacttttgagaaagtctcagtggattcctgaggcccaagaattgtgctaacaagcactcaaggcgattctggtacataattagggttcagacctcagctgattggtctactgttggtcaggaacaaaactgcaagtatactctgtttccagaaaatacgtttacctcttcacaaatgctaacacactgcaaaaatatgtttgtggaaagctgacttagtctcatctagcggttactctcttgccctgacaaagcagcaaataaagccattgctaacaattca

SEQ ID NO: 316263 - DNA, 2095 bp, Homo sapiens
tcctgcagaccagagaggacgcacccccacccctaaacactttctggtgaggcggaccctgccccgcagccttcagcagatgagggaagctcccctccgagactctggatagccgccgggggggcgttgcctggccggctggttgcgtagcaacggcaggcggtgcgtgacgtgcgcagcgcgttccgtcctgaggcgcgcccgccccggggtaagctcgcgccgccgcgtcagctcagcgctgggtctctcggtcccgcagccgtgaggaggacggtctgcatactcgctgcccgccggctccctcccccgcgtccctgcgaccgccgcggcgaagatggcctcaggagtgcaagtagctgatgaagtatgtcgcattttttatgacatgaaagttcgtaaatgctccacaccagaagaaatcaagaaaagaaagaaggctgtcattttttgtctcagtgcagacaaaaagtgcatcattgtagaagaaggcaaagagatcttggttggagatgttggtgtaaccataactgatcctttcaagcattttgtgggaatgcttcctgaaaaagattgtcgctatgctttgtatgatgcaagctttgaaacaaaagaatccagaaaagaagagttgatgttttttttgtgggcaccagaactagcacctctgaaaagtaaaatgatctatgcaagctccaaggatgcaattaaaaagaaatttcaaggcataaaacatgaatgtcaagcaaatggaccagaagatctcaatcgggcttgtattgctgaaaagttaggtggatccttaattgtagcctttgaaggatgccctgtgtagattattcagtgccacaaattgaaagcttccatgtttaatgttatcctcttgctatataaataaagcaaatatatttaggccagggtctcactgagggggagctgtcttgtcatcttttagagtaaactattctataaacatatgcaaacagccctaaataaatctaaagtctaaagttttattgatgtgaaattaaattcttattggccaaatgcctgttttgatgagttgatttataaagatttttgttaagctcaggattttaaattacacagttcacaaacagtaaaggccatgtgaagagaattattacatctttattaacctcagcatttactttgtttcttttgcttaggaaattgctcataatctggttataattttggtccaaattctttattcttccttgagctaagcagaataatggaatataatatgtcttcataatataacaacactaatacactaatagtaagattaagttaggcagtcttctaccaaatgtgtaatggagattgcctcaaaattgtgtccacataatccacgctcatcttgcaaagcgctatttcaggcacatcattggaatacaggaagtagccctgcacctgccagtgagctcgccattcactgattggaagagtgacctggcatcttggaaatcattgtgtgtcttcaggagaatgtgcagtgtcttgtaacaactaattataatgcaaattagggctacattgtaatctgctttgttaatgaaaatgataaaacagaatattgacaagctaggacacctgtggtatctttaattgtatctccttcagaagtttgcttcttatggtataataaagtatggaagaatattgagagaatataagaatactgacaatatcaaaagagtaactctgggcaaacatatggagctccataatgtgtgcccaactgctcagagtaacactgttctcaaatgtttaaaaaggacaggtgaagtctgggtctccttttttaaagcagacaccaatacttacataactagtacatgttggcctttcaccagcactcactggcactcacaggtgccttacataccttacgggggccaacactgacaggtattagtacgtcgcaagttgctgtaataatgtatttcctctcgttactgttgtgtcccccaagacacatgcaaattatttcctagacttcattcatcacagccagatgatgccaccagaagataccctccatggcatatggcacacctaagaggcc

SEQ ID NO: 316264 - DNA, 1671 bp, Homo sapiens
  misc_feature (1637)..(1637): n is a, c, g, or t
tcctgcagaccagagaggacgcacccccacccctaaacactttctggtgaggcggaccctgccccgcagccttcagcagatgagggaagctcccctccgagactctggatagccgccgggggggcgttgcctggccggctggttgcgtagcaacggcaggcggtgcgtgacgtgcgcagcgcgttccgtcctgaggcgcgcccgccccggggtaagctcgcgccgccgcgtcagctcagcgctgggtctctcggtcccgcagccgtgaggaggacggtctgcatactcgctgcccgccggctccctcccccgcgtccctgcgaccgccgcggcgaagatggcctcaggagtgcaagtagctgatgaagtatgtcgcattttttatgacatgaaagttcgtaaatgctccacaccagaagaaatcaagaaaagaaagaaggctgtcattttttgtctcagtgcagacaaaaagtgcatcattgtagaagaaggcaaagagatcttggttggagatgttggtgtaaccataactgatcctttcaagcattttgtgggaatgcttcctgaaaaagattgtcgctatgctttgtatgatgcaagctttgaaacaaaagaatccagaaaagaagagttgatgttttttttgtgggcaccagaactagcacctctgaaaagtaaaatgatctatgcaagctccaaggatgcaattaaaaagaaatttcaaggcataaaacatgaatgtcaagcaaatggaccagaagatctcaatcgggcttgtattgctgaaaagttaggtggatccttaattgtagcctttgaaggatgccctgtgtagattattcagtgccacaaattgaaagcttccatgtttaatgttatcctcttgctatataaataaagcaaatatatttaggccagggtctcactgagggggagctgtcttgtcatcttttagagtaaactattctataaacatatgcaaacagccctaaataaatctaaagtctaaagttttattgatgtgaaattaaattcttattggccaaatgcctgttttgatgagttgatttataaagatttttgttaagctcaggattttaaattacacagttcacaaacagtaaaggccatgtgaagagaattattacatctttattaacctcagcatttactttgtttcttttgcttaggaaattgctcataatctggttataattttggtccaaattctttattcttccttgagctaagcagaataatggaatataatatgtcttcataatataacaacactaatacactaatagtaagattaagttaggcagtcttctaccaaatgtgtaatggagattgcctcaaaattgtgtccacataatccacgctcatcttgcaaagcgctatttcaggcacatcattggaatacaggaagtagccctgcacctgccagtgagctcgccattcactgattggaagagtgacctggcatcttggaaatcattgtgtgtcttcaggagaatgtgcagtgtcttgtaacaactaattataatgcaaattagggctacattgtaatctgctttgttaatgaaaatgataaaacagaatattgacaagaggacacgaatgttcaggacacgaangttcaggacacgaaagttcagaccgaatgttcca

SEQ ID NO: 316265 - DNA, 1663 bp, Homo sapiens
tcctgcagaccagagaggacgcacccccacccctaaacactttctggtgaggcggaccctgccccgcagccttcagcagatgagggaagctcccctccgagactctggatagccgccgggggggcgttgcctggccggctggttgcgtagcaacggcaggcggtgcgtgacgtgcgcagcgcgttccgtcctgaggcgcgcccgccccggggtaagctcgcgccgccgcgtcagctcagcgctgggtctctcggtcccgcagccgtgaggaggacggtctgcatactcgctgcccgccggctccctcccccgcgtccctgcgaccgccgcggcgaagatggcctcaggagtgcaagtagctgatgaagtatgtcgcattttttatgacatgaaagttcgtaaatgctccacaccagaagaaatcaagaaaagaaagaaggctgtcattttttgtctcagtgcagacaaaaagtgcatcattgtagaagaaggcaaagagatcttggttggagatgttggtgtaaccataactgatcctttcaagcattttgtgggaatgcttcctgaaaaagattgtcgctatgctttgtatgatgcaagctttgaaacaaaagaatccagaaaagaagagttgatgttttttttgtgggcaccagaactagcacctctgaaaagtaaaatgatctatgcaagctccaaggatgcaattaaaaagaaatttcaaggcataaaacatgaatgtcaagcaaatggaccagaagatctcaatcgggcttgtattgctgaaaagttaggtggatccttaattgtagcctttgaaggatgccctgtgtagattattcagtgccacaaattgaaagcttccatgtttaatgttatcctcttgctatataaataaagcaaatatatttaggccagggtctcactgagggggagctgtcttgtcatcttttagagtaaactattctataaacatatgcaaacagccctaaataaatctaaagtctaaagttttattgatgtgaaattaaattcttattggccaaatgcctgttttgatgagttgatttataaagatttttgttaagctcaggattttaaattacacagttcacaaacagtaaaggccatgtgaagagaattattacatctttattaacctcagcatttactttgtttcttttgcttaggaaattgctcataatctggttataattttggtccaaattctttattcttccttgagctaagcagaataatggaatataatatgtcttcataatataacaacactaatacactaatagtaagattaagttaggcagtcttctaccaaatgtgtaatggagattgcctcaaaattgtgtccacataatccacgctcatcttgcaaagcgctatttcaggcacatcattggaatacaggaagtagccctgcacctgccagtgagctcgccattcactgattggaagagtgacctggcatcttggaaatcattgtgtgtcttcaggagaatgtgcagtgtcttgtaacaactaattataatgcaaattagggctacattgtaatctgctttgttaatgaaaatgataaaacagaatattgacaacgatgttcacgaatggacacgaatgtatcagggtacgagctcgattcgtatca

SEQ ID NO: 316266 - DNA, 1826 bp, Homo sapiens
tcctgcagaccagagaggacgcacccccacccctaaacactttctggtgaggcggaccctgccccgcagccttcagcagatgagggaagctcccctccgagactctggatagccgccgggggggcgttgcctggccggctggttgcgtagcaacggcaggcggtgcgtgacgtgcgcagcgcgttccgtcctgaggcgcgcccgccccggggtaagctcgcgccgccgcgtcagctcagcgctgggtctctcggtcccgcagccgtgaggaggacggtctgcatactcgctgcccgccggctccctcccccgcgtccctgcgaccgccgcggcgaagatgattttcagttcacccactagaggcaaagacgtaagagagctaccagcgtattgagaggagatacacaggcactacgagaatggagtttagaagaaggtcagagccctgggcagtgttgggccaggctttagggcctcaggagtgcaagtagctgatgaagtatgtcgcattttttatgacatgaaagttcgtaaatgctccacaccagaagaaatcaagaaaagaaagaaggctgtcattttttgtctcagtgcagacaaaaagtgcatcattgtagaagaaggcaaagagatcttggttggagatgttggtgtaaccataactgatcctttcaagcattttgtgggaatgcttcctgaaaaagattgtcgctatgctttgtatgatgcaagctttgaaacaaaagaatccagaaaagaagagttgatgttttttttgtgggcaccagaactagcacctctgaaaagtaaaatgatctatgcaagctccaaggatgcaattaaaaagaaatttcaaggcataaaacatgaatgtcaagcaaatggaccagaagatctcaatcgggcttgtattgctgaaaagttaggtggatccttaattgtagcctttgaaggatgccctgtgtagattattcagtgccacaaattgaaagcttccatgtttaatgttatcctcttgctatataaataaagcaaatatatttaggccagggtctcactgagggggagctgtcttgtcatcttttagagtaaactattctataaacatatgcaaacagccctaaataaatctaaagtctaaagttttattgatgtgaaattaaattcttattggccaaatgcctgttttgatgagttgatttataaagatttttgttaagctcaggattttaaattacacagttcacaaacagtaaaggccatgtgaagagaattattacatctttattaacctcagcatttactttgtttcttttgcttaggaaattgctcataatctggttataattttggtccaaattctttattcttccttgagctaagcagaataatggaatataatatgtcttcataatataacaacactaatacactaatagtaagattaagttaggcagtcttctaccaaatgtgtaatggagattgcctcaaaattgtgtccacataatccacgctcatcttgcaaagcgctatttcaggcacatcattggaatacaggaagtagccctgcacctgccagtgagctcgccattcactgattggaagagtgacctggcatcttggaaatcattgtgtgtcttcaggagaatgtgcagtgtcttgtaacaactaattataatgcaaattagggctacattgtaatctgctttgttaatgaaaatgataaaacagaatattgacaagctaggacacctgtggtatctttaattgtatctccttcagaagtttgcttcttatggtataataaagtatggaagaatattgag

SEQ ID NO: 316267 - DNA, 1696 bp, Homo sapiens
tcctgcagaccagagaggacgcacccccacccctaaacactttctggtgaggcggaccctgccccgcagccttcagcagatgagggaagctcccctccgagactctggatagccgccgggggggcgttgcctggccggctggttgcgtagcaacggcaggcggtgcgtgacgtgcgcagcgcgttccgtcctgaggcgcgcccgccccggggtaagctcgcgccgccgcgtcagctcagcgctgggtctctcggtcccgcagccgtgaggaggacggtctgcatactcgctgcccgccggctccctcccccgcgtccctgcgaccgccgcggcgaagatggcctcaggagtgcaagtagctgatgaagtatgtcgcattttttatgacatgaaagttcgtaaatgctccacaccagaagaaatcaagaaaagaaagaaggctgtcattttttgtctcagtgcagacaaaaagtgcatcattgtagaagaaggcaaagagatcttggttggagatgttggtgtaaccataactgatcctttcaagcattttgtgggaatgcttcctgaaaaagattgtcgctatgctttgtatgatgcaagctttgaaacaaaagaatccagaaaagaagagttgatgttttttttgtgggcaccagaactagcacctctgaaaagtaaaatgatctatgcaagctccaaggatgcaattaaaaagaaatttcaaggcataaaacatgaatgtcaagcaaatggaccagaagatctcaatcgggcttgtattgctgaaaagttaggtggatccttaattgtagcctttgaaggatgccctgtgtagattattcagtgccacaaattgaaagcttccatgtttaatgttatcctcttgctatataaataaagcaaatatatttaggccagggtctcactgagggggagctgtcttgtcatcttttagagtaaactattctataaacatatgcaaacagccctaaataaatctaaagtctaaagttttattgatgtgaaattaaattcttattggccaaatgcctgttttgatgagttgatttataaagatttttgttaagctcaggattttaaattacacagttcacaaacagtaaaggccatgtgaagagaattattacatctttattaacctcagcatttactttgtttcttttgcttaggaaattgctcataatctggttataattttggtccaaattctttattcttccttgagctaagcagaataatggaatataatatgtcttcataatataacaacactaatacactaatagtaagattaagttaggcagtcttctaccaaatgtgtaatggagattgcctcaaaattgtgtccacataatccacgctcatcttgcaaagcgctatttcaggcacatcattggaatacaggaagtagccctgcacctgccagtgagctcgccattcactgattggaagagtgacctggcatcttggaaatcattgtgtgtcttcaggagaatgtgcagtgtcttgtaacaactaattataatgcaaattaggccactgttcactgacacttggaagcggtcattgttaatatcacgggcgtaacactttgaacgatatagagatgcacaaacagttgaacttagaagtagcagtattggctttatgtaataaaggaagcatttttgactta

SEQ ID NO: 316268 - DNA, 1405 bp, Homo sapiens
aaatatacgggtagtctactgatgtagatgcttgtgtactactcattcccagcctcaggagtgcaagtagctgatgaagtatgtcgcattttttatgacatgaaagttcgtaaatgctccacaccagaagaaatcaagaaaagaaagaaggctgtcattttttgtctcagtgcagacaaaaagtgcatcattgtagaagaaggcaaagagatcttggttggagatgttggtgtaaccataactgatcctttcaagcattttgtgggaatgcttcctgaaaaagattgtcgctatgctttgtatgatgcaagctttgaaacaaaagaatccagaaaagaagagttgatgttttttttgtgggcaccagaactagcacctctgaaaagtaaaatgatctatgcaagctccaaggatgcaattaaaaagaaatttcaaggcataaaacatgaatgtcaagcaaatggaccagaagatctcaatcgggcttgtattgctgaaaagttaggtggatccttaattgtagcctttgaaggatgccctgtgtagattattcagtgccacaaattgaaagcttccatgtttaatgttatcctcttgctatataaataaagcaaatatatttaggccagggtctcactgagggggagctgtcttgtcatcttttagagtaaactattctataaacatatgcaaacagccctaaataaatctaaagtctaaagttttattgatgtgaaattaaattcttattggccaaatgcctgttttgatgagttgatttataaagatttttgttaagctcaggattttaaattacacagttcacaaacagtaaaggccatgtgaagagaattattacatctttattaacctcagcatttactttgtttcttttgcttaggaaattgctcataatctggttataattttggtccaaattctttattcttccttgagctaagcagaataatggaatataatatgtcttcataatataacaacactaatacactaatagtaagattaagttaggcagtcttctaccaaatgtgtaatggagattgcctcaaaattgtgtccacataatccacgctcatcttgcaaagcgctatttcaggcacatcattggaatacaggaagtagccctgcacctgccagtgagctcgccattcactgattggaagagtgacctggcatcttggaaatcattgtgtgtcttcaggagaatgtgcagtgtcttgtaacaactaattataatgcaaattagggctacattgtaatctgctttgttaatgaaaatgataaaacagaatattgacaagctaggacacctgtggtatctttaattgtatctccttcagaagtttgcttcttatggtataataaagtatggaagaatattgag

SEQ ID NO: 316269 - DNA, 1575 bp, Homo sapiens
tcctgcagaccagagaggacgcacccccacccctaaacactttctggtgaggcggaccctgccccgcagccttcagcagatgagggaagctcccctccgagactctggatagccgccgggggggcgttgcctggccggctggttgcgtagcaacggcaggcggtgcgtgacgtgcgcagcgcgttccgtcctgaggcgcgcccgccccggggtaagctcgcgccgccgcgtcagctcagcgctgggtctctcggtcccgcagccgtgaggaggacggtctgcatactcgctgcccgccggctccctcccccgcgtccctgcgaccgccgcggcgaagatggcctcaggagtgcaagtagctgatgaagtatgtcgcattttttatgacatgaaagttcgtaaatgctccacaccagaagaaatcaagaaaagaaagaaggctgtcattttttgtctcagtgcagacaaaaagtgcatcattgtagaagaaggcaaagagatcttggttggagatgttggtgtaaccataactgatcctttcaagcattttgtgggaatgcttcctgaaaaagattgtcgctatgctttgtatgatgcaagctttgaaacaaaagaatccagaaaagaagagttgatgttttttttgtgggcaccagaactagcacctctgaaaagtaaaatgatctatgcaagctccaaggatgcaattaaaaagaaatttcaaggcataaaacatgaatgtcaagcaaatggaccagaagatctcaatcgggcttgtattgctgaaaagttaggtggatccttaattgtagcctttgaaggatgccctgtgtagattattcagtgccacaaattgaaagcttccatgtttaatgttatcctcttgctatataaataaagcaaatatatttaggccagggtctcactgagggggagctgtcttgtcatcttttagagtaaactattctataaacatatgcaaacagccctaaataaatctaaagtctaaagttttattgatgtgaaattaaattcttattggccaaatgcctgttttgatgagttgatttataaagatttttgttaagctcaggattttaaattacacagttcacaaacagtaaaggccatgtgaagagaattattacatctttattaacctcagcatttactttgtttcttttgcttaggaaattgctcataatctggttataattttggtccaaattctttattcttccttgagctaagcagaataatggaatataatatgtcttcataatataacaacactaatacactaatagtaagattaagttaggcagtcttctaccaaatgtgtaatggagattgcctcaaaattgtgtccacataatccacgctcatcttgcaaagcgctatttcaggcacatcattggaatacaggaagtagccctgcacctgccagtgagctcgccattcactgattggtagcggatcacgactatcacccagtcattgtcatctttatgcggaatacacagtgacaccagacacctaaatataaagcacattcctttgcgttctagtccgact

SEQ ID NO: 316270 - DNA, 1716 bp, Homo sapiens
  misc_feature (1549)..(1549): n is a, c, g, or t
  misc_feature (1559)..(1559): n is a, c, g, or t
  misc_feature (1631)..(1631): n is a, c, g, or t
  misc_feature (1645)..(1645): n is a, c, g, or t
  misc_feature (1664)..(1664): n is a, c, g, or t
  misc_feature (1685)..(1685): n is a, c, g, or t
  misc_feature (1693)..(1693): n is a, c, g, or t
tcctgcagaccagagaggacgcacccccacccctaaacactttctggtgaggcggaccctgccccgcagccttcagcagatgagggaagctcccctccgagactctggatagccgccgggggggcgttgcctggccggctggttgcgtagcaacggcaggcggtgcgtgacgtgcgcagcgcgttccgtcctgaggcgcgcccgccccggggtaagctcgcgccgccgcgtcagctcagcgctgggtctctcggtcccgcagccgtgaggaggacggtctgcatactcgctgcccgccggctccctcccccgcgtccctgcgaccgccgcggcgaagatggcctcaggagtgcaagtagctgatgaagtatgtcgcattttttatgacatgaaagttcgtaaatgctccacaccagaagaaatcaagaaaagaaagaaggctgtcattttttgtctcagtgcagacaaaaagtgcatcattgtagaagaaggcaaagagatcttggttggagatgttggtgtaaccataactgatcctttcaagcattttgtgggaatgcttcctgaaaaagattgtcgctatgctttgtatgatgcaagctttgaaacaaaagaatccagaaaagaagagttgatgttttttttgtgggcaccagaactagcacctctgaaaagtaaaatgatctatgcaagctccaaggatgcaattaaaaagaaatttcaaggcataaaacatgaatgtcaagcaaatggaccagaagatctcaatcgggcttgtattgctgaaaagttaggtggatccttaattgtagcctttgaaggatgccctgtgtagattattcagtgccacaaattgaaagcttccatgtttaatgttatcctcttgctatataaataaagcaaatatatttaggccagggtctcactgagggggagctgtcttgtcatcttttagagtaaactattctataaacatatgcaaacagccctaaataaatctaaagtctaaagttttattgatgtgaaattaaattcttattggccaaatgcctgttttgatgagttgatttataaagatttttgttaagctcaggattttaaattacacagttcacaaacagtaaaggccatgtgaagagaattattacatctttattaacctcagcatttactttgtttcttttgcttaggaaattgctcataatctggttataattttggtccaaattctttattcttccttgagctaagcagaataatggaatataatatgtcttcataatataacaacactaatacactaatagtaagattaagttaggcagtcttctaccaaatgtgtaatggagattgcctcaaaattgtgtccacataatccacgctcatcttgcaaagcgctatttcaggcacttttttttgagaaagagtctcattctgtcgcccaggctggagtgcagtggcgcaatcttggctcacagtaacctctgcctcccgggttcaagcgattcccccgcctcagcctcccgactagctgggaccacaggcacgnaccaccacgnccggctcacctttgtatttttaagtagagatgggggcctcaccatattgggtcaggctgggtcttcaatctncctggacctcatgntccacccgccttgggcctnccaaaagtgcttggggattanagggaatngggccaccggggcttgggccaat

SEQ ID NO: 316271 - DNA, 1223 bp, Homo sapiens
atgctatacctatatatataatagaatatatgcattttaaatctggattctttcagtgaatgctgtttgtgaggcccatctatcttgatgcatgtagttacaattattttttctcgttactgtgtagtattccgtgtttgtatataccccagtttatccagattagaactggtcttttaaaagtttggttatcttagagaaagaggtaaactgctgccataattgtaaatagaagtgttgttttttctctctaggcataaaacatgaatgtcaagcaaatggaccagaagatctcaatcgggcttgtattgctgaaaagttaggtggatccttaattgtagcctttgaaggatgccctgtgtagattattcagtgccacaaattgaaagcttccatgtttaatgttatcctcttgctatataaataaagcaaatatatttaggccagggtctcactgagggggagctgtcttgtcatcttttagagtaaactattctataaacatatgcaaacagccctaaataaatctaaagtctaaagttttattgatgtgaaattaaattcttattggccaaatgcctgttttgatgagttgatttataaagatttttgttaagctcaggattttaaattacacagttcacaaacagtaaaggccatgtgaagagaattattacatctttattaacctcagcatttactttgtttcttttgcttaggaaattgctcataatctggttataattttggtccaaattctttattcttccttgagctaagcagaataatggaatataatatgtcttcataatataacaacactaatacactaatagtaagattaagttaggcagtcttctaccaaatgtgtaatggagattgcctcaaaattgtgtccacataatccacgctcatcttgcaaagcgctatttcaggcacatcattggaatacaggaagtagccctgcacctgccagtgagctcgccattcactgattggaagagtgacctggcatcttggaaatcattgtgtgtcttcaggagaatgtgcagtgtcttgtaacaactaattataatgcaaattagggctacattgtaatctgctttgttaatgaaaatgataaaacagaatattgacaagctaggacacctgtggtatctttaattgtatctccttcagaagtttgcttcttatggtataataaagtatggaagaatattgag

SEQ ID NO: 316272 - DNA, 1640 bp, Homo sapiens
tcctgcagaccagagaggacgcacccccacccctaaacactttctggtgaggcggaccctgccccgcagccttcagcagatgagggaagctcccctccgagactctggatagccgccgggggggcgttgcctggccggctggttgcgtagcaacggcaggcggtgcgtgacgtgcgcagcgcgttccgtcctgaggcgcgcccgccccggggtaagctcgcgccgccgcgtcagctcagcgctgggtctctcggtcccgcagccgtgaggaggacggtctgcatactcgctgcccgccggctccctcccccgcgtccctgcgaccgccgcggcgaagatggcctcaggagtgcaagtagctgatgaagtatgtcgcattttttatgacatgaaagttcgtaaatgctccacaccagaagaaatcaagaaaagaaagaaggctgtcattttttgtctcagtgcagacaaaaagtgcatcattgtagaagaaggcaaagagatcttggttggagatgttggtgtaaccataactgatcctttcaagcattttgtgggaatgcttcctgaaaaagattgtcgctatgctttgtatgatgcaagctttgaaacaaaagaatccagaaaagaagagttgatgttttttttgtgggcaccagaactagcacctctgaaaagtaaaatgatctatgcaagctccaaggatgcaattaaaaagaaatttcaaggcataaaacatgaatgtcaagcaaatggaccagaagatctcaatcgggcttgtattattattcagtgccacaaattgaaagcttccatgtttaatgttatcctcttgctatataaataaagcaaatatatttaggccagggtctcactgagggggagctgtcttgtcatcttttagagtaaactattctataaacatatgcaaacagccctaaataaatctaaagtctaaagttttattgatgtgaaattaaattcttattggccaaatgcctgttttgatgagttgatttataaagatttttgttaagctcaggattttaaattacacagttcacaaacagtaaaggccatgtgaagagaattattacatctttattaacctcagcatttactttgtttcttttgcttaggaaattgctcataatctggttataattttggtccaaattctttattcttccttgagctaagcagaataatggaatataatatgtcttcataatataacaacactaatacactaatagtaagattaagttaggcagtcttctaccaaatgtgtaatggagattgcctcaaaattgtgtccacataatccacgctcatcttgcaaagcgctatttcaggcacatcattggaatacaggaagtagccctgcacctgccagtgagctcgccattcactgattggaagagtgacctggcatcttggaaatcattgtgtgtcttcaggagaatgtgcagtgtcttgtaacaactaattataatgcaaattagggctacattgtaatctgctttgttaatgaaaatgataaaacagaatattgacaagctaggacacctgtggtatctttaattgtatctccttcagaagtttgcttcttatggtataataaagtatggaagaatattgag

SEQ ID NO: 316273 - DNA, 849 bp, Homo sapiens
  misc_feature (3)..(3): n is a, c, g, or t
  misc_feature (25)..(25): n is a, c, g, or t
gcngccgcctactactactaaattngcggccggtcgacttgctatataaataaagcaaatatatttaggccagggtctcactgagggggagctgtcttgtcatcttttagagtaaactattctataaacatatgcaaacagccctaaataaatctaaagtctaaagttttattgatgtgaaattaaattcttattggccaaatgcctgttttgatgagttgatttataaagatttttgttaagctcaggattttaaattacacagttcacaaacagtaaaggccatgtgaagagaattattacatctttattaacctcagcatttactttgtttcttttgcttaggaaattgctcataatctggttataattttggtccaaattctttattcttccttgagctaagcagaataatggaatataatatgtcttcataatataacaacactaatacactaatagtaagattaagttaggcagtcttctaccaaatgtgtaatggagattgcctcaaaattgtgtccacataatccacgctcatcttgcaaagcgctatttcaggcacatcattggaatacaggaagtagccctgcacctgccagtgagctcgccattcactgattggaagagtgacctggcatcttggaaatcattgtgtgtcttcaggagaatgtgcagtgtcttgtaacaactaattataatgcaaattagggctacattgtaatctgctttgttaatgaaaatgataaaacagaatattgacaagctaggacacctgtggtatctttaattgtatctccttcagaagtttgcttcttatggtataataaagtatggaagaatattgag

SEQ ID NO: 316274 - DNA, 740 bp, Homo sapiens
  misc_feature (3)..(3): n is a, c, g, or t
  misc_feature (25)..(25): n is a, c, g, or t
gcngccgcctactactactaaattngcggccggtcgacctttattcttccttgagctaagcagaataatggaatataatatgtcttcataatataacaacactaatacactaatagtaagattaagttaggcagtcttctaccaaatgtgtaatggagattgcctcaaaattgtgtccacataatccacgctcatcttgcaaagcgctatttcaggcacatcattggaatacaggaagtagccctgcacctgccagtgagctcgccattcactgattggaagagtgacctggcatcttggaaatcattgtgtgtcttcaggagaatgtgcagtgtcttgtaacaactaattataatgcaaattagggctacattgtaatctgctttgttaatgaaaatgataaaacagaatattgacaagctaggacacctgtggtatctttaattgtatctccttcagaagtttgcttcttatggtataataaagtatggaagaatattgagtatatgtttactctgggcctgggagaacttaactttctagagcagtttgttgacttgtgtgcaatggggagaggtaccatgatgacactcacagggagccactgttcactgacacttggaagcggtcattgttaatatcacgggcgtaacactttgaacgatatagagatgcacaaacagttgaacttagaagtagcagtattggctttatgtaataaaggaagcatttttgactta

SEQ ID NO: 316275 - DNA, 693 bp, Homo sapiens
tttttaagggatgatagggagtttcagctagagtcacagatttgccactatattaaatctctgctgctgagtacagatgataaggattgtattcaaagttgcctgataggagattggcaggggcagggtgaggctaggttacttaggtctacctggccaggtagacctaaccatcattggaatacaggaagtagccctgcacctgccagtgagctcgccattcactgattggaagagtgacctggcatcttggaaatcattgtgtgtcttcaggagaatgtgcagtgtcttgtaacaactaattataatgcaaattagggctacattgtaatctgctttgttaatgaaaatgataaaacagaatattgacaagctaggacacctgtggtatctttaattgtatctccttcagaagtttgcttcttatggtataataaagtatggaagaatattgagtatatgtttactctgggcctgggagaacttaactttctagagcagtttgttgacttgtgtgcaatggggagaggtaccatgatgacactcacagggagccactgttcactgacacttggaagcggtcattgttaatatcacgggcgtaacactttgaacgatatagagatgcacaaacagttgaacttagaagtagcagtattggctttatgtaataaaggaagcatttttgactta

SEQ ID NO: 316276 - DNA, 1312 bp, Homo sapiens
tattgagtggccatgtgactcttcctttcacttggacacttgaggccatgctgggttattaattggcctaatttcagtatcattgtgtctcagggaatagagacactcaagagcagaaacataaatgggggaactactggtcagtggagcagcccgtgcacacacaacatttatcgattaagtttgcaatcgtatatgagtatgatttgtgctgctcccaatcaattgcaatgctaacatcaaagatcactaatcacatggccactcaataccggctaggacacctgtggtatctttaattgtatctccttcagaagtttgcttcttatggtataataaagtatggaagaatattgagtatatgtttactctgggcctgggagaacttaactttctagagcagtttgttgacttgtgtgcaatggggagaggtaccatgatgacactcacagggagccactgttcactgacacttggaagcggtcattgttaatatcacgggcgtaacactttgaacgatatagagatgcacaaacagttgaacttagaagtagcagtattggctttatgtaataaaggaagcatttttgacttacctctcgtgtaattttcatgtgtgaattgggaatacaggattttgccttccatatggggtaaggcattgaggtttgggtatttccaataattaagagttaaggttggctgagtgtccttggcctcctaaagtgctgtgattacaggtgtgagccactgtgtcctgctagtgattgtgattaacaggcctccagggaagtgccataagcccaagactgccgtactcaaaagtcagccatgtaggtaaagcaagatatttggtcaaggagttttagaaggagatttttcctgtggtgttggcttaagtgtggcactgttgtgcgtgtgtgaggtgtcttctgtgggaaggatttcaaacagtacaaagggatgtgatgtaagcatccagaactcactccagaaattgaataaaatgctagtagttagtctctaggggaacttttgagaaagtctcagtggattcctgaggcccaagaattgtgctaacaagcactcaaggcgattctggtacataattagggttcagacctcagctgattggtctactgttggtcaggaacaaaactgcaagtatactctgtttccagaaaatacgtttacctcttcacaaatgctaacacactgcaaaaatatgtttgtggaaagctgacttagtctcatctagcggttactctcttgccctgacaaagcagcaaataaagccattgctaacaattca

SEQ ID NO: 316277 - DNA, 1051 bp, Homo sapiens
tcgtttgtctggcagaagccctgattaaacataagcccagtgtaaagggcagggcacagcttggagtccaagctgtgccctgccctttacactgggctatatgtttactctgggcctgggagaacttaactttctagagcagtttgttgacttgtgtgcaatggggagaggtaccatgatgacactcacagggagccactgttcactgacacttggaagcggtcattgttaatatcacgggcgtaacactttgaacgatatagagatgcacaaacagttgaacttagaagtagcagtattggctttatgtaataaaggaagcatttttgacttacctctcgtgtaattttcatgtgtgaattgggaatacaggattttgccttccatatggggtaaggcattgaggtttgggtatttccaataattaagagttaaggttggctgagtgtccttggcctcctaaagtgctgtgattacaggtgtgagccactgtgtcctgctagtgattgtgattaacaggcctccagggaagtgccataagcccaagactgccgtactcaaaagtcagccatgtaggtaaagcaagatatttggtcaaggagttttagaaggagatttttcctgtggtgttggcttaagtgtggcactgttgtgcgtgtgtgaggtgtcttctgtgggaaggatttcaaacagtacaaagggatgtgatgtaagcatccagaactcactccagaaattgaataaaatgctagtagttagtctctaggggaacttttgagaaagtctcagtggattcctgaggcccaagaattgtgctaacaagcactcaaggcgattctggtacataattagggttcagacctcagctgattggtctactgttggtcaggaacaaaactgcaagtatactctgtttccagaaaatacgtttacctcttcacaaatgctaacacactgcaaaaatatgtttgtggaaagctgacttagtctcatctagcggttactctcttgccctgacaaagcagcaaataaagccattgctaacaattca

SEQ ID NO: 316278 - DNA, 1222 bp, Homo sapiens
acccgtcggatgaaagtgtcgtgggaaagagttacaggtagtggactcgtaacccttatgagcagccatgtggactggctccaagtaaagccatagggatgggactgccttaggccctgggggcctaatccccacctcagtctctccaggaagtagcacatgataacaagagattattttccagctttgaggtctgccctgctggggtttggactttcttggggcccattactcctttatcctggcctattttttcctttggccatggtatatgtttactctgggcctgggagaacttaactttctagagcagtttgttgacttgtgtgcaatggggagaggtaccatgatgacactcacagggagccactgttcactgacacttggaagcggtcattgttaatatcacgggcgtaacactttgaacgatatagagatgcacaaacagttgaacttagaagtagcagtattggctttatgtaataaaggaagcatttttgacttacctctcgtgtaattttcatgtgtgaattgggaatacaggattttgccttccatatggggtaaggcattgaggtttgggtatttccaataattaagagttaaggttggctgagtgtccttggcctcctaaagtgctgtgattacaggtgtgagccactgtgtcctgctagtgattgtgattaacaggcctccagggaagtgccataagcccaagactgccgtactcaaaagtcagccatgtaggtaaagcaagatatttggtcaaggagttttagaaggagatttttcctgtggtgttggcttaagtgtggcactgttgtgcgtgtgtgaggtgtcttctgtgggaaggatttcaaacagtacaaagggatgtgatgtaagcatccagaactcactccagaaattgaataaaatgctagtagttagtctctaggggaacttttgagaaagtctcagtggattcctgaggcccaagaattgtgctaacaagcactcaaggcgattctggtacataattagggttcagacctcagctgattggtctactgttggtcaggaacaaaactgcaagtatactctgtttccagaaaatacgtttacctcttcacaaatgctaacacactgcaaaaatatgtttgtggaaagctgacttagtctcatctagcggttactctcttgccctgacaaagcagcaaataaagccattgctaacaattca

SEQ ID NO: 316279 - DNA, 454 bp, Homo sapiens
gtattgagaggagatacacaggcactacgagaatggagtttagaagaaggtcagagccctgggcagtgttgggccaggctttagggttagtattccgtgctttctgtctgcctcatggttttagttttactgtataaaaatcattatcaagaacctagggactacagccaggcatggtggctcatgcctgtaatcccagcattttgggaggccaaggcaggcagatgacttgagcccaggagttcgagaccagtctgggcaacatggcaaaaccccatctttataaaaaaatacaaaaattagctgggtgtggtggcatgcacctctagtcccagctactcaggaggctgaggtgggaggatcgcttgagcccaggaggtcagggctcctgcagtgagccatgatcacatcactgcactccagcctggatgacacagagagaccttgtctcaaa

SEQ ID NO: 316280 - DNA, 446 bp, Homo sapiens
ggcctcgaactttaacttccgcttccggttcctagcgttaactgcgaccggggttcagcgctcgggtgaggagctggtggcgtcggcaggttcgaggcgattcgagctccagctaggatgatcgaggttgtttgcaacgaccgtctggggaagaaggtccgcgttaaatgcaacacggatgataccatcggggaccttaagaagctgattgcagcccaaactggtacccgttggaacaagattgtcctgaagaagtggtacacgatttttaaggaccacgtgtctctgggggactatgaaatccacgatgggatgaacctggagctttattatcaatagatgagaatcctcatcttcctgccccgctttcctctcccatcctcatcccccacactgggatagatgcttgtttgtaaaaactcaccttaataaagacttagatgttg

SEQ ID NO: 316281 - DNA, 501 bp, Homo sapiens
  misc_feature (12)..(12): n is a, c, g, or t
  misc_feature (39)..(39): n is a, c, g, or t
  misc_feature (48)..(48): n is a, c, g, or t
  misc_feature (81)..(81): n is a, c, g, or t
  misc_feature (124)..(124): n is a, c, g, or t
  misc_feature (130)..(130): n is a, c, g, or t
ttttaggccacnttctctggggctatgaatccacgtggntgactgggntttattatcaatagtgagatcctcatcttcctncccgtttcctctcccatcctcatcccccacactgggatagagntgaggnctggtggctcggcaggttcgaggcgattcgactccagctaggatgatcgaggttgtttgcaacgaccgtctggggaagaaggtccgcgttaaatgcaacacggatgataccatcggggaccttaagaagctgattgcagcccaaactggtacccgttggaacaagattgtcctgaagaagtggtacacgatttttaaggaccacgtgtctctgggggactatgaaatccacgatgggatgaacctggagctttattatcaatagatgagaatcctcatcttcctgccccgctttcctctcccatcctcatcccccacactgggatagatgcttgtttgtaaaaactcaccttaataaagacttagatgttg

SEQ ID NO: 316282 - DNA, 395 bp, Homo sapiens
  misc_feature (1)..(1): n is a, c, g, or t
  misc_feature (39)..(39): n is a, c, g, or t
ncgagaagacgacagaagggggagggtggcgtcggcagnttcgaggcgattcgagctccagctaggatgatcgaggttgtttgcaacgaccgtctggggaagaaggtccgcgttaaatgcaacacggatgataccatcggggaccttaagaagctgattgcagcccaaactggtacccgttggaacaagattgtcctgaagaagtggtacacgatttttaaggaccacgtgtctctgggggactatgaaatccacgatgggatgaacctggagctttattatcaatagatgagaatcctcatcttcctgccccgctttcctctcccatcctcatcccccacactgggatagatgcttgtttgtaaaaactcaccttaataaagacttagatgttg

SEQ ID NO: 316283 - DNA, 325 bp, Homo sapiens
cttttcaaatccaaagcaccattttggggaaaaaggtccgcgttaaatgcaacacggatgataccatcggggaccttaagaagctgattgcagcccaaactggtacccgttggaacaagattgtcctgaagaagtggtacacgatttttaaggaccacgtgtctctgggggactatgaaatccacgatgggatgaacctggagctttattatcaatagatgagaatcctcatcttcctgccccgctttcctctcccatcctcatcccccacactgggatagatgcttgtttgtaaaaactcaccttaataaagacttagatgttg

SEQ ID NO: 316284 - DNA, 863 bp, Homo sapiens
  misc_feature (12)..(12): n is a, c, g, or t
  misc_feature (39)..(39): n is a, c, g, or t
  misc_feature (48)..(48): n is a, c, g, or t
  misc_feature (81)..(81): n is a, c, g, or t
  misc_feature (124)..(124): n is a, c, g, or t
  misc_feature (130)..(130): n is a, c, g, or t
  misc_feature (623)..(623): n is a, c, g, or t
ttttaggccacnttctctggggctatgaatccacgtggntgactgggntttattatcaatagtgagatcctcatcttcctncccgtttcctctcccatcctcatcccccacactgggatagagntgaggnctggtggctcggcaggttcgaggcgattcgactccagctaggatgatcgaggttgtttgcaacgaccgtctggggaagaaggtccgcgttaaatgcaacacggatgataccatcggggaccttaagaagctgattgcagcccaaactggtacccgttggaacaagattgtcctgaagaagtggtacacgatttttaaggaccacgtgtctctgggggactatgaaatccacgatgggatgaacctggagctttattatcaatagatgagaatcctcatcttcctgccccgctttcctctcccatcctcatcccccacactgggatagatgcttgtttgtaaaaactcaccttaataaagacttagatgttgaaaaaaaaaaaaaaaaaaaaaaaaaaaaaaaaaaaaaaaaaaaaaaaaaaaaaaaaaaagggaaaaaaaatgaaaaaaaaaaaaaaaaaaacccaaaaaaaaaaaaaaaaaaaaaaaaaaanactttgtgggccgcttggcccaagtcacttttaatttggggaaggttttggctgggggccgaatttggggctaattggcccatttcgccctttgggggggggtataaaattaactggcccgcggtttaaaacgggggggctgggaaaaccctgggggtacccaaatttataggtttggagacacatccccttttgccaggttgggtaaataggagaagagccgaaacggttggcctttca

SEQ ID NO: 316285 - DNA, 324 bp, Homo sapiens
ggcctcgaactttaacttccgcttccggttcctagcgttaactgcgaccggggttcagcgctcgggtgaggagctggtggcgtcggcaggttcgaggcgattcgagctccagctaggatgatcgaggttgtttgcaacgaccgtctggggaagaaggtccgcgttaaatgcaaatgaaatccacgatgggatgaacctggagctttattatcaatagatgagaatcctcatcttcctgccccgctttcctctcccatcctcatcccccacactgggatagatgcttgtttgtaaaaactcaccttaataaagacttagatgttg

SEQ ID NO: 316286 - DNA, 822 bp, Homo sapiens
  misc_feature (593)..(593): n is a, c, g, or t
ggcctcgaactttaacttccgcttccggttcctagcgttaactgcgaccggggttcagcgctcgggtgaggagctggtggcgtcggcaggttcgaggcgattcgagctccagctaggatgatcgaggttgtttgcaacgaccgtctggggaagaaggtccgcgttaaatgcaacacggatgataccatcggggaccttaagaagctgattgcagcccaaactggtacccgttggaacaagattgtcctgaagaagtggtacacgatttttaaggaccacgtgtctctgggggactatgaaatccacgatgggatgaacctggagctttattatcaatagatgagaatcctcatcttcctgccccgctttcctctcccatcctcatcccccacactgggatagatgcttgtttgtaaaaactcaccttaataaagacttagatgttgaaaaaaaaaaaaaaaaaaaaaaaaaaaaaaacaaaaaaaaaaaaaaaaaaaaaaaaaaaaaaaaaaaaaaaaaaaaaaaaaaaaaaaaaaagggaaaaaaaatgaaaaaaaaaaaaaaaaaaaccttgtggcccggctgggccaatngaattttaaattgagccaagttattcattgcgcccgaaattaagctcaatgggccatttcgccttatggggagcgtattaaaataaccgtgcggcgtttacaacgtgggacttgtccctggggttcccaacttatcgccttggagaaattccctttccccagctgctaaataccaaagagccccacggacgcttttccaaattggccaccttaatgggtggttttgcgt

SEQ ID NO: 316287 - DNA, 560 bp, Homo sapiens
ggcctcgaactttaacttccgcttccggttcctagcgttaactgcgaccggggttcagcgctcgggtgaggagctggtggcgtcggcaggttcgaggcgattcgagctccagctaggatgatcgaggttgtttgcaacgaccgtctggggaagaaggtccgcgttaaatgcaacacggatgataccatcggggaccttaagaagctgattgcagcccaaactggtacccgttggaacaagattgtcctgaagaagtggtacacgatttttaaggaccacgtgtctctgggggactatgaaatccacgatgggatgaacctggagctttattatcaatagatgagaatcctcatcttcctgccccgctttcctctcccatcctcatcccccacactgggatagatgcttgtttgtaaaaactcaccttaataaagacttagatgttgaaaaaaaaaaaaaaaaaaaaaaaaaaaaaaaaaaaaaaaaaaaaaaaaaaaaaaaaaaaaaaaaaaaaaaaaaaaaacaaaaaaaacaaacaaaaacaaaaagggggggggcgc

SEQ ID NO: 316288 - DNA, 485 bp, Homo sapiens
gacctcgaacctgccgacgccaccagctcctcacccgagcgctgaaccccggtcgcagttcggggcgattcgagctccagctaggatgatcgaggttgtttgcaacgaccgtctggggaagaaggtccgcgttaaatgcaacacggatgataccatcggggaccttaagaagctgattgcagcccaaactggtacccgttggaacaagattgtcctgaagaagtggtacacgatttttaaggaccacgtgtctctgggggactatgaaatccacgatgggatgaacctggagctttattatcaatagatgagaatcctcatcttcctgccccgctttcctctcccatcctcatcccccacactgggatagatgcttgtttgtaaaaactcaccttaataaagacttagatgttgaaaaaaaaaaaaaaaaaaaaaaaaaaaaaaacaacaaaaaaaacaaacaaaaacaaaaagggggggggcgc

SEQ ID NO: 316289 - DNA, 790 bp, Homo sapiens
  misc_feature (561)..(561): n is a, c, g, or t
ggcctcgaactttaacttccgcttccggttcctagcgttaactgcgaccggggttcagcgctcgggtgaggagctggtggcgtcggcaggttcgaggcgattcgagctccagctaggatgatcgaggttgtttgcaacgaccgtctggggaagaaggtccgcgttaaatgcaacacggatgataccatcggggaccttaagaagctgattgcagcccaaactggtacccgttggaacaagattgtcctgaagaagtggtacacgatttttaaggaccacgtgtctctgggggactatgaaatccacgatgggatgaacctggagctttattatcaatagatgagaatcctcatcttcctgccccgctttcctctcccatcctcatcccccacactgggatagatgcttgtttgtaaaaactcaccttaataaagacttagatgttgaaaaaaaaaaaaaaaaaaaaaaaaaaaaaaaaaaaaaaaaaaaaaaaaaaaaaaaaaaagggaaaaaaaatgaaaaaaaaaaaaaaaaaaaccttgtggcccggctgggccaatngaattttaaattgagccaagttattcattgcgcccgaaattaagctcaatgggccatttcgccttatggggagcgtattaaaataaccgtgcggcgtttacaacgtgggacttgtccctggggttcccaacttatcgccttggagaaattccctttccccagctgctaaataccaaagagccccacggacgcttttccaaattggccaccttaatgggtggttttgcgt

SEQ ID NO: 316290 - DNA, 645 bp, Homo sapiens
ggcctcgaactttaacttccgcttccggttcctagcgttaactgcgaccggggttcagcgctcgggtgaggagctggtggcgtcggcaggttcgaggcgattcgagctccagctaggatgatcgaggttgtttgcaacgaccgtctggggaagaaggtccgcgttaaatgcaaagtatccactggcagccgagaggcagtggtacccgcaggggtgcttggcgtgaggcaggcaactcaatctgtgttgtcggatggttttagttaaacccgggagagggggcggatggggtcctggcagatggtattctgccctagaatgtcctcttcctcgttctaccgcttccatttgccttaactgctctgcgcccagcacggatgataccatcggggaccttaagaagctgattgcagcccaaactggtacccgttggaacaagattgtcctgaagaagtggtacacgatttttaaggaccacgtgtctctgggggactatgaaatccacgatgggatgaacctggagctttattatcaatagatgagaatcctcatcttcctgccccgctttcctctcccatcctcatcccccacactgggatagatgcttgtttgtaaaaactcaccttaataaagacttagatgttg

SEQ ID NO: 316291 - DNA, 725 bp, Homo sapiens
ggcctcgaactttaacttccgcttccggttcctagcgttaactgcgaccggggttcagcgctcgggtgaggagctggtggcgtcggcaggttcgaggcgattcgaggtgagggggtcaagcggagaggctcggagtcggagaaagctgtcgcgacccagccacccagggtctggggtcggtgggagctccagctaggatgatcgaggttgtttgcaacgaccgtctggggaagaaggtccgcgttaaatgcaaagtatccactggcagccgagaggcagtggtacccgcaggggtgcttggcgtgaggcaggcaactcaatctgtgttgtcggatggttttagttaaacccgggagagggggcggatggggtcctggcagatggtattctgccctagaatgtcctcttcctcgttctaccgcttccatttgccttaactgctctgcgcccagcacggatgataccatcggggaccttaagaagctgattgcagcccaaactggtacccgttggaacaagattgtcctgaagaagtggtacacgatttttaaggaccacgtgtctctgggggactatgaaatccacgatgggatgaacctggagctttattatcaatagatgagaatcctcatcttcctgccccgctttcctctcccatcctcatcccccacactgggatagatgcttgtttgtaaaaactcaccttaataaagacttagatgttg

SEQ ID NO: 316292 - DNA, 626 bp, Homo sapiens
ggcctcgaactttaacttccgcttccggttcctagcgttaactgcgaccggggttcagcgctcgggtgaggagctggtggcgtcggcaggttcgaggcgattcgaggtgagggggtcaagcggagaggctcggagtcggagaaagctgtcgcgacccagccacccagggtctggggtcggtgggagctccagctaggatgatcgaggttgtttgcaacgaccgtctggggaagaaggtccgcgttaaatgcaacacggatgataccatcggggaccttaagaagctgattgcagcccaaactggtacccgttggaacaagattgtcctgaagaagtggtacacgatttttaaggaccacgtgtctctgggggactatgaaatccacgatgggatgaacctggagctttattatcaatagatgagaatcctcatcttcctgccccgctttcctctcccatcctcatcccccacactgggatagatgcttgtttgtaaaaactcaccttaataaagacttagatgttgaaaaaaaacaaacaacaaaaccaccacacaaaaaaaaaaaaaaaaaaaaaaaaaaaaaaacaacaaaaaaaacaaacaaaaacaaaaagggggggggcgc

SEQ ID NO: 316293 - DNA, 716 bp, Homo sapiens
ggcctcgaactttaacttccgcttccggttcctagcgttaactgcgaccggggttcagcgctcgggtgaggagctggtggcgtcggcaggttcgaggcgattcgagctccagctaggatgatcgaggttgtttgcaacgaccgtctggggaagaaggtccgcgttaaatgcaaagtatccactggcagccgagaggcagtggtacccgcaggggtgcttggcgtgaggcaggcaactcaatctgtgttgtcggatggttttagttaaacccgggagagggggcggatggggtcctggcagatggtattctgccctagaatgtcctcttcctcgttctaccgcttccatttgccttaactgctctgcgcccagcacggatgataccatcggggaccttaagaagctgattgcagcccaaactggtacccgttggaacaagattgtcctgaagaagtggtacacgatttttaaggaccacgtgtctctgggggactatgaaatccacgatgggatgaacctggagctttattatcaatagatgagaatcctcatcttcctgccccgctttcctctcccatcctcatcccccacactgggatagatgcttgtttgtaaaaactcaccttaataaagacttagatgttgaaaaaaaaaaaaaaaaaaaaaaaaaaaaaaacaacaaaaaaaacaaacaaaaacaaaaagggggggggcgc

SEQ ID NO: 316294 - DNA, 1536 bp, Homo sapiens
ggcctcgaactttaacttccgcttccggttcctagcgttaactgcgaccggggttcagcgctcgggtgaggagctggtggcgtcggcaggttcgaggcgattcgagctccagctaggatgatcgaggttgtttgcaacgaccgtctggggaagaaggtccgcgttaaatgcaacacggatgataccatcggggaccttaagaagctgattgcagcccaaactggtacccgttggaacaagattgtcctgaagaagtggtacacgatttttaaggaccacgtgtctctgggggactgtatcctttgtgtgactttttgaggaagcatctacatacccagcctcggttatctgttcaaaactaaagtctgcatgagcttatgcatattaagtgtttaacttaatacgtggcacatggtgagcacttagaaaatgggagctaggtaattatttggttggggaggagagtggttggtgaaatagtttgacttcaagttcaaaatatttattactgacctccacctgagtgctggacagtaggtcagggtggggtgagactcaggcatatctattgtgcaaaaggagcagaaactttttacaatttttattttatttatttatttttttgagacagtctggctctgtcgcccaggctggagtgcagtggcacgatcttgacccactgcaacctccacctcccgggttcaagcaattctgcctcagcttcccaagtagctgggattacaggtgtgtgccaccactccctgctagtttttgtatttttagtagagatgaggttccaccatgtatgccaggctagtctcaaactcctggcctcaagtgatcctcccgcctcggcctcccaaagtgctgggattatagccgtgagccactgtgcctggcctagaaggaacagaaacttttttttttttttttgagatggagttttgctcttgttgcccaggctggagtgcagtggtacaatcttggctcactgcagcctctacctcccaggtttaagcgattttcctgtctcagccttccaagtagctgggattacaggtgcccaccaccacacccagctaactttttgtatttttagtagagacagggtttcatcgtgttggccaggctggtctcaaactcctgacgtcaagtgagccacctgcttcgtcctctcaaagtgctgggattacaggtgtgagccactgcacccagccagaaattcttttgtaaagttttggttctctccaaataaaaatggcctggtccaaaatgggcttccttagccctgggctgagacctcaggccacctgacccggctgtgaatggatgagaggggtggggacggaagtcagagtcaggattccttaacacctttccttcagatgaaatccacgatgggatgaacctggagctttattatcaatagatgagaatcctcatcttcctgccccgctttcctctcccatcctcatcccccacactgggatagatgcttgtttgtaaaaactcaccttaataaagacttagatgttg

SEQ ID NO: 316295 - DNA, 465 bp, Homo sapiens
ggcctcgaactttaacttccgcttccggttcctagcgttaactgcgaccggggttcagcgctcgggtgaggagctggtggcgtcggcaggttcgaggcgattcgagctccagctaggatgatcgaggttgtttgcaacgaccgtctggggaagaaggtccgcgttaaatgcaacacggatgataccatcggggaccttaagaagctgattgcagcccaaactggtacccgttggaacaagattgtcctgaagaagtgaaatgtctctttttcttaggtacacgatttttaaggaccacgtgtctctgggggactatgaaatccacgatgggatgaacctggagctttattatcaatagatgagaatcctcatcttcctgccccgctttcctctcccatcctcatcccccacactgggatagatgcttgtttgtaaaaactcaccttaataaagacttagatgttg

SEQ ID NO: 316296 - DNA, 700 bp, Homo sapiens
ggcctcgaactttaacttccgcttccggttcctagcgttaactgcgaccggggttcagcgctcgggtgaggagctggtggcgtcggcaggttcgaggcgattcgagctccagctaggatgatcgaggttgtttgcaacgaccgtctggggaagaaggtccgcgttaaatgcaagtacacgatttttaaggaccacgtgtctctgggggactatgaaatccacgatgggatgaacctggagctttattatcaatagatgagaatcctcatcttcctgccccgctttcctctcccatcctcatcccccacactgggatagatgcttgtttgtaaaaactcaccttaataaagacttagatgttgccaaaataaaacaatataacaagaagaaataaaaaaccttgtgttgggcggctctgggccctctcggaagaaggtttttttaagagaacccacttccgggttatgtggggaagggccgcggggcccccccaagataggggcttacagaggtgatccacaccctgtgggggtcccaaatacccgggggtctcccccattaggagggaaaacacctccgtgggggacccaatgtgacaaaaggaggggcctgtggcacattttctcacaccaccactatgatttaaaaaacaacggcccccgcgggggggacaccaccccagcaagacgcgggttctctg

SEQ ID NO: 316297 - DNA, 602 bp, Homo sapiens
ggcctcgaactttaacttccgcttccggttcctagcgttaactgcgaccggggttcagcgctcgggtgaggagctggtggcgtcggcaggttcgaggcgattcgaggtgagggggtcaagcggagaggctcggagtcggagaaagctgtcgcgacccagccacccagggtctggggtcggtgggagctccagctaggatgatcgaggttgtttgcaacgaccgtctggggaagaaggtccgcgttaaatgcaaagtatccactggcagccgagaggcagtggtacccgcaggggtgcttggcgtgaggcaggcaactcaatctgtgttgtcggatggttttagttaaacccgggagagggggcggatggggtcctggcagatggtattctgccctagaatgtcctcttcctcgttctaccgcttccatttgccttaactgctctgcgcccagcacggatgataccatcggggaccttaagaagctgattgcagcccaaactggtacccgttggaacaagattgtcctgaagaagtgacatgcaagcccggtaggtgcaagcccggtacatgcaagagtacatgcaagcccggtacatgcaag

SEQ ID NO: 316298 - DNA, 1212 bp, Homo sapiens
ggcctcgaactttaacttccgcttccggttcctagcgttaactgcgaccggggttcagcgctcgggtgaggagctggtggcgtcggcaggttcgaggcgattcgaggtgagggggtcaagcggagaggctcggagtcggagaaagctgtcgcgacccagccacccagggtctggggtcggtgggagctccagctaggatgatcgaggttgtttgcaacgaccgtctggggaagaaggtccgcgttaaatgcaacacggatgataccatcggggaccttaagaagctgattgcagcccaaactggtacccgttggaacaagattgtcctgaagaagtggtacacgatttttaaggaccacgtgtctctgggggactatgaaatccacgatgggatgaacctggagctttattatcaatagatgagaatcctcatcttcctgccccgctttcctctcccatcctcatcccccacactgggatagatgcttgtttgtaaaaactcaccttaataaagacttagatgttgttaattacaggaactttagaatgttggcacacacaaaaacaaaagaaaaaaaaccctgcggaggcatctcttgtgtgtccgggtgtgccggaaaacaaggaggatcaagtgcaagagtggccacgtgtggccccattagccgtgtttccctgtggaccccgagcctttttcgtgtgttacacaggcggggactagaactccgtgcgcggaatctcccctttaatgagggaagcctcgctattaaactttcgcgagattagaccccgaggtttaaccctgtgccttttagagtgaaactccgggacaaagagccaaaacagcaagcgacccagcgcccaaacaagacgacccacacgaagcagagcagcggacgaagccagaaggcacgcccgacgaggggccaccaccgaccgcgacaacagcggaccgaaccgagaaccacgagaacaggggcagcagaggaggagagacacgaaggaacgacagtcagagcgcgggcggaggagcaggatggggaataaccccgaagacgcaagcgagagaggagccgggcaggcggaggcgacgagcacaggagcgggcaaacgcaagcaccgacaagagaaccacgccgatctgccgaacggagtgagagagagccgggcgaagcacgcggagagaagagagcgacagcccgcagggacgga

SEQ ID NO: 316299 - DNA, 526 bp, Homo sapiens
ggcctcgaactttaacttccgcttccggttcctagcgttaactgcgaccggggttcagcgctcgggtgaggagctggtggcgtcggcaggttcgaggcgattcgaggtgagggggtcaagcggagaggctcggagtcggagaaagctgtcgcgacccagccacccagggtctggggtcggtgggagctccagctaggatgatcgaggttgtttgcaacgaccgtctggggaagaaggtccgcgttaaatgcaacacggatgataccatcggggaccttaagaagctgattgcagcccaaactggtacccgttggaacaagattgtcctgaagaagtggtacacgatttttaaggaccacgtgtctctgggggactatgaaatccacgatgggatgaacctggagctttattatcaatagatgagaatcctcatcttcctgccccgctttcctctcccatcctcatcccccacactgggatagatgcttgtttgtaaaaactcaccttaataaagacttagatgttg

SEQ ID NO: 316300 - DNA, 597 bp, Homo sapiens
ggcctcgaactttaacttccgcttccggttcctagcgttaactgcgaccggggttcagcgctcgggtgaggagctggtggcgtcggcaggttcgaggcgattcgaggtgagggggtcaagcggagaggctcggagtcggagaaagctgtcgcgacccagccacccagggtctggggtcggtgggagctccagctaggatgatcgaggttgtttgcaacgaccgtctggggaagaaggtccgcgttaaatgcaacacggatgataccatcggggaccttaagaagctgattgcagcccaaactggtacccgttggaacaagattgtcctgaagaagtggtacacgatttttaaggaccacgtgtctctgggggactatgaaatccacgatgggatgaacctggagctttattatcaatagatgagaatcctcatcttcctgccccgctttcctctcccatcctcatcccccacactgggatagatgcttgtttgtaaaaactcaccttaataaagacttagatgttgaaaaaaaaaaaaaaaaaaaaaaaaaaaaaaacaacaaaaaaaacaaacaaaaacaaaaagggggggggcgc

SEQ ID NO: 316301 - DNA, 517 bp, Homo sapiens
ggcctcgaactttaacttccgcttccggttcctagcgttaactgcgaccggggttcagcgctcgggtgaggagctggtggcgtcggcaggttcgaggcgattcgagctccagctaggatgatcgaggttgtttgcaacgaccgtctggggaagaaggtccgcgttaaatgcaacacggatgataccatcggggaccttaagaagctgattgcagcccaaactggtacccgttggaacaagattgtcctgaagaagtggtacacgatttttaaggaccacgtgtctctgggggactatgaaatccacgatgggatgaacctggagctttattatcaatagatgagaatcctcatcttcctgccccgctttcctctcccatcctcatcccccacactgggatagatgcttgtttgtaaaaactcaccttaataaagacttagatgttgaaaaaaaaaaaaaaaaaaaaaaaaaaaaaaacaacaaaaaaaacaaacaaaaacaaaaagggggggggcgc

SEQ ID NO: 316302 - DNA, 654 bp, Homo sapiens
taaattcgcggccgcgtcgacaaactttttgagattcactttacatatacacacaaatatatttttctttaccttttgaatttggagtaaaatctagttttatgtttgcttgaaacaacatatataatggagataataaaataactttttttcatttagactgatctcacaatgctgaaattagcagcattagaaagtaataaaatccaggacctggaaaagaaggagggacgtatagatgatttgctcagggtaagtaatgagtcatagaggggaaaaaaattgaataaattatttggcaacagtcaaactgttcagaaaatacttagcattgtaaaaaaatctgtagctaggccaggcgcagtggctcatgcctgtaatcccagcactttgggaggtcgaggcgggcagatcacaaggttgagagatcaagagcatcctggccaacatggtgaaaccccgtttctactaaaaatacaaaaattggctgggcatggtggtgcttgcctgtagtgccagctacttgggaggctgaggcagcagaaatgcttgaacccgggaggtggagattgcagtgagctgagatcacgtcactgtactccagcctggcgacagagtgagactctgtctcagaaaaaaaaaaaattctgtagc

SEQ ID NO: 316303 - DNA, 1718 bp, Homo sapiens
ttcttcccatcactgtaaaacattgatgcatgggtaaaaatatcttttttatatcgcaaataaattgagcttgttatagtcccctctcttcattttcaggaagaggcagaaatccaggcagaacttgaacgtttggaaagagtcagaaatcttcacatacgtgagctgaaaagaataaacaatgaagataattcacagtaagtcattatttgcatttcacagtttcatattattaaaactacccccgccccccatagagcataaacacaatatttccttcttgggttgtctcatcgtacttagaaaagatccaaagtccttcccatggcttggaaggccttttatgatttggtccctggccaccttactgtcctcacttctcttaaacatgtcaagagcattcccttctcagtgggcttttgtgcttaccatttcctctgcctggatgttcctcctctaaacacctaattggcttaattacttatctcactccaaatgttctttagaaaggccattcttagatcatcctatttaaaatagtagtccctagccaggcccagtggtgctcacctatagttccagctactcaagaggctcaggtaggaggattgctttggccaggagttcaaaaccagccttgtcaacatagtgagacccccatttctttaaaaaaaaaaaaagtctctgcttcttcatttcctcttttaatatcgttaccttgctttatattttctggatgttgatcactatctggaattataaatttattttttagttattatttgtctcctccctctagaatgtaagcttcatgagtgcaaggacttggttttgttcttgctgtatccgtaaagcctagaccagtgcctgacatatggcaggcacttaataaatatttgaataccaaagttaatgttatagtagtgaaggagaaattatttcaaccaaaagtatttcagtaagccatgtatcccacattatgcaagaattgggagagaaatggaaaagtacagcttacagtctgtgttcttaatcagttgtcagaatgagtgccatagatagtatatgttgaagcaattgaaagaaaagaaaatatctgtgggcttgtgggagcttcatgaaaaagatagaaattgagcaagacatagaagtagaaattaagcaaggtactacttggatttagttgatgtacaagagaggaaaggtttctgtttacacttcatctttgactggtcatgtagtttaaagcttccatgagttaatataagtatcagaataggaagtggccaatttctgtgtgaaatatgaaaatcttgcttagaaaggtcttcttgtgatgtctatgtatgtataattcataaatacacagatcattccattgtgtgaagagaaagaaatagttatggaataacctaaattatgtcagattaaaattctaatgaaagccaggtgtgctggcttatgcctgtaatccttgcactttgggaggccagtgcaagcaaattgattgagcccaggagtcaaaaacgagcctcagcaaggtggaaaaaccctgtctctacaaaaaatacaaaacttagcagggaatggtggcatgcacctgtagtcgcagctacttggggaactgaggagggaggatcgcctgagcctgcagtgagcctagatcgcagtccagcctgattgacaaagtgagactttgtctcaaaaaaaaaaaaaaa

SEQ ID NO: 316304 - DNA, 5766 bp, Homo sapiens
gcctcagccgccacccacagcccgccgccgccgcctcccgggcgacgccgggggccgacgcactgcagaggtgccggcaggttccgcccgcggaagtgtcctcggccggcgcagcccgcgctccgcccgcgctccgaccccggcccggctggcaccccctcgacgcctccgccgccgcgctcctttcctcctcctctcctctggcgcgcccgctcgctccctcgcttctccccctttccctcctccctgtcccctctccttccctcacctctttcctccccacctcccctcttctcggtttcctcccccatccccttgactctcccctcccagccctcgctctctcgctcgccctcagcgcggcccccgccatgacggaggcgggtgccggtgccgttgccgccgctgccgtcgcagggggggagtcgggttcccagaaagtagcttgatgagtgtccaaagtagcagtggaagtttggaggggccgccatcttggtcccagctctccacgtctccaaccccgggctcggcggcggcggccaggtccctgctgaatcacacgccgccatccgggaggcccagggaaggtgcaatggatgagcttcatagtctggatccaagaaggcaagagttattggaagctagatttactggagttgcaagtgggagcactggaagtacgggcagttgcagtgttggagctaaagcctcaacaaataacgaaagctctaatcacagttttggaagcttgggatctttaagtgacaaagaatcagagacaccggagaagaaacaatcggaatcatccaggggaagaaagagaaaagcagaaaaccagaatgaaagtagtcaggggttccccaacctcccggtcttccagtccttggcctattgggaaatgggtcgtacagcaggaggaaaaagtattgggggacgtggccacaaaattagcgactattttgaataccagggtggaaatggctcaagtccagtaagaggcatacctcctgcaatccgttctcctcaaaattcacattcacattccactccttcctcatctgttcgaccgaatagcccttctcctactgcattagcatttggggaccaccctattgtacaaccaaagcaattatcctttaaaattattcagactgatctcacaatgctgaaattagcagcattagaaagtaataaaatccaggacctggaaaagaaggagggacgtatagatgatttgctcagggctaactgtgatctcagacggcaaatagatgaacaacaaaaattacttgaaaaatacaaagaacgattaaataagtgcatatcaatgagcaagaaacttcttattgaaaagagtacacaagaaaagctgtcaagcagagagaagagtatgcaagatcgattacgcctcgggcactttacaacagttagacatggcgcttcatttactgaacaatggacagatggttttgcatttcagaatcttgtgaagcaacaagaatgggtgaatcagcaaagggaagatattgaaaggcaaaggaaacttctagccaaacgcaaacctcccacagctaataattctcaggcaccctctaccaattctgaaccaaaacaaaggaaaaacaaagcagtcaatggagcagagaatgatccctttgttagaccaaatttaccacaactgttgactttggcagaatatcatgaacaggaagaaattttcaaacttagactaggacatctcaaaaaggaagaggcagaaatccaggcagaacttgaacgtttggaaagagtcagaaatcttcacatacgtgagctgaaaagaataaacaatgaagataattcacagttcaaagatcacccaacattaaatgaaagatatttattacttcatctgcttggtagaggtggctttagtgaagtgtataaggcttttgacctttatgaacaaagatatgctgctgtgaagatacatcagcttaataaaagctggagagatgagaagaaagaaaactaccacaaacatgcctgcagagagtatagaatacacaaagaactggatcaccccagaatagttaaactctatgattatttctccttggatacagatacgttttgtacagtgttagaatactgtgaaggcaatgacttggatttctatctgaagcaacacaagttaatgtcagagaaagaagctcggtctattgtaatgcagattgtaaatgcactaagatatctcaatgagatcaaaccccctattatacattatgatcttaagccaggaaacatcctactggtagatggaacagcatgtggtgaaatcaaaatcactgattttggtctgtccaagattatggatgatgatagctatggtgtagatggaatggatctaacttcccagggggcaggcacttactggtatttacctcctgagtgttttgtagttggaaaagagccaccaaagatttccaacaaggttgatgtatggtcggttggagtcatcttctttcagtgtctttatggtagaaagccatttggtcacaatcaatctcaacaagacattcttcaagaaaatacaatattaaaagccacagaagtccagttccctgtaaaaccggttgtaagcagtgaagccaaggcatttataagacgctgtttggcatatcgaaaagaagatcgatttgatgtgcaccagctggcaaatgacccataccttctcccacacatgagaagatcaaattcttcaggaaacctacacatggctgggctgacagcatcccctacacccccttcttcaagcataattacttactgactttcctccaagattggcatgatatctttgaatttgcttccagatgcacacttaagtttgagagcatttgagtgtttgttttctttttcttttttttttttttttttttacacaagacgtggttaagaactgtttgtgaactgaagttcctcatagtgtcatttgtatgagagaggatcatggacaatgaataaatgcacacttctgactataattttgagcagtgaaggaaggatgactgcctgttacacagaaacaggaataccatgttaagatagaggaaaaaaattttgtttatttgggggaacactgtaaataacgtttataatacttaaatacatttggttgttactagagagttctaatatgaagggtagtttttcattatttaaaaacacatggaaaaatatgagacatatttctaacatacgaactatagtgcctggatacattcttcagcatttggcagttaatctgctgaaaccaaagtaagaactgaatgacagtgacagttgtgttttatagtaatagaatgtgagagttagaatctttggacaaagttaggctttgtcatttgcctattcagacttttaccaagttgtacctcgagatcacatgtccgttttctttcactggttatattaaagggagagctattatttctaaatactttacacctttgacaaaatgagctgcttgtgttgaaatcagttgaattcactaaattataatattgccagtgttttcaacacgttagaattgataacaggtatttttcttttgttaccaggccttgttcatcaaaacaggtgacagtgagtaaccaaatgcagaccagttctatgcaggataatgataaattcccttctagctctattgtaaattgttgtacagatgtcatatttcaattactaagtttcagcagcttattcttgtacaaatgtttaaaatatggcttttctaattggatattgtattttttttaagtcttcttgaaggcactctaattgctgctaaatgatgttgcttctttgctaaaaaattaaatgacctagaaggtgcaagttgactgtacatcatagatattaaaaagcagacagtcattaacaatcaagatgtaaaagtgatccatgttggacataattgagtttttaaatcagtttattgggttctagggctgtagaacacatagatactagatttttaatttgttcatggttattctacatttctagaaagttcttatcagcaagatggtcccataagcaaatttcttgtggtttgtacagatttgttaaaatgtgaacgttttctaactgcctcgtagggtagaaaccaatatttttcaggatgctgtatttcactcctgtaaggactttttctttattgtcacattcataatgctgatacttacatgtaagttgttcatgttgcagaaaaaggttatacgtaccacggattctctttaatattgtacagttaaactgtatttctgatgttgcaagccattttgttttttcattgtacatagacacattgtctctttaaaatgctgctgaaattgtagagagtatagccaaaacagtaataaacaatgacagttaaaatgtaaagactatgaaaattacattggaagggagctttcaagatggtaggatattgactaactgagctccttcacttaaaaatcagctgaataaattccttaagtatacttcaagacaagtgtaaattgtttcaagctgttaaagttaaacctaataaccattatcaaggcaactcctgggtaagtaacacttagaaccatcaagagtggtttaaggggctggctatacccattcctctgtagagcacagagaaatcctattaaaaaaaaatactacatggtaatgaaatcttagcattgattgagtgctttacgtgctgcctgcaagttttcagttttgttgttagagttttcgtctttatgaatgataaagtcctatgttcataaagtaacatttaaattcctgaactaaaaggaaatgcctgttgtgcttaaaattttggggagatacgaagtgaatgtgtaaatctaactttgaggttcagtaagttaagtagtatagacctagagatcactgctttaccattttactttcaaatgaatgagagcgactgctagtggcagaacgcagaaaaggggaaaaacaagccatgaaatgaagttgctttcctgacctgggtttaggtcatcattttaaaatcaaagatgtgtaggagatgaatcaacttatagacccatattttccttctaaaagtttcccaaagaaatgttatagattttgaataacatgccagtgacccagcaggtccaagatggctaaccaagatggctaatttagccacattgaataacttacttttaccctcacatggaaagttggtatctattgctaaatgatttcaaggtcactctgacagtctttgacactgttttttttagggttttattgttttctggtctcctggtgtctgtcctcagaattaaagcatgtcctgcatccctaagatgatagccaaggcctctcttttattaagagtcagcactgatgtagggtaaaatcaacagtttttgcatatgattttaaaatctttctttgatttgaatttgctttagtgtgtgcatgttgagaggaagtaagtgtagaaaccaccctaatttgtaagttgggagttggagatacttggtggtttttcaaaaataaagactcaatcttttttttttttttaaacactcactaccatctccttctaaaacaactctgtcagtttaaatggcatataaaatgtgaacaaacacctcattacatgaagtcaaaatggtgaagagcttcagtgaaacatttaaagagtatattgtgtgttgttttgctgttcatcattacttattaaatgcagtaatgttgattgcc

SEQ ID NO: 316305 - DNA, 4702 bp, Homo sapiens
gcctcagccgccacccacagcccgccgccgccgcctcccgggcgacgccgggggccgacgcactgcagaggtgccggcaggttccgcccgcggaagtgtcctcggccggcgcagcccgcgctccgcccgcgctccgaccccggcccggctggcaccccctcgacgcctccgccgccgcgctcctttcctcctcctctcctctggcgcgcccgctcgctccctcgcttctccccctttccctcctccctgtcccctctccttccctcacctctttcctccccacctcccctcttctcggtttcctcccccatccccttgactctcccctcccagccctcgctctctcgctcgccctcagcgcggcccccgccatgacggaggcgggtgccggtgccgttgccgccgctgccgtcgcagggggggagtcgggttcccagaaagtagcttgatgagtgtccaaagtagcagtggaagtttggaggggccgccatcttggtcccagctctccacgtctccaaccccgggctcggcggcggcggccaggtccctgctgaatcacacgccgccatccgggaggcccagggaaggtgcaatggatgagcttcatagtctggatccaagaaggcaagagttattggaagctagatttactggagttgcaagtgggagcactggaagtacgggcagttgcagtgttggagctaaagcctcaacaaataacgaaagctctaatcacagttttggaagcttgggatctttaagtgacaaagaatcagagacaccggagaagaaacaatcggaatcatccaggggaagaaagagaaaagcagaaaaccagaatgaaagtagtcaggggttccccaacctcccggtcttccagtccttggcctattgggaaatgggtcgtacagcaggaggaaaaagtattgggggacgtggccacaaaattagcgactattttgaataccagggtggaaatggctcaagtccagtaagaggcatacctcctgcaatccgttctcctcaaaattcacattcacattccactccttcctcatctgttcgaccgaatagcccttctcctactgcattagcatttggggaccaccctattgtacaaccaaagcaattatcctttaaaattattcagactgatctcacaatgctgaaattagcagcattagaaagtaataaaatccaggacctggaaaagaaggagggacgtatagatgatttgctcagggctaactgtgatctcagacggcaaatagatgaacaacaaaaattacttgaaaaatacaaagaacgattaaataagtgcatatcaatgagcaagaaacttcttattgaaaagagtacacaagaaaagctgtcaagcagagagaagagtatgcaagatcgattacgcctcgggcactttacaacagttagacatggcgcttcatttactgaacaatggacagatggttttgcatttcagaatcttgtgaagcaacaagaatgggtgaatcagcaaagggaagatattgaaaggcaaaggaaacttctagccaaacgcaaacctcccacagctaataattctcaggcaccctctaccaattctgaaccaaaacaaaggaaaaacaaagcagtcaatggagcagagaatgatccctttgttagaccaaatttaccacaactgttgactttggcagaatatcatgaacaggaagaaattttcaaacttagactaggacatctcaaaaaggaagaggcagaaatccaggcagaacttgaacgtttggaaagagtcagaaatcttcacatacgtgagctgaaaagaataaacaatgaagataattcacagttcaaagatcacccaacattaaatgaaagatatttattacttcatctgcttggtagaggtggctttagtgaagtgtataaggcttttgacctttatgaacaaagatatgctgctgtgaagatacatcagcttaataaaagctggagagatgagaagaaagaaaactaccacaaacatgcctgcagagagtatagaatacacaaagaactggatcaccccagaatagttaaactctatgattatttctccttggatacagatacgttttgtacagtgttagaatactgtgaaggcaatgacttggatttctatctgaagcaacacaagttaatgtcagagaaagaagctcggtctattgtaatgcagattgtaaatgcactaagatatctcaatgagatcaaaccccctattatacattatgatcttaagccaggaaacatcctactggtagatggaacagcatgtggtgaaatcaaaatcactgattttggtctgtccaagattatggatgatgatagctatggtgtagatggaatggatctaacttcccagggggcaggcacttactggtatttacctcctgagtgttttgtagttggaaaagagccaccaaagatttccaacaaggttgatgtatggtcggttggagtcatcttctttcagtgtctttatggtagaaagccatttggtcacaatcaatctcaacaagacattcttcaagaaaatacaatattaaaagccacagaagtccagttccctgtaaaaccggttgtaagcagtgaagccaaggcatttataagacgctgtttggcatatcgaaaagaagatcgatttgatgtgcaccagctggcaaatgacccataccttctcccacacatgagaagatcaaattcttcaggaaacctacacatggctgggctgacagcatcccctacacccccttcttcaagcataattacttactgactttcctccaagattggcatgatatctttgaatttgcttccagatgcacacttaagtttgagagcatttgagtgtttgttttctttttcttttttttttttttttttttacacaagacgtggttaagaactgtttgtgaactgaagttcctcatagtgtcatttgtatgagagaggatcatggacaatgaataaatgcacacttctgactataattttgagcagtgaaggaaggatgactgcctgttacacagaaacaggaataccatgttaagatagaggaaaaaaattttgtttatttgggggaacactgtaaataacgtttataatacttaaatacatttggttgttactagagagttctaatatgaagggtagtttttcattatttaaaaacacatggaaaaatatgagacatatttctaacatacgaactatagtgcctggatacattcttcagcatttggcagttaatctgctgaaaccaaagtaagaactgaatgacagtgacagttgtgttttatagtaatagaatgtgagagttagaatctttggacaaagttaggctttgtcatttgcctattcagacttttaccaagttgtacctcgagatcacatgtccgttttctttcactggttatattaaagggagagctattatttctaaatactttacacctttgacaaaatgagctgcttgtgttgaaatcagttgaattcactaaattataatattgccagtgttttcaacacgttagaattgataacaggtatttttcttttgttaccaggccttgttcatcaaaacaggtgacagtgagtaaccaaatgcagaccagttctatgcaggataatgataaattcccttctagctctattgtaaattgttgtacagatgtcatatttcaattactaagtttcagcagcttattcttgtacaaatgtttaaaatatggcttttctaattggatattgtattttttttaagtcttcttgaaggcactctaattgctgctaaatgatgttgcttctttgctaaaaaattaaatgacctagaaggtgcaagttgactgtacatcatagatattaaaaagcagacagtcattaacaatcaagatgtaaaagtgatccatgttggacataattgagtttttaaatcagtttattgggttctagggctgtagaacacatagatactagatttttaatttgttcatggttattctacatttctagaaagttcttatcagcaagatggtcccataagcaaatttcttgtggtttgtacagatttgttaaaatgtgaacgttttctaactgcctcgtagggtagaaaccaatatttttcaggatgctgtatttcactcctgtaaggactttttctttattgtcacattcataatgctgatacttacatgtaagttgttcatgttgcagaaaaaggttatacgtaccacggattctctttaatattgtacagttaaactgtatttctgatgttgcaagccattttgttttttcattgtacatagacacattgtctctttaaaatgctgctgaaattgtagagagtatagccaaaacagtaataaacaatgacagttaaaatgtaaagactatgaaaattacattggaagggagctttcaagatggtaggatattgactaactgagctccttcacttaaaaatcagctgaataaattccttaagtatacttcaagacaagtgtaaattgtttcaagctgttaaagttaaacctaataaccattatcaaggcaactcctgggtaagtaacacttagaaccatcaagagtggtttaaggggctggctatacccattcctctgtagagcacagagaaatcctattaaaaaaaaatactacatggtaa

SEQ ID NO: 316306 - DNA, 5232 bp, Homo sapiens
gcctcagccgccacccacagcccgccgccgccgcctcccgggcgacgccgggggccgacgcactgcagaggtgccggcaggttccgcccgcggaagtgtcctcggccggcgcagcccgcgctccgcccgcgctccgaccccggcccggctggcaccccctcgacgcctccgccgccgcgctcctttcctcctcctctcctctggcgcgcccgctcgctccctcgcttctccccctttccctcctccctgtcccctctccttccctcacctctttcctccccacctcccctcttctcggtttcctcccccatccccttgactctcccctcccagccctcgctctctcgctcgccctcagcgcggcccccgccatgacggaggcgggtgccggtgccgttgccgccgctgccgtcgcagggggggagtcgggttcccagaaagtagcttgatgagtgtccaaagtagcagtggaagtttggaggggccgccatcttggtcccagctctccacgtctccaaccccgggctcggcggcggcggccaggtccctgctgaatcacacgccgccatccgggaggcccagggaaggtgcaatggatgagcttcatagtctggatccaagaaggcaagagttattggaagctagatttactggagttgcaagtgggagcactggaagtacgggcagttgcagtgttggagctaaagcctcaacaaataacgaaagctctaatcacagttttggaagcttgggatctttaagtgacaaagaatcagagacaccggagaagaaacaatcggaatcatccaggggaagaaagagaaaagcagaaaaccagaatgaaagtagtcaggggttccccaacctcccggtcttccagtccttggcctattgggaaatgggtcgtacagcaggaggaaaaagtattgggggacgtggccacaaaattagcgactattttgaataccagggtggaaatggctcaagtccagtaagaggcatacctcctgcaatccgttctcctcaaaattcacattcacattccactccttcctcatctgttcgaccgaatagcccttctcctactgcattagcatttggggaccaccctattgtacaaccaaagcaattatcctttaaaattattcagactgatctcacaatgctgaaattagcagcattagaaagtaataaaatccaggacctggaaaagaaggagggacgtatagatgatttgctcagggctaactgtgatctcagacggcaaatagatgaacaacaaaaattacttgaaaaatacaaagaacgattaaataagtgcatatcaatgagcaagaaacttcttattgaaaagagtacacaagaaaagctgtcaagcagagagaagagtatgcaagatcgattacgcctcgggcactttacaacagttagacatggcgcttcatttactgaacaatggacagatggttttgcatttcagaatcttgtgaagcaacaagaatgggtgaatcagcaaagggaagatattgaaaggcaaaggaaacttctagccaaacgcaaacctcccacagctaataattctcaggcaccctctaccaattctgaaccaaaacaaaggaaaaacaaagcagtcaatggagcagagaatgatccctttgttagaccaaatttaccacaactgttgactttggcagaatatcatgaacaggaagaaattttcaaacttagactaggacatctcaaaaaggaagaggcagaaatccaggcagaacttgaacgtttggaaagagtcagaaatcttcacatacgtgagctgaaaagaataaacaatgaagataattcacagttcaaagatcacccaacattaaatgaaagatatttattacttcatctgcttggtagaggtggctttagtgaagtgtataaggcttttgacctttatgaacaaagatatgctgctgtgaagatacatcagcttaataaaagctggagagatgagaagaaagaaaactaccacaaacatgcctgcagagagtatagaatacacaaagaactggatcaccccagaatagttaaactctatgattatttctccttggatacagatacgttttgtacagtgttagaatactgtgaaggcaatgacttggatttctatctgaagcaacacaagttaatgtcagagaaagaagctcggtctattgtaatgcagattgtaaatgcactaagatatctcaatgagatcaaaccccctattatacattatgatcttaagccaggaaacatcctactggtagatggaacagcatgtggtgaaatcaaaatcactgattttggtctgtccaagattatggatgatgatagctatggtgtagatggaatggatctaacttcccagggggcaggcacttactggtatttacctcctgagtgttttgtagttggaaaagagccaccaaagatttccaacaaggttgatgtatggtcggttggagtcatcttctttcagtgtctttatggtagaaagccatttggtcacaatcaatctcaacaagacattcttcaagaaaatacaatattaaaagccacagaagtccagttccctgtaaaaccggttgtaagcagtgaagccaaggcatttataagacgctgtttggcatatcgaaaagaagatcgatttgatgtgcaccagctggcaaatgacccataccttctcccacacatgagaagatcaaattcttcaggaaacctacacatggctgggctgacagcatcccctacacccccttcttcaagcataattacttactgactttcctccaagattggcatgatatctttgaatttgcttccagatgcacacttaagtttgagagcatttgagtgtttgttttctttttcttttttttttttttttttttacacaagacgtggttaagaactgtttgtgaactgaagttcctcatagtgtcatttgtatgagagaggatcatggacaatgaataaatgcacacttctgactataattttgagcagtgaaggaaggatgactgcctgttacacagaaacaggaataccatgttaagatagaggaaaaaaattttgtttatttgggggaacactgtaaataacgtttataatacttaaatacatttggttgttactagagagttctaatatgaagggtagtttttcattatttaaaaacacatggaaaaatatgagacatatttctaacatacgaactatagtgcctggatacattcttcagcatttggcagttaatctgctgaaaccaaagtaagaactgaatgacagtgacagttgtgttttatagtaatagaatgtgagagttagaatctttggacaaagttaggctttgtcatttgcctattcagacttttaccaagttgtacctcgagatcacatgtccgttttctttcactggttatattaaagggagagctattatttctaaatactttacacctttgacaaaatgagctgcttgtgttgaaatcagttgaattcactaaattataatattgccagtgttttcaacacgttagaattgataacaggtatttttcttttgttaccaggccttgttcatcaaaacaggtgacagtgagtaaccaaatgcagaccagttctatgcaggataatgataaattcccttctagctctattgtaaattgttgtacagatgtcatatttcaattactaagtttcagcagcttattcttgtacaaatgtttaaaatatggcttttctaattggatattgtattttttttaagtcttcttgaaggcactctaattgctgctaaatgatgttgcttctttgctaaaaaattaaatgacctagaaggtgcaagttgactgtacatcatagatattaaaaagcagacagtcattaacaatcaagatgtaaaagtgatccatgttggacataattgagtttttaaatcagtttattgggttctagggctgtagaacacatagatactagatttttaatttgttcatggttattctacatttctagaaagttcttatcagcaagatggtcccataagcaaatttcttgtggtttgtacagatttgttaaaatgtgaacgttttctaactgcctcgtagggtagaaaccaatatttttcaggatgctgtatttcactcctgtaaggactttttctttattgtcacattcataatgctgatacttacatgtaagttgttcatgttgcagaaaaaggttatacgtaccacggattctctttaatattgtacagttaaactgtatttctgatgttgcaagccattttgttttttcattgtacatagacacattgtctctttaaaatgctgctgaaattgtagagagtatagccaaaacagtaataaacaatgacagttaaaatgtaaagactatgaaaattacattggaagggagctttcaagatggtaggatattgactaactgagctccttcacttaaaaatcagctgaataaattccttaagtatacttcaagacaagtgtaaattgtttcaagctgttaaagttaaacctaataaccattatcaaggcaactcctgggtaagtaacacttagaaccatcaagagtggtttaaggggctggctatacccattcctctgtagagcacagagaaatcctattaaaaaaaaatactacatggtaaaaaaaaaaaaaaaaaaaaaaaaaaaaaaaaaaaaaaaaaaaaaaaaaaaagaaaacaaaaaaaaaaaaaaaaaaaaaaaaaaaaaaaaaacaaaaaaaaacaaaaaaaaaaaagcgaggggggggagagagaagatatgtacttgaagagggggagaaggagaagagagagtaaagaagaagtaataagatagtagagagatgaaggaagaaataaatagttgagtagttagatatatagtagagaagaagaaaacgagtgtatagaacaacaacacaaacacaaagagaaaaagacaaaaaaagagaaagaagaaagagaaaaaaaaaaaaaaaacaaagaaaaaaaaagaaaagaaaaaaaaagaaaaaaaaaaacagagaagaagaaaacaaaaagagagagaaagagaaaaagacaaaagaaaataaaggaagaagcagaaagaagaaaaaaaaaacaagaagacaagaaacaaaaaagaggaagaagaacaaaaaaagaaaagaaagaagacgcaacaaagacac

SEQ ID NO: 316307 - DNA, 5703 bp, Homo sapiens
gcctcagccgccacccacagcccgccgccgccgcctcccgggcgacgccgggggccgacgcactgcagaggtgccggcaggttccgcccgcggaagtgtcctcggccggcgcagcccgcgctccgcccgcgctccgaccccggcccggctggcaccccctcgacgcctccgccgccgcgctcctttcctcctcctctcctctggcgcgcccgctcgctccctcgcttctccccctttccctcctccctgtcccctctccttccctcacctctttcctccccacctcccctcttctcggtttcctcccccatccccttgactctcccctcccagccctcgctctctcgctcgccctcagcgcggcccccgccatgacggaggcgggtgccggtgccgttgccgccgctgccgtcgcagggggggagtcgggttcccagaaagtagcttgatgagtgtccaaagtagcagtggaagtttggaggggccgccatcttggtcccagctctccacgtctccaaccccgggctcggcggcggcggccaggtccctgctgaatcacacgccgccatccgggaggcccagggaaggtgcaatggatgagcttcatagtctggatccaagaaggcaagagttattggaagctagatttactggagttgcaagtgggagcactggaagtacgggcagttgcagtgttggagctaaagcctcaacaaataacgaaagctctaatcacagttttggaagcttgggatctttaagtgacaaagaatcagagacaccggagaagaaacaatcggaatcatccaggggaagaaagagaaaagcagaaaaccagaatgaaagtagtcagggaaaaagtattgggggacgtggccacaaaattagcgactattttgaataccagggtggaaatggctcaagtccagtaagaggcatacctcctgcaatccgttctcctcaaaattcacattcacattccactccttcctcatctgttcgaccgaatagcccttctcctactgcattagcatttggggaccaccctattgtacaaccaaagcaattatcctttaaaattattcagactgatctcacaatgctgaaattagcagcattagaaagtaataaaatccaggacctggaaaagaaggagggacgtatagatgatttgctcagggctaactgtgatctcagacggcaaatagatgaacaacaaaaattacttgaaaaatacaaagaacgattaaataagtgcatatcaatgagcaagaaacttcttattgaaaagagtacacaagaaaagctgtcaagcagagagaagagtatgcaagatcgattacgcctcgggcactttacaacagttagacatggcgcttcatttactgaacaatggacagatggttttgcatttcagaatcttgtgaagcaacaagaatgggtgaatcagcaaagggaagatattgaaaggcaaaggaaacttctagccaaacgcaaacctcccacagctaataattctcaggcaccctctaccaattctgaaccaaaacaaaggaaaaacaaagcagtcaatggagcagagaatgatccctttgttagaccaaatttaccacaactgttgactttggcagaatatcatgaacaggaagaaattttcaaacttagactaggacatctcaaaaaggaagaggcagaaatccaggcagaacttgaacgtttggaaagagtcagaaatcttcacatacgtgagctgaaaagaataaacaatgaagataattcacagttcaaagatcacccaacattaaatgaaagatatttattacttcatctgcttggtagaggtggctttagtgaagtgtataaggcttttgacctttatgaacaaagatatgctgctgtgaagatacatcagcttaataaaagctggagagatgagaagaaagaaaactaccacaaacatgcctgcagagagtatagaatacacaaagaactggatcaccccagaatagttaaactctatgattatttctccttggatacagatacgttttgtacagtgttagaatactgtgaaggcaatgacttggatttctatctgaagcaacacaagttaatgtcagagaaagaagctcggtctattgtaatgcagattgtaaatgcactaagatatctcaatgagatcaaaccccctattatacattatgatcttaagccaggaaacatcctactggtagatggaacagcatgtggtgaaatcaaaatcactgattttggtctgtccaagattatggatgatgatagctatggtgtagatggaatggatctaacttcccagggggcaggcacttactggtatttacctcctgagtgttttgtagttggaaaagagccaccaaagatttccaacaaggttgatgtatggtcggttggagtcatcttctttcagtgtctttatggtagaaagccatttggtcacaatcaatctcaacaagacattcttcaagaaaatacaatattaaaagccacagaagtccagttccctgtaaaaccggttgtaagcagtgaagccaaggcatttataagacgctgtttggcatatcgaaaagaagatcgatttgatgtgcaccagctggcaaatgacccataccttctcccacacatgagaagatcaaattcttcaggaaacctacacatggctgggctgacagcatcccctacacccccttcttcaagcataattacttactgactttcctccaagattggcatgatatctttgaatttgcttccagatgcacacttaagtttgagagcatttgagtgtttgttttctttttcttttttttttttttttttttacacaagacgtggttaagaactgtttgtgaactgaagttcctcatagtgtcatttgtatgagagaggatcatggacaatgaataaatgcacacttctgactataattttgagcagtgaaggaaggatgactgcctgttacacagaaacaggaataccatgttaagatagaggaaaaaaattttgtttatttgggggaacactgtaaataacgtttataatacttaaatacatttggttgttactagagagttctaatatgaagggtagtttttcattatttaaaaacacatggaaaaatatgagacatatttctaacatacgaactatagtgcctggatacattcttcagcatttggcagttaatctgctgaaaccaaagtaagaactgaatgacagtgacagttgtgttttatagtaatagaatgtgagagttagaatctttggacaaagttaggctttgtcatttgcctattcagacttttaccaagttgtacctcgagatcacatgtccgttttctttcactggttatattaaagggagagctattatttctaaatactttacacctttgacaaaatgagctgcttgtgttgaaatcagttgaattcactaaattataatattgccagtgttttcaacacgttagaattgataacaggtatttttcttttgttaccaggccttgttcatcaaaacaggtgacagtgagtaaccaaatgcagaccagttctatgcaggataatgataaattcccttctagctctattgtaaattgttgtacagatgtcatatttcaattactaagtttcagcagcttattcttgtacaaatgtttaaaatatggcttttctaattggatattgtattttttttaagtcttcttgaaggcactctaattgctgctaaatgatgttgcttctttgctaaaaaattaaatgacctagaaggtgcaagttgactgtacatcatagatattaaaaagcagacagtcattaacaatcaagatgtaaaagtgatccatgttggacataattgagtttttaaatcagtttattgggttctagggctgtagaacacatagatactagatttttaatttgttcatggttattctacatttctagaaagttcttatcagcaagatggtcccataagcaaatttcttgtggtttgtacagatttgttaaaatgtgaacgttttctaactgcctcgtagggtagaaaccaatatttttcaggatgctgtatttcactcctgtaaggactttttctttattgtcacattcataatgctgatacttacatgtaagttgttcatgttgcagaaaaaggttatacgtaccacggattctctttaatattgtacagttaaactgtatttctgatgttgcaagccattttgttttttcattgtacatagacacattgtctctttaaaatgctgctgaaattgtagagagtatagccaaaacagtaataaacaatgacagttaaaatgtaaagactatgaaaattacattggaagggagctttcaagatggtaggatattgactaactgagctccttcacttaaaaatcagctgaataaattccttaagtatacttcaagacaagtgtaaattgtttcaagctgttaaagttaaacctaataaccattatcaaggcaactcctgggtaagtaacacttagaaccatcaagagtggtttaaggggctggctatacccattcctctgtagagcacagagaaatcctattaaaaaaaaatactacatggtaatgaaatcttagcattgattgagtgctttacgtgctgcctgcaagttttcagttttgttgttagagttttcgtctttatgaatgataaagtcctatgttcataaagtaacatttaaattcctgaactaaaaggaaatgcctgttgtgcttaaaattttggggagatacgaagtgaatgtgtaaatctaactttgaggttcagtaagttaagtagtatagacctagagatcactgctttaccattttactttcaaatgaatgagagcgactgctagtggcagaacgcagaaaaggggaaaaacaagccatgaaatgaagttgctttcctgacctgggtttaggtcatcattttaaaatcaaagatgtgtaggagatgaatcaacttatagacccatattttccttctaaaagtttcccaaagaaatgttatagattttgaataacatgccagtgacccagcaggtccaagatggctaaccaagatggctaatttagccacattgaataacttacttttaccctcacatggaaagttggtatctattgctaaatgatttcaaggtcactctgacagtctttgacactgttttttttagggttttattgttttctggtctcctggtgtctgtcctcagaattaaagcatgtcctgcatccctaagatgatagccaaggcctctcttttattaagagtcagcactgatgtagggtaaaatcaacagtttttgcatatgattttaaaatctttctttgatttgaatttgctttagtgtgtgcatgttgagaggaagtaagtgtagaaaccaccctaatttgtaagttgggagttggagatacttggtggtttttcaaaaataaagactcaatcttttttttttttttaaacactcactaccatctccttctaaaacaactctgtcagtttaaatggcatataaaatgtgaacaaacacctcattacatgaagtcaaaatggtgaagagcttcagtgaaacatttaaagagtatattgtgtgttgttttgctgttcatcattacttattaaatgcagtaatgttgattgcc

SEQ ID NO: 316308 - DNA, 5163 bp, Homo sapiens
ggcagagcttcttggatccagactatgaagctcatccattgcaccttccctgggcctcccggatggcggcgtgtgattcagcaggcaagagttattggaagctagatttactggagttgcaagtgggagcactggaagtacgggcagttgcagtgttggagctaaagcctcaacaaataacgaaagctctaatcacagttttggaagcttgggatctttaagtgacaaagaatcagagacaccggagaagaaacaatcggaatcatccaggggaagaaagagaaaagcagaaaaccagaatgaaagtagtcagggaaaaagtattgggggacgtggccacaaaattagcgactattttgaataccagggtggaaatggctcaagtccagtaagaggcatacctcctgcaatccgttctcctcaaaattcacattcacattccactccttcctcatctgttcgaccgaatagcccttctcctactgcattagcatttggggaccaccctattgtacaaccaaagcaattatcctttaaaattattcagactgatctcacaatgctgaaattagcagcattagaaagtaataaaatccaggacctggaaaagaaggagggacgtatagatgatttgctcagggctaactgtgatctcagacggcaaatagatgaacaacaaaaattacttgaaaaatacaaagaacgattaaataagtgcatatcaatgagcaagaaacttcttattgaaaagagtacacaagaaaagctgtcaagcagagagaagagtatgcaagatcgattacgcctcgggcactttacaacagttagacatggcgcttcatttactgaacaatggacagatggttttgcatttcagaatcttgtgaagcaacaagaatgggtgaatcagcaaagggaagatattgaaaggcaaaggaaacttctagccaaacgcaaacctcccacagctaataattctcaggcaccctctaccaattctgaaccaaaacaaaggaaaaacaaagcagtcaatggagcagagaatgatccctttgttagaccaaatttaccacaactgttgactttggcagaatatcatgaacaggaagaaattttcaaacttagactaggacatctcaaaaaggaagaggcagaaatccaggcagaacttgaacgtttggaaagagtcagaaatcttcacatacgtgagctgaaaagaataaacaatgaagataattcacagttcaaagatcacccaacattaaatgaaagatatttattacttcatctgcttggtagaggtggctttagtgaagtgtataaggcttttgacctttatgaacaaagatatgctgctgtgaagatacatcagcttaataaaagctggagagatgagaagaaagaaaactaccacaaacatgcctgcagagagtatagaatacacaaagaactggatcaccccagaatagttaaactctatgattatttctccttggatacagatacgttttgtacagtgttagaatactgtgaaggcaatgacttggatttctatctgaagcaacacaagttaatgtcagagaaagaagctcggtctattgtaatgcagattgtaaatgcactaagatatctcaatgagatcaaaccccctattatacattatgatcttaagccaggaaacatcctactggtagatggaacagcatgtggtgaaatcaaaatcactgattttggtctgtccaagattatggatgatgatagctatggtgtagatggaatggatctaacttcccagggggcaggcacttactggtatttacctcctgagtgttttgtagttggaaaagagccaccaaagatttccaacaaggttgatgtatggtcggttggagtcatcttctttcagtgtctttatggtagaaagccatttggtcacaatcaatctcaacaagacattcttcaagaaaatacaatattaaaagccacagaagtccagttccctgtaaaaccggttgtaagcagtgaagccaaggcatttataagacgctgtttggcatatcgaaaagaagatcgatttgatgtgcaccagctggcaaatgacccataccttctcccacacatgagaagatcaaattcttcaggaaacctacacatggctgggctgacagcatcccctacacccccttcttcaagcataattacttactgactttcctccaagattggcatgatatctttgaatttgcttccagatgcacacttaagtttgagagcatttgagtgtttgttttctttttcttttttttttttttttttttacacaagacgtggttaagaactgtttgtgaactgaagttcctcatagtgtcatttgtatgagagaggatcatggacaatgaataaatgcacacttctgactataattttgagcagtgaaggaaggatgactgcctgttacacagaaacaggaataccatgttaagatagaggaaaaaaattttgtttatttgggggaacactgtaaataacgtttataatacttaaatacatttggttgttactagagagttctaatatgaagggtagtttttcattatttaaaaacacatggaaaaatatgagacatatttctaacatacgaactatagtgcctggatacattcttcagcatttggcagttaatctgctgaaaccaaagtaagaactgaatgacagtgacagttgtgttttatagtaatagaatgtgagagttagaatctttggacaaagttaggctttgtcatttgcctattcagacttttaccaagttgtacctcgagatcacatgtccgttttctttcactggttatattaaagggagagctattatttctaaatactttacacctttgacaaaatgagctgcttgtgttgaaatcagttgaattcactaaattataatattgccagtgttttcaacacgttagaattgataacaggtatttttcttttgttaccaggccttgttcatcaaaacaggtgacagtgagtaaccaaatgcagaccagttctatgcaggataatgataaattcccttctagctctattgtaaattgttgtacagatgtcatatttcaattactaagtttcagcagcttattcttgtacaaatgtttaaaatatggcttttctaattggatattgtattttttttaagtcttcttgaaggcactctaattgctgctaaatgatgttgcttctttgctaaaaaattaaatgacctagaaggtgcaagttgactgtacatcatagatattaaaaagcagacagtcattaacaatcaagatgtaaaagtgatccatgttggacataattgagtttttaaatcagtttattgggttctagggctgtagaacacatagatactagatttttaatttgttcatggttattctacatttctagaaagttcttatcagcaagatggtcccataagcaaatttcttgtggtttgtacagatttgttaaaatgtgaacgttttctaactgcctcgtagggtagaaaccaatatttttcaggatgctgtatttcactcctgtaaggactttttctttattgtcacattcataatgctgatacttacatgtaagttgttcatgttgcagaaaaaggttatacgtaccacggattctctttaatattgtacagttaaactgtatttctgatgttgcaagccattttgttttttcattgtacatagacacattgtctctttaaaatgctgctgaaattgtagagagtatagccaaaacagtaataaacaatgacagttaaaatgtaaagactatgaaaattacattggaagggagctttcaagatggtaggatattgactaactgagctccttcacttaaaaatcagctgaataaattccttaagtatacttcaagacaagtgtaaattgtttcaagctgttaaagttaaacctaataaccattatcaaggcaactcctgggtaagtaacacttagaaccatcaagagtggtttaaggggctggctatacccattcctctgtagagcacagagaaatcctattaaaaaaaaatactacatggtaatgaaatcttagcattgattgagtgctttacgtgctgcctgcaagttttcagttttgttgttagagttttcgtctttatgaatgataaagtcctatgttcataaagtaacatttaaattcctgaactaaaaggaaatgcctgttgtgcttaaaattttggggagatacgaagtgaatgtgtaaatctaactttgaggttcagtaagttaagtagtatagacctagagatcactgctttaccattttactttcaaatgaatgagagcgactgctagtggcagaacgcagaaaaggggaaaaacaagccatgaaatgaagttgctttcctgacctgggtttaggtcatcattttaaaatcaaagatgtgtaggagatgaatcaacttatagacccatattttccttctaaaagtttcccaaagaaatgttatagattttgaataacatgccagtgacccagcaggtccaagatggctaaccaagatggctaatttagccacattgaataacttacttttaccctcacatggaaagttggtatctattgctaaatgatttcaaggtcactctgacagtctttgacactgttttttttagggttttattgttttctggtctcctggtgtctgtcctcagaattaaagcatgtcctgcatccctaagatgatagccaaggcctctcttttattaagagtcagcactgatgtagggtaaaatcaacagtttttgcatatgattttaaaatctttctttgatttgaatttgctttagtgtgtgcatgttgagaggaagtaagtgtagaaaccaccctaatttgtaagttgggagttggagatacttggtggtttttcaaaaataaagactcaatcttttttttttttttaaacactcactaccatctccttctaaaacaactctgtcagtttaaatggcatataaaatgtgaacaaacacctcattacatgaagtcaaaatggtgaagagcttcagtgaaacatttaaagagtatattgtgtgttgttttgctgttcatcattacttattaaatgcagtaatgttgattgcc

SEQ ID NO: 316309 - DNA, 4360 bp, Homo sapiens
gcctcagccgccacccacagcccgccgccgccgcctcccgggcgacgccgggggccgacgcactgcagaggtgccggcaggttccgcccgcggaagtgtcctcggccggcgcagcccgcgctccgcccgcgctccgaccccggcccggctggcaccccctcgacgcctccgccgccgcgctcctttcctcctcctctcctctggcgcgcccgctcgctccctcgcttctccccctttccctcctccctgtcccctctccttccctcacctctttcctccccacctcccctcttctcggtttcctcccccatccccttgactctcccctcccagccctcgctctctcgctcgccctcagcgcggcccccgccatgacggaggcgggtgccggtgccgttgccgccgctgccgtcgcagggggggagtcgggttcccagaaagtagcttgatgagtgtccaaagtagcagtggaagtttggaggggccgccatcttggtcccagctctccacgtctccaaccccgggctcggcggcggcggccaggtccctgctgaatcacacgccgccatccgggaggcccagggaaggtgcaatggatgagcttcatagtctggatccaagaaggcaagagttattggaagctagatttactggagttgcaagtgggagcactggaagtacgggcagttgcagtgttggagctaaagcctcaacaaataacgaaagctctaatcacagttttggaagcttgggatctttaagtgacaaagaatcagagacaccggagaagaaacaatcggaatcatccaggggaagaaagagaaaagcagaaaaccagaatgaaagtagtcagggaaaaagtattgggggacgtggccacaaaattagcgactattttgaataccagggtggaaatggctcaagtccagtaagaggcatacctcctgcaatccgttctcctcaaaattcacattcacattccactccttcctcatctgttcgaccgaatagcccttctcctactgcattagcatttggggaccaccctattgtacaaccaaagcaattatcctttaaaattattcagactgatctcacaatgctgaaattagcagcattagaaagtaataaaatccaggacctggaaaagaaggagggacgtatagatgatttgctcagggctaactgtgatctcagacggcaaatagatgaacaacaaaaattacttgaaaaatacaaagaacgattaaataagtgcatatcaatgagcaagaaacttcttattgaaaagagtacacaagaaaagctgtcaagcagagagaagagtatgcaagatcgattacgcctcgggcactttacaacagttagacatggcgcttcatttactgaacaatggacagatggttttgcatttcagaatcttgtgaagcaacaagaatgggtgaatcagcaaagggaagatattgaaaggcaaaggaaacttctagccaaacgcaaacctcccacagctaataattctcaggcaccctctaccaattctgaaccaaaacaaaggaaaaacaaagcagtcaatggagcagagaatgatccctttgttagaccaaatttaccacaactgttgactttggcagaatatcatgaacaggaagaaattttcaaacttagactaggacatctcaaaaaggaagaggcagaaatccaggcagaacttgaacgtttggaaagagtcagaaatcttcacatacgtgagctgaaaagaataaacaatgaagataattcacagttcaaagatcacccaacattaaatgaaagatatttattacttcatctgcttggtagaggtggctttagtgaagtgtataaggcttttgacctttatgaacaaagatatgctgctgtgaagatacatcagcttaataaaagctggagagatgagaagaaagaaaactaccacaaacatgcctgcagagagtatagaatacacaaagaactggatcaccccagaatagttaaactctatgattatttctccttggatacagatacgttttgtacagtgttagaatactgtgaaggcaatgacttggatttctatctgaagcaacacaagttaatgtcagagaaagaagctcggtctattgtaatgcagattgtaaatgcactaagatatctcaatgagatcaaaccccctattatacattatgatcttaagccaggaaacatcctactggtagatggaacagcatgtggtgaaatcaaaatcactgattttggtctgtccaagattatggatgatgatagctatggtgtagatggaatggatctaacttcccagggggcaggcacttactggtatttacctcctgagtgttttgtagttggaaaagagccaccaaagatttccaacaaggttgatgtatggtcggttggagtcatcttctttcagtgtctttatggtagaaagccatttggtcacaatcaatctcaacaagacattcttcaagaaaatacaatattaaaagccacagaagtccagttccctgtaaaaccggttgtaagcagtgaagccaaggcatttataagacgctgtttggcatatcgaaaagaagatcgatttgatgtgcaccagctggcaaatgacccataccttctcccacacatgagaagatcaaattcttcaggaaacctacacatggctgggctgacagcatcccctacacccccttcttcaagcataattacttactgactttcctccaagattggcatgatatctttgaatttgcttccagatgcacacttaagtttgagagcatttgagtgtttgttttctttttcttttttttttttttttttttacacaagacgtggttaagaactgtttgtgaactgaagttcctcatagtgtcatttgtatgagagaggatcatggacaatgaataaatgcacacttctgactataattttgagcagtgaaggaaggatgactgcctgttacacagaaacaggaataccatgttaagatagaggaaaaaaattttgtttatttgggggaacactgtaaataacgtttataatacttaaatacatttggttgttactagagagttctaatatgaagggtagtttttcattatttaaaaacacatggaaaaatatgagacatatttctaacatacgaactatagtgcctggatacattcttcagcatttggcagttaatctgctgaaaccaaagtaagaactgaatgacagtgacagttgtgttttatagtaatagaatgtgagagttagaatctttggacaaagttaggctttgtcatttgcctattcagacttttaccaagttgtacctcgagatcacatgtccgttttctttcactggttatattaaagggagagctattatttctaaatactttacacctttgacaaaatgagctgcttgtgttgaaatcagttgaattcactaaattataatattgccagtgttttcaacacgttagaattgataacaggtatttttcttttgttaccaggccttgttcatcaaaacaggtgacagtgagtaaccaaatgcagaccagttctatgcaggataatgataaattcccttctagctctattgtaaattgttgtacagatgtcatatttcaattactaagtttcagcagcttattcttgtacaaatgtttaaaatatggcttttctaattggatattgtattttttttaagtcttcttgaaggcactctaattgctgctaaatgatgttgcttctttgctaaaaaattaaatgacctagaaggtgcaagttgactgtacatcatagatattaaaaagcagacagtcattaacaatcaagatgtaaaagtgatccatgttggacataattgagtttttaaatcagtttattgggttctagggctgtagaacacatagatactagatttttaatttgttcatggttattctacatttctagaaagttcttatcagcaagatggtcccataagcaaatttcttgtggtttgtacagatttgttaaaatgtgaacgttttctaactgcctcgtagggtagaaaccaatatttttcaggatgctgtatttcactcctgtaaggactttttctttattgtcacattcataatgctgatacttacatgtaagttgttcatgttgcagaaaaaggttatacgtaccacggattctctttaatattgtacagttaaactgtatttctgatgttgcaagccattttgttttttcattgtacatagacacattgtctctttaaaatgctgctgaaattgtagagagtatagccaaaacagtaataaacaatgacagttaaaatgta

SEQ ID NO: 316310 - DNA, 4236 bp, Homo sapiens
ctctgaccgatattggcacctgcaaagagaaacaaccagtaacaggcagcagcagcatcagtattaatcttccatgatgaaatctttacaggtcaagaacaagtacacagctcttttctcactccttcacagtggaccatgcaactagttgaaatggaagacaatggattgtctacaagccttttgaacagtggagaatgcagggcgttggctttaggaagaggcagaaatccaggcagaacttgaacgtttggaaagagtcagaaatcttcacatacgtgagctgaaaagaataaacaatgaagataattcacagttcaaagatcacccaacattaaatgaaagatatttattacttcatctgcttggtagaggtggctttagtgaagtgtataaggcttttgacctttatgaacaaagatatgctgctgtgaagatacatcagcttaataaaagctggagagatgagaagaaagaaaactaccacaaacatgcctgcagagagtatagaatacacaaagaactggatcaccccagaatagttaaactctatgattatttctccttggatacagatacgttttgtacagtgttagaatactgtgaaggcaatgacttggatttctatctgaagcaacacaagttaatgtcagagaaagaagctcggtctattgtaatgcagattgtaaatgcactaagatatctcaatgagatcaaaccccctattatacattatgatcttaagccaggaaacatcctactggtagatggaacagcatgtggtgaaatcaaaatcactgattttggtctgtccaagattatggatgatgatagctatggtgtagatggaatggatctaacttcccagggggcaggcacttactggtatttacctcctgagtgttttgtagttggaaaagagccaccaaagatttccaacaaggttgatgtatggtcggttggagtcatcttctttcagtgtctttatggtagaaagccatttggtcacaatcaatctcaacaagacattcttcaagaaaatacaatattaaaagccacagaagtccagttccctgtaaaaccggttgtaagcagtgaagccaaggcatttataagacgctgtttggcatatcgaaaagaagatcgatttgatgtgcaccagctggcaaatgacccataccttctcccacacatgagaagatcaaattcttcaggaaacctacacatggctgggctgacagcatcccctacacccccttcttcaagcataattacttactgactttcctccaagattggcatgatatctttgaatttgcttccagatgcacacttaagtttgagagcatttgagtgtttgttttctttttcttttttttttttttttttttacacaagacgtggttaagaactgtttgtgaactgaagttcctcatagtgtcatttgtatgagagaggatcatggacaatgaataaatgcacacttctgactataattttgagcagtgaaggaaggatgactgcctgttacacagaaacaggaataccatgttaagatagaggaaaaaaattttgtttatttgggggaacactgtaaataacgtttataatacttaaatacatttggttgttactagagagttctaatatgaagggtagtttttcattatttaaaaacacatggaaaaatatgagacatatttctaacatacgaactatagtgcctggatacattcttcagcatttggcagttaatctgctgaaaccaaagtaagaactgaatgacagtgacagttgtgttttatagtaatagaatgtgagagttagaatctttggacaaagttaggctttgtcatttgcctattcagacttttaccaagttgtacctcgagatcacatgtccgttttctttcactggttatattaaagggagagctattatttctaaatactttacacctttgacaaaatgagctgcttgtgttgaaatcagttgaattcactaaattataatattgccagtgttttcaacacgttagaattgataacaggtatttttcttttgttaccaggccttgttcatcaaaacaggtgacagtgagtaaccaaatgcagaccagttctatgcaggataatgataaattcccttctagctctattgtaaattgttgtacagatgtcatatttcaattactaagtttcagcagcttattcttgtacaaatgtttaaaatatggcttttctaattggatattgtattttttttaagtcttcttgaaggcactctaattgctgctaaatgatgttgcttctttgctaaaaaattaaatgacctagaaggtgcaagttgactgtacatcatagatattaaaaagcagacagtcattaacaatcaagatgtaaaagtgatccatgttggacataattgagtttttaaatcagtttattgggttctagggctgtagaacacatagatactagatttttaatttgttcatggttattctacatttctagaaagttcttatcagcaagatggtcccataagcaaatttcttgtggtttgtacagatttgttaaaatgtgaacgttttctaactgcctcgtagggtagaaaccaatatttttcaggatgctgtatttcactcctgtaaggactttttctttattgtcacattcataatgctgatacttacatgtaagttgttcatgttgcagaaaaaggttatacgtaccacggattctctttaatattgtacagttaaactgtatttctgatgttgcaagccattttgttttttcattgtacatagacacattgtctctttaaaatgctgctgaaattgtagagagtatagccaaaacagtaataaacaatgacagttaaaatgtaaagactatgaaaattacattggaagggagctttcaagatggtaggatattgactaactgagctccttcacttaaaaatcagctgaataaattccttaagtatacttcaagacaagtgtaaattgtttcaagctgttaaagttaaacctaataaccattatcaaggcaactcctgggtaagtaacacttagaaccatcaagagtggtttaaggggctggctatacccattcctctgtagagcacagagaaatcctattaaaaaaaaatactacatggtaatgaaatcttagcattgattgagtgctttacgtgctgcctgcaagttttcagttttgttgttagagttttcgtctttatgaatgataaagtcctatgttcataaagtaacatttaaattcctgaactaaaaggaaatgcctgttgtgcttaaaattttggggagatacgaagtgaatgtgtaaatctaactttgaggttcagtaagttaagtagtatagacctagagatcactgctttaccattttactttcaaatgaatgagagcgactgctagtggcagaacgcagaaaaggggaaaaacaagccatgaaatgaagttgctttcctgacctgggtttaggtcatcattttaaaatcaaagatgtgtaggagatgaatcaacttatagacccatattttccttctaaaagtttcccaaagaaatgttatagattttgaataacatgccagtgacccagcaggtccaagatggctaaccaagatggctaatttagccacattgaataacttacttttaccctcacatggaaagttggtatctattgctaaatgatttcaaggtcactctgacagtctttgacactgttttttttagggttttattgttttctggtctcctggtgtctgtcctcagaattaaagcatgtcctgcatccctaagatgatagccaaggcctctcttttattaagagtcagcactgatgtagggtaaaatcaacagtttttgcatatgattttaaaatctttctttgatttgaatttgctttagtgtgtgcatgttgagaggaagtaagtgtagaaaccaccctaatttgtaagttgggagttggagatacttggtggtttttcaaaaataaagactcaatcttttttttttttttaaacactcactaccatctccttctaaaacaactctgtcagtttaaatggcatataaaatgtgaacaaacacctcattacatgaagtcaaaatggtgaagagcttcagtgaaacatttaaagagtatattgtgtgttgttttgctgttcatcattacttattaaatgcagtaatgttgattgcc

SEQ ID NO: 316311 - DNA, 3028 bp, Homo sapiens
gcctcagccgccacccacagcccgccgccgccgcctcccgggcgacgccgggggccgacgcactgcagaggtgccggcaggttccgcccgcggaagtgtcctcggccggcgcagcccgcgctccgcccgcgctccgaccccggcccggctggcaccccctcgacgcctccgccgccgcgctcctttcctcctcctctcctctggcgcgcccgctcgctccctcgcttctccccctttccctcctccctgtcccctctccttccctcacctctttcctccccacctcccctcttctcggtttcctcccccatccccttgactctcccctcccagccctcgctctctcgctcgccctcagcgcggcccccgccatgacggaggcgggtgccggtgccgttgccgccgctgccgtcgcagggggggagtcgggttcccagaaagtagcttgatgagtgtccaaagtagcagtggaagtttggaggggccgccatcttggtcccagctctccacgtctccaaccccgggctcggcggcggcggccaggtccctgctgaatcacacgccgccatccgggaggcccagggaaggtgcaatggatgagcttcatagtctggatccaagaaggcaagagttattggaagctagatttactggagttgcaagtgggagcactggaagtacgggcagttgcagtgttggagctaaagcctcaacaaataacgaaagctctaatcacagttttggaagcttgggatctttaagtgacaaagaatcagagacaccggagaagaaacaatcggaatcatccaggggaagaaagagaaaagcagaaaaccagaatgaaagtagtcagggaaaaagtattgggggacgtggccacaaaattagcgactattttgaataccagggtggaaatggctcaagtccagtaagaggcatacctcctgcaatccgttctcctcaaaattcacattcacattccactccttcctcatctgttcgaccgaatagcccttctcctactgcattagcatttggggaccaccctattgtacaaccaaagcaattatcctttaaaattattcagactgatctcacaatgctgaaattagcagcattagaaagtaataaaatccaggacctggaaaagaaggagggacgtatagatgatttgctcagggctaactgtgatctcagacggcaaatagatgaacaacaaaaattacttgaaaaatacaaagaacgattaaataagtgcatatcaatgagcaagaaacttcttattgaaaagagtacacaagaaaagctgtcaagcagagagaagagtatgcaagatcgattacgcctcgggcactttacaacagttagacatggcgcttcatttactgaacaatggacagatggttttgcatttcagaatcttgtgaagcaacaagaatgggtgaatcagcaaagggaagatattgaaaggcaaaggaaacttctagccaaacgcaaacctcccacagctaataattctcaggcaccctctaccaattctgaaccaaaacaaaggaaaaacaaagcagtcaatggagcagagaatgatccctttgttagaccaaatttaccacaactgttgactttggcagaatatcatgaacaggaagaaattttcaaacttagactaggacatctcaaaaaggaagaggcagaaatccaggcagaacttgaacgtttggaaagagtcagaaatcttcacatacgtgagctgaaaagaataaacaatgaagataattcacagttcaaagatcacccaacattaaatgaaagatatttattacttcatctgcttggtagaggtggctttagtgaagtgtataaggcttttgacctttatgaacaaagatatgctgctgtgaagatacatcagcttaataaaagctggagagatgagaagaaagaaaactaccacaaacatgcctgcagagagtatagaatacacaaagaactggatcaccccagaatagttaaactctatgattatttctccttggatacagatacgttttgtacagtgttagaatactgtgaaggcaatgacttggatttctatctgaagcaacacaagttaatgtcagagaaagaagctcggtctattgtaatgcagattgtaaatgcactaagatatctcaatgagatcaaaccccctattatacattatgatcttaagccaggaaacatcctactggtagatggaacagcatgtggtgaaatcaaaatcactgattttggtctgtccaagattatggatgatgatagctatggtgtagatggaatggatctaacttcccagggggcaggcacttactggtatttacctcctgagtgttttgtagttggaaaagagccaccaaagatttccaacaaggttgatgtatggtcggttggagtcatcttctttcagtgtctttatggtagaaagccatttggtcacaatcaatctcaacaagacattcttcaagaaaatacaatattaaaagccacagaagtccagttccctgtaaaaccggttgtaagcagtgaagccaaggcatttataagacgctgtttggcatatcgaaaagaagatcgatttgatgtgcaccagctggcaaatgacccataccttctcccacacatgagaagatcaaattcttcaggaaacctacacatggctgggctgacagcatcccctacacccccttcttcaagcataattacttactgactttcctccaagattggcatgatatctttgaatttgcttccagatgcacacttaagtttgagagcatttgagtgtttgttttctttttcttttttttttttttttttttacacaagacgtggttaagaactgtttgtgaactgaagttcctcatagtgtcatttgtatgagagaggatcatggacaatgaataaatgcacacttctgactataaaaaaaaccatcaattttatccataaaaggcatacaaaaaaatactcatcaaaaaaaaaaccttgt

SEQ ID NO: 316312 - DNA, 2540 bp, Homo sapiens
gcctcagccgccacccacagcccgccgccgccgcctcccgggcgacgccgggggccgacgcactgcagaggtgccggcaggttccgcccgcggaagtgtcctcggccggcgcagcccgcgctccgcccgcgctccgaccccggcccggctggcaccccctcgacgcctccgccgccgcgctcctttcctcctcctctcctctggcgcgcccgctcgctccctcgcttctccccctttccctcctccctgtcccctctccttccctcacctctttcctccccacctcccctcttctcggtttcctcccccatccccttgactctcccctcccagccctcgctctctcgctcgccctcagcgcggcccccgccatgacggaggcgggtgccggtgccgttgccgccgctgccgtcgcagggggggagtcgggttcccagaaagtagcttgatgagtgtccaaagtagcagtggaagtttggaggggccgccatcttggtcccagctctccacgtctccaaccccgggctcggcggcggcggccaggtccctgctgaatcacacgccgccatccgggaggcccagggaaggtgcaatggatgagcttcatagtctggatccaagaaggcaagagttattggaagctagatttactggagttgcaagtgggagcactggaagtacgggcagttgcagtgttggagctaaagcctcaacaaataacgaaagctctaatcacagttttggaagcttgggatctttaagtgacaaagaatcagagacaccggagaagaaacaatcggaatcatccaggggaagaaagagaaaagcagaaaaccagaatgaaagtagtcagggaaaaagtattgggggacgtggccacaaaattagcgactattttgaataccagggtggaaatggctcaagtccagtaagaggcatacctcctgcaatccgttctcctcaaaattcacattcacattccactccttcctcatctgttcgaccgaatagcccttctcctactgcattagcatttggggaccaccctattgtacaaccaaagcaattatcctttaaaattattcagactgatctcacaatgctgaaattagcagcattagaaagtaataaaatccaggacctggaaaagaaggagggacgtatagatgatttgctcagggctaactgtgatctcagacggcaaatagatgaacaacaaaaattacttgaaaaatacaaagaacgattaaataagtgcatatcaatgagcaagaaacttcttattgaaaagagtacacaagaaaagctgtcaagcagagagaagagtatgcaagatcgattacgcctcgggcactttacaacagttagacatggcgcttcatttactgaacaatggacagatggttttgcatttcagaatcttgtgaagcaacaagaatgggtgaatcagcaaagggaagatattgaaaggcaaaggaaacttctagccaaacgcaaacctcccacagctaataattctcaggcaccctctaccaattctgaaccaaaacaaaggaaaaacaaagcagtcaatggagcagagaatgatccctttgttagaccaaatttaccacaactgttgactttggcagaatatcatgaacaggaagaaattttcaaacttagactaggacatctcaaaaaggaagaggcagaaatccaggcagaacttgaacgtttggaaagagtcagaaatcttcacatacgtgagctgaaaagaataaacaatgaagataattcacagttcaaagatcacccaacattaaatgaaagatatttattacttcatctgcttggtagaggtggctttagtgaagtgtataaggcttttgacctttatgaacaaagatatgctgctgtgaagatacatcagcttaataaaagctggagagatgagaagaaagaaaactaccacaaacatgcctgcagagagtatagaatacacaaagaactggatcaccccagaatagttaaactctatgattatttctccttggatacagatacgttttgtacagtgttagaatactgtgaaggcaatgacttggatttctatctgaagcaacacaagttaatgtcagagaaagaagctcggtctattgtaatgcagattgtaaatgcactaagatatctcaatgagatcaaaccccctattatacattatgatcttaagccaggaaacatcctactggtagatggaacagcatgtggtgaaatcaaaatcactgattttggtctgtccaagattatggatgatgatagctatggtgtagatggaatggatctaacttcccagggggcaggcacttactggtatttacctcctgagtgttttgtaggtggtatcagtcctgataccaccacatggattaaatttcaaattaatgtatataatcccatagagccctacataattaagtcatttaaagtctgataaacagcttttagttttaacataataataattagtcatttttcagtgtaaaaaagtcaaaattatc

SEQ ID NO: 316313 - DNA, 3303 bp, Homo sapiens
gcctcagccgccacccacagcccgccgccgccgcctcccgggcgacgccgggggccgacgcactgcagaggtgccggcaggttccgcccgcggaagtgtcctcggccggcgcagcccgcgctccgcccgcgctccgaccccggcccggctggcaccccctcgacgcctccgccgccgcgctcctttcctcctcctctcctctggcgcgcccgctcgctccctcgcttctccccctttccctcctccctgtcccctctccttccctcacctctttcctccccacctcccctcttctcggtttcctcccccatccccttgactctcccctcccagccctcgctctctcgctcgccctcagcgcggcccccgccatgacggaggcgggtgccggtgccgttgccgccgctgccgtcgcagggggggagtcgggttcccagaaagtagcttgatgagtgtccaaagtagcagtggaagtttggaggggccgccatcttggtcccagctctccacgtctccaaccccgggctcggcggcggcggccaggtccctgctgaatcacacgccgccatccgggaggcccagggaaggtgcaatggatgagcttcatagtctggatccaagaaggcaagagttattggaagctagatttactggagttgcaagtgggagcactggaagtacgggcagttgcagtgttggagctaaagcctcaacaaataacgaaagctctaatcacagttttggaagcttgggatctttaagtgacaaagaatcagagacaccggagaagaaacaatcggaatcatccaggggaagaaagagaaaagcagaaaaccagaatgaaagtagtcagggaaaaagtattgggggacgtggccacaaaattagcgactattttgaataccagggtggaaatggctcaagtccagtaagaggcatacctcctgcaatccgttctcctcaaaattcacattcacattccactccttcctcatctgttcgaccgaatagcccttctcctactgcattagcatttggggaccaccctattgtacaaccaaagcaattatcctttaaaattattcagactgatctcacaatgctgaaattagcagcattagaaagtaataaaatccaggacctggaaaagaaggagggacgtatagatgatttgctcagggctaactgtgatctcagacggcaaatagatgaacaacaaaaattacttgaaaaatacaaagaacgattaaataagtgcatatcaatgagcaagaaacttcttattgaaaagagtacacaagaaaagctgtcaagcagagagaagagtatgcaagatcgattacgcctcgggcactttacaacagttagacatggcgcttcatttactgaacaatggacagatggttttgcatttcagaatcttgtgaagcaacaagaatgggtgaatcagcaaagggaagatattgaaaggcaaaggaaacttctagccaaacgcaaacctcccacagctaataattctcaggcaccctctaccaattctgaaccaaaacaaaggaaaaacaaagcagtcaatggagcagagaatgatccctttgttagaccaaatttaccacaactgttgactttggcagaatatcatgaacaggaagaaattttcaaacttagactaggacatctcaaaaaggaagaggcagaaatccaggcagaacttgaacgtttggaaagagtcagaaatcttcacatacgtgagctgaaaagaataaacaatgaagataattcacagtaagtcattatttgcatttcacagtttcatattattaaaactacccccgccccccatagagcataaacacaatatttccttcttgggttgtctcatcgtacttagaaaagatccaaagtccttcccatggcttggaaggccttttatgatttggtccctggccaccttactgtcctcacttctcttaaacatgtcaagagcattcccttctcagtgggcttttgtgcttaccatttcctctgcctggatgttcctcctctaaacacctaattggcttaattacttatctcactccaaatgttctttagaaaggccattcttagatcatcctatttaaaatagtagtccctagccaggcccagtggtgctcacctatagttccagctactcaagaggctcaggtaggaggattgctttggccaggagttcaaaaccagccttgtcaacatagtgagacccccatttctttaaaaaaaaaaaaagtctctgcttcttcatttcctcttttaatatcgttaccttgctttatattttctggatgttgatcactatctggaattataaatttattttttagttattatttgtctcctccctctagaatgtaagcttcatgagtgcaaggacttggttttgttcttgctgtatccgtaaagcctagaccagtgcctgacatatggcaggcacttaataaatatttgaataccaaagttaatgttatagtagtgaaggagaaattatttcaaccaaaagtatttcagtaagccatgtatcccacattatgcaagaattgggagagaaatggaaaagtacagcttacagtctgtgttcttaatcagttgtcagaatgagtgccatagatagtatatgttgaagcaattgaaagaaaagaaaatatctgtgggcttgtgggagcttcatgaaaaagatagaaattgagcaagacatagaagtagaaattaagcaaggtactacttggatttagttgatgtacaagagaggaaaggtttctgtttacacttcatctttgactggtcatgtagtttaaagcttccatgagttaatataagtatcagaataggaagtggccaatttctgtgtgaaatatgaaaatcttgcttagaaaggtcttcttgtgatgtctatgtatgtataattcataaatacacagatcattccattgtgtgaagagaaagaaatagttatggaataacctaaattatgtcagattaaaattctaatgaaagccaggtgtgctggcttatgcctgtaatccttgcactttgggaggccagtgcaagcaaattgattgagcccaggagtcaaaaacgagcctcagcaaggtggaaaaaccctgtctctacaaaaaatacaaaacttagcagggaatggtggcatgcacctgtagtcgcagctacttggggaactgaggagggaggatcgcctgagcctgcagtgagcctagatcgcagtccagcctgattgacaaagtgagactttgtctcaaaaaaaaaaaaaaa

SEQ ID NO: 316314 - DNA, 333 bp, Homo sapiens
atcagcggcagcgttagattctccataggagtgtgaaccttattgtgaactgcacatgcaagggatccaggttatgcactcccttatgagaatctaatgcctgatgatctgaggtggaaccgtttcatcccaaaaccatctcccctactccccgcagtctgtggataaattgtcttccacaaaactggtccctggtgccaaaaaggtggggaactactgatcttatggactagattggtcatatgtccattccaaaactagttacgaccaacagaggtactattgccttaaaaaaaatcaggccatctgtaggtggatagtgtcagaaattta

SEQ ID NO: 316315 - DNA, 432 bp, Homo sapiens
cccaacctcccggtcttccagtccttggcctattgggaaatgggtcgtacagcaggaggtgagcagcgggccagtgagcattaccgcctaagctcggcctcctgtcagatcagcggcagcgttagattctccataggagtgtgaaccttattgtgaactgcacatgcaagggatccaggttatgcactcccttatgagaatctaatgcctgatgatctgaggtggaaccgtttcatcccaaaaccatctcccctactccccgcagtctgtggataaattgtcttccacaaaactggtccctggtgccaaaaaggtggggaactactgatcttatggactagattggtcatatgtccattccaaaactagttacgaccaacagaggtactattgccttaaaaaaaatcaggccatctgtaggtggatagtgtc

SEQ ID NO: 316316 - DNA, 342 bp, Homo sapiens
gaaacatggttttatgttgactgtgataattttgtatattaaaactgtcatttaaaaatctgttatcttgttttctgtagacaccggagaagaaacaatcggaatcatccaggggaagaaagagaaaagcagaaaaccagaatgaaagtagtcagggtaagcacataacatcttccttcagagcctagtggacacttaaaattaattgttttaatttttaaccaattaatactctaattgtaaaataatatgaagttgtaaattttggtgtgtgcacaggtagttagtgtataatgattgcttttaggcttttcaatgttgcccttattgttttcatttggg

SEQ ID NO: 316317 - DNA, 200 bp, Homo sapiens
tgggattacaggtgtgagccaccatgcccagcctacaagcactttttaagcctttgctggttccatctgctcatgtcccattggccaaagccagccacgtgtccaggctcccttgcaagcgcaggagaaattgacacaatgggaagagctacaggggatgtgcagcccttctttgcaccaaccacacagagcctgagtat

SEQ ID NO: 316318 - DNA, 2291 bp, Homo sapiens
actccagtgcgcccccaacctaccacgcagtaaaagccacccccgccccggcccggacggtttccaagctggttttgaagtcgcggccgctgttcctgggacgtccggttgaccgcgcgtctgctgcagagaccatgtctgccgacggggcagaggctgatggcagcacccaggtgacagtggaagaaccggtacagcagcccagtgtggtggaccgtgtggccagcatgcctctgatcagctccacctgcgacatggtgtccgcagcctatgcctccaccaaggagagctacccgcacatcaagactgtctgcgacgcagcagagaagggagtgaggaccctcacggcggctgctgtcagcggggctcagccgatcctctccaagctggagccccagattgcatcagccagcgaatacgcccacagggggctggacaagttggaggagaacctccccatcctgcagcagcccacggagaaggtcctggcggacaccaaggagcttgtgtcgtctaaggtgtcgggggcccaagagatggtgtctagcgccaaggacacggtggccacccaattgtcggaggcggtggacgcgacccgcggtgctgtgcagagcggcgtggacaagacaaagtccgtagtgaccggcggcgtccaatcagtcatgggctcccgcttgggccagatggtgctgagtggggtcgacacggtgctggggaagtcggaggagtgggcggacaaccacctgccccttacggatgccgaactggcccgcatcgccacatccctggatggcttcgacgtcgcgtccgtgcagcagcagcggcaggaacagagctacttcgtacgtctgggctccctgtcggagaggctgcggcagcacgcctatgagcactcgctgggcaagcttcgagccaccaagcagagggcacaggaggctctgctgcagctgtcgcaggccctaagcctgatggaaactgtcaagcaaggcgttgatcagaagctggtggaaggccaggagaagctgcaccagatgtggctcagctggaaccagaagcagctccagggccccgagaaggagccgcccaagccagagcaggtcgagtcccgggcgctcaccatgttccgggacattgcccagcaactgcaggccacctgtacctccctggggtccagcattcagggcctccccaccaatgtgaaggaccaggtgcagcaggcccgccgccaggtggaggacctccaggccacgttttccagcatccactccttccaggacctgtccagcagcattctggcccagagccgtgagcgtgtcgccagcgcccgcgaggccctggaccacatggtggaatatgtggcccagaacacacctgtcacgtggctcgtgggaccctttgcccctggaatcactgagaaagccccggaggagaagaagtagggggagaggagaggactcagcgggccccgtctctataatgcagctgtgctctggagtcctcaacccggggctcatttcaaacttattttctagccactcctcccagctcttctgtgctgtccacttgggaagctaaggctctcaaaacgggcatcacccagttgacccatctctcagcctctctgagcttggaagaagcctgttctgagcctcaccctatcagtcagtagagagagatgtccagaaaaaatatctttcaggaaagttctcccctgcagaattttttttccttgttaaatatcaggaatataggccgggtgcggtggctcacacctgtaatcccagcactttgggaggctgaggcgggcggaacacctgaggtcaggtgttcgagaccagccaggccaacatggtgaaaccccgtctctactaaaaatacaaaaaaaaatgagccgggcatggtagcaggtgtctgttatcccagttaggaggctgaggcaagagaatctcttgaacctgagaggcggaggttgcagtgagccaagatcgcgccattgcactccagcctgggggacaagagtgagacttagtctcaaaaaaaaaaaaaaaagaaaaaaaaatcagggatatagttcatatcccacttctttgtttacaccgatgtccctgaatatcagcctgtagctaatggacttgggatttctggtctaagtgggcctcctggggatggggtggtacactgagcttctgagcctcattgtagagtagaaaggtactggggcctgtgtggtaagccttgttgaaatgctctggtattcagtattgccttaataaacttcacccacaactgca

SEQ ID NO: 316319 - DNA, 2260 bp, Homo sapiens
gcgtaggtcaggcgggattaatcggcacgaggccaagctggttttgaagtcgcggccgctgttcctgggacgtccggttgaccgcgcgtctgctgcagagaccatgtctgccgacggggcagaggctgatggcagcacccaggtgacagtggaagaaccggtacagcagcccagtgtggtggaccgtgtggccagcatgcctctgatcagctccacctgcgacatggtgtccgcagcctatgcctccaccaaggagagctacccgcacatcaagactgtctgcgacgcagcagagaagggagtgaggaccctcacggcggctgctgtcagcggggctcagccgatcctctccaagctggagccccagattgcatcagccagcgaatacgcccacagggggctggacaagttggaggagaacctccccatcctgcagcagcccacggagaaggtcctggcggacaccaaggagcttgtgtcgtctaaggtgtcgggggcccaagagatggtgtctagcgccaaggacacggtggccacccaattgtcggaggcggtggacgcgacccgcggtgctgtgcagagcggcgtggacaagacaaagtccgtagtgaccggcggcgtccaatcagtcatgggctcccgcttgggccagatggtgctgagtggggtcgacacggtgctggggaagtcggaggagtgggcggacaaccacctgccccttacggatgccgaactggcccgcatcgccacatccctggatggcttcgacgtcgcgtccgtgcagcagcagcggcaggaacagagctacttcgtacgtctgggctccctgtcggagaggctgcggcagcacgcctatgagcactcgctgggcaagcttcgagccaccaagcagagggcacaggaggctctgctgcagctgtcgcaggccctaagcctgatggaaactgtcaagcaaggcgttgatcagaagctggtggaaggccaggagaagctgcaccagatgtggctcagctggaaccagaagcagctccagggccccgagaaggagccgcccaagccagagcaggtcgagtcccgggcgctcaccatgttccgggacattgcccagcaactgcaggccacctgtacctccctggggtccagcattcagggcctccccaccaatgtgaaggaccaggtgcagcaggcccgccgccaggtggaggacctccaggccacgttttccagcatccactccttccaggacctgtccagcagcattctggcccagagccgtgagcgtgtcgccagcgcccgcgaggccctggaccacatggtggaatatgtggcccagaacacacctgtcacgtggctcgtgggaccctttgcccctggaatcactgagaaagccccggaggagaagaagtagggggagaggagaggactcagcgggccccgtctctataatgcagctgtgctctggagtcctcaacccggggctcatttcaaacttattttctagccactcctcccagctcttctgtgctgtccacttgggaagctaaggctctcaaaacgggcatcacccagttgacccatctctcagcctctctgagcttggaagaagcctgttctgagcctcaccctatcagtcagtagagagagatgtccagaaaaaatatctttcaggaaagttctcccctgcagaattttttttccttgttaaatatcaggaatataggccgggtgcggtggctcacacctgtaatcccagcactttgggaggctgaggcgggcggaacacctgaggtcaggtgttcgagaccagccaggccaacatggtgaaaccccgtctctactaaaaatacaaaaaaaaatgagccgggcatggtagcaggtgtctgttatcccagttaggaggctgaggcaagagaatctcttgaacctgagaggcggaggttgcagtgagccaagatcgcgccattgcactccagcctgggggacaagagtgagacttagtctcaaaaaaaaaaaaaaaagaaaaaaaaatcagggatatagttcatatcccacttctttgtttacaccgatgtccctgaatatcagcctgtagctaatggacttgggatttctggtctaagtgggcctcctggggatggggtggtacactgagcttctgagcctcattgtagagtagaaaggtactggggcctgtgtggtaagccttgttgaaatgctctggtattcagtattgccttaataaacttcacccacaactgca

SEQ ID NO: 316320 - DNA, 2266 bp, Homo sapiens
  misc_feature (21)..(21): n is a, c, g, or t
tccgagtcagacaactatacngctaggtacgaggcctgccaagctggttttgaagtcgcggccgctgttcctgggacgtccggttgaccgcgcgtctgctgcagagaccatgtctgccgacggggcagaggctgatggcagcacccaggtgacagtggaagaaccggtacagcagcccagtgtggtggaccgtgtggccagcatgcctctgatcagctccacctgcgacatggtgtccgcagcctatgcctccaccaaggagagctacccgcacatcaagactgtctgcgacgcagcagagaagggagtgaggaccctcacggcggctgctgtcagcggggctcagccgatcctctccaagctggagccccagattgcatcagccagcgaatacgcccacagggggctggacaagttggaggagaacctccccatcctgcagcagcccacggagaaggtcctggcggacaccaaggagcttgtgtcgtctaaggtgtcgggggcccaagagatggtgtctagcgccaaggacacggtggccacccaattgtcggaggcggtggacgcgacccgcggtgctgtgcagagcggcgtggacaagacaaagtccgtagtgaccggcggcgtccaatcagtcatgggctcccgcttgggccagatggtgctgagtggggtcgacacggtgctggggaagtcggaggagtgggcggacaaccacctgccccttacggatgccgaactggcccgcatcgccacatccctggatggcttcgacgtcgcgtccgtgcagcagcagcggcaggaacagagctacttcgtacgtctgggctccctgtcggagaggctgcggcagcacgcctatgagcactcgctgggcaagcttcgagccaccaagcagagggcacaggaggctctgctgcagctgtcgcaggccctaagcctgatggaaactgtcaagcaaggcgttgatcagaagctggtggaaggccaggagaagctgcaccagatgtggctcagctggaaccagaagcagctccagggccccgagaaggagccgcccaagccagagcaggtcgagtcccgggcgctcaccatgttccgggacattgcccagcaactgcaggccacctgtacctccctggggtccagcattcagggcctccccaccaatgtgaaggaccaggtgcagcaggcccgccgccaggtggaggacctccaggccacgttttccagcatccactccttccaggacctgtccagcagcattctggcccagagccgtgagcgtgtcgccagcgcccgcgaggccctggaccacatggtggaatatgtggcccagaacacacctgtcacgtggctcgtgggaccctttgcccctggaatcactgagaaagccccggaggagaagaagtagggggagaggagaggactcagcgggccccgtctctataatgcagctgtgctctggagtcctcaacccggggctcatttcaaacttattttctagccactcctcccagctcttctgtgctgtccacttgggaagctaaggctctcaaaacgggcatcacccagttgacccatctctcagcctctctgagcttggaagaagcctgttctgagcctcaccctatcagtcagtagagagagatgtccagaaaaaatatctttcaggaaagttctcccctgcagaattttttttccttgttaaatatcaggaatataggccgggtgcggtggctcacacctgtaatcccagcactttgggaggctgaggcgggcggaacacctgaggtcaggtgttcgagaccagccaggccaacatggtgaaaccccgtctctactaaaaatacaaaaaaaaatgagccgggcatggtagcaggtgtctgttatcccagttaggaggctgaggcaagagaatctcttgaacctgagaggcggaggttgcagtgagccaagatcgcgccattgcactccagcctgggggacaagagtgagacttagtctcaaaaaaaaaaaaaaaagaaaaaaaaatcagggatatagttcatatcccacttctttgtttacaccgatgtccctgaatatcagcctgtagctaatggacttgggatttctggtctaagtgggcctcctggggatggggtggtacactgagcttctgagcctcattgtagagtagaaaggtactggggcctgtgtggtaagccttgttgaaatgctctggtattcagtattgccttaataaacttcacccacaactgca

SEQ ID NO: 316321 - DNA, 1953 bp, Homo sapiens
actccagtgcgcccccaacctaccacgcagtaaaagccacccccgccccggcccggacggtttccaagctggttttgaagtcgcggccgctgttcctgggacgtccggttgaccgcgcgtctgctgcagagaccatgtctgccgacggggcagaggctgatggcagcacccaggtgacagtggaagaaccggtacagcagcccagtgtggtggaccgtgtggccagcatgcctctgatcagctccacctgcgacatggtgtccgcagcctatgcctccaccaaggagagctacccgcacatcaagactgtctgcgacgcagcagagaagggagtgaggaccctcacggcggctgctgtcagcggggctcagccgatcctctccaagctggagccccagattgcatcagccagcgaatacgcccacagggggctggacaagttggaggagaacctccccatcctgcagcagcccacggagaaggtcctggcggacaccaaggagcttgtgtcgtctaaggtgtcgggggcccaagagatggtgtctagcgccaaggacacggtggccacccaattgtcggaggcggtggacgcgacccgcggtgctgtgcagagcggcgtggacaagacaaagtccgtagtgaccggcggcgtccaatcagtcatgggctcccgcttgggccagatggtgctgagtggggtcgacacggtgctggggaagtcggaggagtgggcggacaaccacctgccccttacggatgccgaactggcccgcatcgccacatccctggatggcttcgacgtcgcgtccgtgcagcagcagcggcaggaacagagctacttcgtacgtctgggctccctgtcggagaggctgcggcagcacgcctatgagcactcgctgggcaagcttcgagccaccaagcagagggcacaggaggctctgctgcagctgtcgcaggccctaagcctgatggaaactgtcaagcaaggcgttgatcagaagctggtggaaggccaggagaagctgcaccagatgtggctcagctggaaccagaagcagctccagggccccgagaaggagccgcccaagccagagcaggtcgagtcccgggcgctcaccatgttccgggacattgcccagcaactgcaggccacctgtacctccctggggtccagcattcagggcctccccaccaatgtgaaggaccaggtgcagcaggcccgccgccaggtggaggacctccaggccacgttttccagcatccactccttccaggacctgtccagcagcattctggcccagagccgtgagcgtgtcgccagcgcccgcgaggccctggaccacatggtggaatatgtggcccagaacacacctgtcacgtggctcgtgggaccctttgcccctggaatcactgagaaagccccggaggagaagaagtagggggagaggagaggactcagcgggccccgtctctataatgcagctgtgctctggagtcctcaacccggggctcatttcaaacttattttctagccactcctcccagctcttctgtgctgtccacttgggaagctaaggctctcaaaacgggcatcacccagttgacccatctctcagcctctctgagcttggaagaagcctgttctgagcctcaccctatcagtcagtagagagagatgtccagaaaaaatatctttcaggaaagttctcccctgcagaattttttttccttgttaaatatcaggaatataggccgggtgcggtggctcacacctgtaatcccaaagtgctaggattacaggcatgagccaccatgcctggccatgccccaaatttgaccagagaatcaaggaagagatcaaaatgtatagatgttccaatgctccagatgactttgcagtaaagtatataaggggtcttcaaaaagttcctggaaaatgcatattatgaaaga

SEQ ID NO: 316322 - DNA, 1479 bp, Homo sapiens
actccagtgcgcccccaacctaccacgcagtaaaagccacccccgccccggcccggacggtttccaagctggttttgaagtcgcggccgctgttcctgggacgtccggttgaccgcgcgtctgctgcagagaccatgtctgccgacggggcagaggctgatggcagcacccaggtgacagtggaagaaccggtacagcagcccagtgtggtggaccgtgtggccagcatgcctctgatcagctccacctgcgacatggtgtccgcagcctatgcctccaccaaggagagctacccgcacatcaagactgtctgcgacgcagcagagaagggagtgaggaccctcacggcggctgctgtcagcggggctcagccgatcctctccaagctggagccccagattgcatcagccagcgaatacgcccacagggggctggacaagttggaggagaacctccccatcctgcagcagcccacggagaaggtcctggcggacaccaaggagcttgtgtcgtctaaggtgtcgggggcccaagagatggtgtctagcgccaaggacacggtggccacccaattgtcggaggcggtggacgcgacccgcggtgctgtgcagagcggcgtggacaagacaaagtccgtagtgaccggcggcgtccaatcagtcatgggctcccgcttgggccagatggtgctgagtggggtcgacacggtgctggggaagtcggaggagtgggcggacaaccacctgccccttacggatgccgaactggcccgcatcgccacatccctggatggcttcgacgtcgcgtccgtgcagcagcagcggcaggaacagagctacttcgtacgtctgggctccctgtcggagaggctgcggcagcacgcctatgagcactcgctgggcaagcttcgagccaccaagcagagggcacaggaggctctgctgcagctgtcgcaggccctaagcctgatggaaactgtcaagcaaggcgttgatcagaagctggtggaaggccaggagaagctgcaccagatgtggctcagctggaaccagaagcagctccagggccccgagaaggagccgcccaagccagagcaggtcgagtcccgggcgctcaccatgttccgggacattgcccagcaactgcaggccacctgtacctccctggggtccagcattcaggctcccacaagtgaggaccggtcacagccgcgcagtggagactcaggcagtgtcagatcactcttcagacctgttcggagattggccaaagcgggaggtttcccaggaccggaaggcgggaccctggggacatgtgggcgaaccctgtctggtcgggaccttgcccggaaactgaaaccggcgaaatatggggcggggcaatgcgcacaatacgaattcggcaccagcgaggacaatctgtacacacagtgttgtaacacatccgtcgcagatatgtaggagagaaggtagaaatcgc

SEQ ID NO: 316323 - DNA, 2228 bp, Homo sapiens
acgaggctgggtggtggtcgcggccgctgttcctgggacgtccggttgaccgcgcgtctgctgcagagaccatgtctgccgacggggcagaggctgatggcagcacccaggtgacagtggaagaaccggtacagcagcccagtgtggtggaccgtgtggccagcatgcctctgatcagctccacctgcgacatggtgtccgcagcctatgcctccaccaaggagagctacccgcacatcaagactgtctgcgacgcagcagagaagggagtgaggaccctcacggcggctgctgtcagcggggctcagccgatcctctccaagctggagccccagattgcatcagccagcgaatacgcccacagggggctggacaagttggaggagaacctccccatcctgcagcagcccacggagaaggtcctggcggacaccaaggagcttgtgtcgtctaaggtgtcgggggcccaagagatggtgtctagcgccaaggacacggtggccacccaattgtcggaggcggtggacgcgacccgcggtgctgtgcagagcggcgtggacaagacaaagtccgtagtgaccggcggcgtccaatcagtcatgggctcccgcttgggccagatggtgctgagtggggtcgacacggtgctggggaagtcggaggagtgggcggacaaccacctgccccttacggatgccgaactggcccgcatcgccacatccctggatggcttcgacgtcgcgtccgtgcagcagcagcggcaggaacagagctacttcgtacgtctgggctccctgtcggagaggctgcggcagcacgcctatgagcactcgctgggcaagcttcgagccaccaagcagagggcacaggaggctctgctgcagctgtcgcaggccctaagcctgatggaaactgtcaagcaaggcgttgatcagaagctggtggaaggccaggagaagctgcaccagatgtggctcagctggaaccagaagcagctccagggccccgagaaggagccgcccaagccagagcaggtcgagtcccgggcgctcaccatgttccgggacattgcccagcaactgcaggccacctgtacctccctggggtccagcattcagggcctccccaccaatgtgaaggaccaggtgcagcaggcccgccgccaggtggaggacctccaggccacgttttccagcatccactccttccaggacctgtccagcagcattctggcccagagccgtgagcgtgtcgccagcgcccgcgaggccctggaccacatggtggaatatgtggcccagaacacacctgtcacgtggctcgtgggaccctttgcccctggaatcactgagaaagccccggaggagaagaagtagggggagaggagaggactcagcgggccccgtctctataatgcagctgtgctctggagtcctcaacccggggctcatttcaaacttattttctagccactcctcccagctcttctgtgctgtccacttgggaagctaaggctctcaaaacgggcatcacccagttgacccatctctcagcctctctgagcttggaagaagcctgttctgagcctcaccctatcagtcagtagagagagatgtccagaaaaaatatctttcaggaaagttctcccctgcagaattttttttccttgttaaatatcaggaatataggccgggtgcggtggctcacacctgtaatcccagcactttgggaggctgaggcgggcggaacacctgaggtcaggtgttcgagaccagccaggccaacatggtgaaaccccgtctctactaaaaatacaaaaaaaaatgagccgggcatggtagcaggtgtctgttatcccagttaggaggctgaggcaagagaatctcttgaacctgagaggcggaggttgcagtgagccaagatcgcgccattgcactccagcctgggggacaagagtgagacttagtctcaaaaaaaaaaaaaaaagaaaaaaaaatcagggatatagttcatatcccacttctttgtttacaccgatgtccctgaatatcagcctgtagctaatggacttgggatttctggtctaagtgggcctcctggggatggggtggtacactgagcttctgagcctcattgtagagtagaaaggtactggggcctgtgtggtaagccttgttgaaatgctctggtattcagtattgccttaataaacttcacccacaactgca

SEQ ID NO: 316324 - DNA, 2286 bp, Homo sapiens
  misc_feature (22)..(22): n is a, c, g, or t
  misc_feature (157)..(157): n is a, c, g, or t
tatgctccgtcggacggctttntattgtcgacgtgccgggataagagcagcgtcagtgatagactggcaacagtaggctactagtacgtcgtgtgatcgcgtggacaccaggcttgacttgtgtagcaacaccctaggtagaactcgttgcgcaggncacatccgcgtactagactggagctcagtagttgagatgtgcagcagtagatgccacggttatgcctgctgtatctgcatatcggctgcgacatggtgtccgcagcctatgcctccaccaaggagagctacccgcacatcaagactgtctgcgacgcagcagagaagggagtgaggaccctcacggcggctgctgtcagcggggctcagccgatcctctccaagctggagccccagattgcatcagccagcgaatacgcccacagggggctggacaagttggaggagaacctccccatcctgcagcagcccacggagaaggtcctggcggacaccaaggagcttgtgtcgtctaaggtgtcgggggcccaagagatggtgtctagcgccaaggacacggtggccacccaattgtcggaggcggtggacgcgacccgcggtgctgtgcagagcggcgtggacaagacaaagtccgtagtgaccggcggcgtccaatcagtcatgggctcccgcttgggccagatggtgctgagtggggtcgacacggtgctggggaagtcggaggagtgggcggacaaccacctgccccttacggatgccgaactggcccgcatcgccacatccctggatggcttcgacgtcgcgtccgtgcagcagcagcggcaggaacagagctacttcgtacgtctgggctccctgtcggagaggctgcggcagcacgcctatgagcactcgctgggcaagcttcgagccaccaagcagagggcacaggaggctctgctgcagctgtcgcaggccctaagcctgatggaaactgtcaagcaaggcgttgatcagaagctggtggaaggccaggagaagctgcaccagatgtggctcagctggaaccagaagcagctccagggccccgagaaggagccgcccaagccagagcaggtcgagtcccgggcgctcaccatgttccgggacattgcccagcaactgcaggccacctgtacctccctggggtccagcattcagggcctccccaccaatgtgaaggaccaggtgcagcaggcccgccgccaggtggaggacctccaggccacgttttccagcatccactccttccaggacctgtccagcagcattctggcccagagccgtgagcgtgtcgccagcgcccgcgaggccctggaccacatggtggaatatgtggcccagaacacacctgtcacgtggctcgtgggaccctttgcccctggaatcactgagaaagccccggaggagaagaagtagggggagaggagaggactcagcgggccccgtctctataatgcagctgtgctctggagtcctcaacccggggctcatttcaaacttattttctagccactcctcccagctcttctgtgctgtccacttgggaagctaaggctctcaaaacgggcatcacccagttgacccatctctcagcctctctgagcttggaagaagcctgttctgagcctcaccctatcagtcagtagagagagatgtccagaaaaaatatctttcaggaaagttctcccctgcagaattttttttccttgttaaatatcaggaatataggccgggtgcggtggctcacacctgtaatcccagcactttgggaggctgaggcgggcggaacacctgaggtcaggtgttcgagaccagccaggccaacatggtgaaaccccgtctctactaaaaatacaaaaaaaaatgagccgggcatggtagcaggtgtctgttatcccagttaggaggctgaggcaagagaatctcttgaacctgagaggcggaggttgcagtgagccaagatcgcgccattgcactccagcctgggggacaagagtgagacttagtctcaaaaaaaaaaaaaaaagaaaaaaaaatcagggatatagttcatatcccacttctttgtttacaccgatgtccctgaatatcagcctgtagctaatggacttgggatttctggtctaagtgggcctcctggggatggggtggtacactgagcttctgagcctcattgtagagtagaaaggtactggggcctgtgtggtaagccttgttgaaatgctctggtattcagtattgccttaataaacttcacccacaactgca

SEQ ID NO: 316325 - DNA, 858 bp, Homo sapiens
gggaagggatactccgacaggagatactcggtgtagagacaaggttctcctcagtgaactggcagtaccagtgggggcttacctgtgagcaacaaggccgaccattctccctatcagggcatccgtccaggttattcaaagttccggcacagttatccccaccccctgacaagagttccagagtcaatgtattacagaggtatgacgtgcaacagagaatgaggtgttgttggccgcagcttctaaatccactggaactcagtattactcaaaggggatgctgaaattctcacgtgtgttgctaagggcttactgttgctgttgttcctcaacacattggccttgttcctcagcaaacccctggagccagaatattgcaaagcgctatatgttatgagcaaaccaccctggcgtttagtaatttgttcttgagaatggagtttgtgctcttgttgcccaggctgaagtgagtttcgggtcaccacaacctcctcctcttgggtgcaagagaatctcttgaacctgagaggcggaggttgcagtgagccaagatcgcgccattgcactccagcctgggggacaagagtgagacttagtctcaaaaaaaaaaaaaaaagaaaaaaaaatcagggatatagttcatatcccacttctttgtttacaccgatgtccctgaatatcagcctgtagctaatggacttgggatttctggtctaagtgggcctcctggggatggggtggtacactgagcttctgagcctcattgtagagtagaaaggtactggggcctgtgtggtaagccttgttgaaatgctctggtattcagtattgccttaataaacttcacccacaactgca

SEQ ID NO: 316326 - DNA, 540 bp, Homo sapiens
ttaggctggtctcgaactcctgaactcaggtgatccacccacctcaacctcccaaagtgctgggattacaggtgtgagccaccatgcccagcctacaagcactttttaagcctttgctggttccatctgctcatgtcccattggccaaagccagccacgtgtccaggctcccttgcaagcgcaggagaaattgacacaatgggaagagctacaggggatgtgcagcccttctttgcaccaaccacacagagcctgagtatgtcaatgattaaaccaaaggccccagagctcaccgtagccaggaaacccttcctccctccctccctttctcttttctagactgtcatgtaagtcagatgctggaaggattccttgggttccttctggaatcccgtctctcccaggggagcctccttccctcacttctctctcccctgccccagatggaaactgtcaagcaaggcgttgatcagaagctggtggaaggccaggagaagctgcaccagatgtggctcagctggaaccagaagcagctccagg

SEQ ID NO: 316327 - DNA, 963 bp, Homo sapiens
acgaggctgggtggtggtcgcggccgctgttcctgggacgtccggttgaccgcgcgtctgctgcagagaccatgtctgccgacggggcagaggctgatggcagcacccaggtgacagtggaagaaccggtacagcagcccagtgtggtggaccgtgtggccagcatgcctctgatcagctccacctgcgacatggtgtccgcagcctatgcctccaccaaggagagctacccgcacatcaagactgtctgcgacgcagcagagaagggagtgaggaccctcacggcggctgctgtcagcggggctcagccgatcctctccaagctggagccccagattgcatcagccagcgaatacgcccacagggggctggacaagttggaggagaacctccccatcctgcagcagcccacggagaaggtcctggcggacaccaaggagcttgtgtcgtctaaggtgtcgggggcccaagagatggtgtctagcgccaaggacacggtggccacccaattgtcggaggcggtggacgcgacccgcggtgctgtgcagagcggcgtggacaagacaaagtccgtagtgaccggcggcgtccaatcagtcatgggctcccgcttgggccagatggtgctgagtggggtcgacacggtgctggggaagtcggaggagtgggcggacaaccacctgccccttacggatgccgaactggccgaatcggcgcatccctggattggttcgacgtcgagtcagtgcacagaggagcgaggaacaagactactcgacgtttggccccgcgggaaggtgcggaacgcataagatctgggcgtttaccaccagcgaggcaggagttgtgccgtcagcctactgaggaatcaaagctataagctggagcggaacccatgtgcgacaaactcgccagagccgaggcggccatgaacaaggttcggaagctgaggacggaggtaca

SEQ ID NO: 316328 - DNA, 2555 bp, Homo sapiens
actccagtgcgcccccaacctaccacgcagtaaaagccacccccgccccggcccggacggtttccaagctggttttgaagtcgcggccgctgttcctgggacgtccggttgaccgcgcgtctgctgcagagaccatgtctgccgacggggcagaggctgatggcagcacccaggtgacagtggaagaaccggtacagcagcccagtgtggtggaccgtgtggccagcatgcctctgatcagctccacctgcgacatggtgtccgcagcctatgcctccaccaaggagagctacccgcacatcaagactgtctgcgacgcagcagagaagggagtgaggaccctcacggcggctgctgtcagcggggctcagccgatcctctccaagctggagccccagattgcatcagccagcgaatacgcccacagggggctggacaagttggaggagaacctccccatcctgcagcagcccacggagaaggtcctggcggacaccaaggagcttgtgtcgtctaaggtgtcgggggcccaagagatggtgtctagcgccaaggacacggtggccacccaattgtcggaggcggtggacgcgacccgcggtgctgtgcagagcggcgtggacaagacaaagtccgtagtgaccggcggcgtccaatcagtcatgggctcccgcttgggccagatggtgctgagtggggtcgacacggtgctggggaagtcggaggagtgggcggacaaccacctgccccttacggatgccgaactggcccgcatcgccacatccctggatggcttcgacgtcgcgtccgtgcagcagcagcggcaggaacagagctacttcgtacgtctgggctccctgtcggagaggctgcggcagcacgcctatgagcactcgctgggcaagcttcgagccaccaagcagagggcacaggaggctctgctgcagctgtcgcaggccctaagcctgatggaaactgtcaagcaaggcgttgatcagaagctggtggaaggccaggagaagctgcaccagatgtggctcagctggaaccagaagcagctccagggccccgagaaggagccgcccaagccagagcaggtcgagtcccgggcgctcaccatgttccgggacattgcccagcaactgcaggccacctgtacctccctggggtccagcattcagggcctccccaccaatgtgaaggaccaggtgcagcaggcccgccgccaggtggaggacctccaggccacgttttccagcatccactccttccaggacctgtccagcagcattctggcccagagccgtgagcgtgtcgccagcgcccgcgaggccctggaccacatggtggaatatgtggcccagaacacacctgtcacgtggctcgtgggaccctttgcccctggaatcactgagaaagccccggaggagaagaagtagggggagaggagaggactcagcgggccccgtctctataatgcagctgtgctctggagtcctcaacccggggctcatttcaaacttattttctagccactcctcccagctcttctgtgctgtccacttgggaagctaaggctctcaaaacgggcatcacccagttgacccatctctcagcctctctgagcttggaagaagcctgttctgagcctcaccctatcagtcagtagagagagatgtccagaaaaaatatctttcaggaaagttctcccctgcagaattttttttccttgttaaatatcaggaatataggccgggtgcggtggctcacacctgtaatcccagcactttgggaggctgaggcgggcggaacacctgaggtcaggtgttcgagaccagccaggccaacatggtgaaaccccgtctctactaaaaatacaaaaaaaaatgagccgggcatggtagcaggtgtctgttatcccagttaggaggctgaggcaagagaatctcttgaacctgagaggcggaggttgcagtgagccaagatcgcgccattgcactccagcctgggggacaagagtgagacttagtctcaaaaaaaaaaaaaaaagaaaaaaaaatcagggatatagttcatatcccacttctttgtttacaccgatgtccctgaatatcagcctgtagctaatggacttgggatttctggtctaagtgggcctcctggggatggggtggtacactgagcttctgagcctcattgtagagtagaaaggtactggggcctgtgtggtaagccttgttgaaatgctctggtattcagtattgccttaataaacttcacccacaactgcatacaggccatgtgtgtacgtgtgtgtgtcttcatctgtccctgctgctagaacagaaatatcttaggcagggtaatttatttattcatttatttattttgtagagacggggtcttgctatgttgcccaggctgatcttgaactcctgagctcaagcgttcctctcaccacgtcctcccaaagtgctgggattataggcgtgaaccaccacgcccagccgaaagtatttattgtctggtcctttacaacaaacagtttgctgaac

SEQ ID NO: 316329 - DNA, 2023 bp, Homo sapiens
actccagtgcgcccccaacctaccacgcagtaaaagccacccccgccccggcccggacggtttccaagctggttttgaagtcgcggccgctgttcctgggacgtccggttgaccgcgcgtctgctgcagagaccatgtctgccgacggggcagaggctgatggcagcacccaggtgacagtggaagaaccggtacagcagcccagtgtggtggaccgtgtggccagcatgcctctgatcagctccacctgcgacatggtgtccgcagcctatgcctccaccaaggagagctacccgcacatcaagactgtctgcgacgcagcagagaagggagtgaggaccctcacggcggctgctgtcagcggggctcagccgatcctctccaagctggagccccagattgcatcagccagcgaatacgcccacagggggctggacaagttggaggagaacctccccatcctgcagcagcccacggagaaggtcctggcggacaccaaggagcttgtgtcgtctaaggtgtcgggggcccaagagatggtgtctagcgccaaggacacggtggccacccaattgtcggaggcggtggacgcgacccgcggtgctgtgcagagcggcgtggacaagacaaagtccgtagtgaccggcggcgtccaatcagtcatgggctcccgcttgggccagatggtgctgagtggggtcgacacggtgctggggaagtcggaggagtgggcggacaaccacctgccccttacggatgccgaactggcccgcatcgccacatccctggatggcttcgacgtcgcgtccgtgcagcagcagcggcaggaacagagctacttcgtacgtctgggctccctgtcggagaggctgcggcagcacgcctatgagcactcgctgggcaagcttcgagccaccaagcagagggcacaggaggctctgctgcagctgtcgcaggccctaagcctgatggaaactgtcaagcaaggcgttgatcagaagctggtggaaggccaggagaagctgcaccagatgtggctcagctggaaccagaagcagctccagggccccgagaaggagccgcccaagccagagcaggtcgagtcccgggcgctcaccatgttccgggacattgcccagcaactgcaggccacctgtacctccctggggtccagcattcagggcctccccaccaatgtgaaggaccaggtgcagcaggcccgccgccaggtggaggacctccaggccacgttttccagcatccactccttccaggacctgtccagcagcattctggcccagagccgtgagcgtgtcgccagcgcccgcgaggccctggaccacatggtggaatatgtggcccagaacacacctgtcacgtggctcgtgggaccctttgcccctggaatcactgagaaagccccggaggagaagaagtagggggagaggagaggactcagcgggccccgtctctataatgcagctgtgctctggagtcctcaacccggggctcatttcaaacttattttctagccactcctcccagctcttctgtgctgtccacttgggaagctaaggctctcaaaacgggcatcacccagttgacccatctctcagcctctctgagcttggaagaagcctgttctgagcctcaccctatcagtcagtagagagagatgtccagaaaaaatatctttcaggaaagttctcccctgcagaattttttttccttgttaaatatcaggaatataggccgggtgcggtggctcacacctgtaatcccagcactttgggaggctgaggcgggcggaacacctgaggtcaggtgttcgagaccagccaggccaacatggtgaaaccccgtctctactaaaaatatctttcaggaaagttctcccctggcagaattttttttccttgttaaatatcaggaatataggccgggcatggtggctcatgcctgtaatcccagcactttgggaggctgaggcaggcagatcacttgaggccaggagttcgagacc

SEQ ID NO: 316330 - DNA, 1773 bp, Homo sapiens
actccagtgcgcccccaacctaccacgcagtaaaagccacccccgccccggcccggacggtttccaagctggttttgaagtcgcggccgctgttcctgggacgtccggttgaccgcgcgtctgctgcagagaccatgtctgccgacggggcagaggctgatggcagcacccaggtgacagtggaagaaccggtacagcagcccagtgtggtggaccgtgtggccagcatgcctctgatcagctccacctgcgacatggtgtccgcagcctatgcctccaccaaggagagctacccgcacatcaagactgtctgcgacgcagcagagaagggagtgaggaccctcacggcggctgctgtcagcggggctcagccgatcctctccaagctggagccccagattgcatcagccagcgaatacgcccacagggggctggacaagttggaggagaacctccccatcctgcagcagcccacggagaaggtcctggcggacaccaaggagcttgtgtcgtctaaggtgtcgggggcccaagagatggtgtctagcgccaaggacacggtggccacccaattgtcggaggcggtggacgcgacccgcggtgctgtgcagagcggcgtggacaagacaaagtccgtagtgaccggcggcgtccaatcagtcatgggctcccgcttgggccagatggtgctgagtggggtcgacacggtgctggggaagtcggaggagtgggcggacaaccacctgccccttacggatgccgaactggcccgcatcgccacatccctggatggcttcgacgtcgcgtccgtgcagcagcagcggcaggaacagagctacttcgtacgtctgggctccctgtcggagaggctgcggcagcacgcctatgagcactcgctgggcaagcttcgagccaccaagcagagggcacaggaggctctgctgcagctgtcgcaggccctaagcctgatggaaactgtcaagcaaggcgttgatcagaagctggtggaaggccaggagaagctgcaccagatgtggctcagctggaaccagaagcagctccagggccccgagaaggagccgcccaagccagagcaggtcgagtcccgggcgctcaccatgttccgggacattgcccagcaactgcaggccacctgtacctccctggggtccagcattcagggcctccccaccaatgtgaagatcgcgccattgcactccagcctgggggacaagagtgagacttagtctcaaaaaaaaaaaaaaaagaaaaaaaaatcagggatatagttcatatcccacttctttgtttacaccgatgtccctgaatatcagcctgtagctaatggacttgggatttctggtctaagtgggcctcctggggatggggtggtacactgagcttctgagcctcattgtagagtagaaaggtactggggcctgtgtggtaagccttgttgaaatgctctggtattcagtattgccttaataaacttcacccacaactgcatacaggccatgtgtgtacgtgtgtgtgtcttcatctgtccctgctgctagaacagaaatatcttaggcagggtaatttatttattcatttatttattttgtagagacggggtcttgctatgttgcccaggctgatcttgaactcctgagctcaagcgttcctctcaccacgtcctcccaaagtgctgggattataggcgtgaaccaccacgcccagccgaaagtatttattgtctggtcctttacaacaaacagtttgctgaac

SEQ ID NO: 316331 - DNA, 2165 bp, Homo sapiens
actccagtgcgcccccaacctaccacgcagtaaaagccacccccgccccggcccggacggtttccaagctggttttgaagtcgcggccgctgttcctgggacgtccggttgaccgcgcgtctgctgcagagaccatgtctgccgacggggcagaggctgatggcagcacccaggtgacagtggaagaaccggtacagcagcccagtgtggtggaccgtgtggccagcatgcctctgatcagctccacctgcgacatggtgtccgcagcctatgcctccaccaaggagagctacccgcacatcaagactgtctgcgacgcagcagagaagggagtgaggaccctcacggcggctgctgtcagcggggctcagccgatcctctccaagctggagccccagattgcatcagccagcgaatacgcccacagggggctggacaagttggaggagaacctccccatcctgcagcagcccacggagaaggtcctggcggacaccaaggagcttgtgtcgtctaaggtgtcgggggcccaagagatggtgtctagcgccaaggacacggtggccacccaattgtcggaggcggtggacgcgacccgcggtgctgtgcagagcggcgtggacaagacaaagtccgtagtgaccggcggcgtccaatcagtcatgggctcccgcttgggccagatggtgctgagtggggtcgacacggtgctggggaagtcggaggagtgggcggacaaccacctgccccttacggatgccgaactggcccgcatcgccacatccctggatggcttcgacgtcgcgtccgtgcagcagcagcggcaggaacagagctacttcatggaaactgtcaagcaaggcgttgatcagaagctggtggaaggccaggagaagctgcaccagatgtggctcagctggaaccagaagcagctccagggccccgagaaggagccgcccaagccagagcaggtcgagtcccgggcgctcaccatgttccgggacattgcccagcaactgcaggccacctgtacctccctggggtccagcattcagggcctccccaccaatgtgaaggaccaggtgcagcaggcccgccgccaggtggaggacctccaggccacgttttccagcatccactccttccaggacctgtccagcagcattctggcccagagccgtgagcgtgtcgccagcgcccgcgaggccctggaccacatggtggaatatgtggcccagaacacacctgtcacgtggctcgtgggaccctttgcccctggaatcactgagaaagccccggaggagaagaagtagggggagaggagaggactcagcgggccccgtctctataatgcagctgtgctctggagtcctcaacccggggctcatttcaaacttattttctagccactcctcccagctcttctgtgctgtccacttgggaagctaaggctctcaaaacgggcatcacccagttgacccatctctcagcctctctgagcttggaagaagcctgttctgagcctcaccctatcagtcagtagagagagatgtccagaaaaaatatctttcaggaaagttctcccctgcagaattttttttccttgttaaatatcaggaatataggccgggtgcggtggctcacacctgtaatcccagcactttgggaggctgaggcgggcggaacacctgaggtcaggtgttcgagaccagccaggccaacatggtgaaaccccgtctctactaaaaatacaaaaaaaaatgagccgggcatggtagcaggtgtctgttatcccagttaggaggctgaggcaagagaatctcttgaacctgagaggcggaggttgcagtgagccaagatcgcgccattgcactccagcctgggggacaagagtgagacttagtctcaaaaaaaaaaaaaaaagaaaaaaaaatcagggatatagttcatatcccacttctttgtttacaccgatgtccctgaatatcagcctgtagctaatggacttgggatttctggtctaagtgggcctcctggggatggggtggtacactgagcttctgagcctcattgtagagtagaaaggtactggggcctgtgtggtaagccttgttgaaatgctctggtattcagtattgccttaataaacttcacccacaactgca

SEQ ID NO: 316332 - DNA, 2169 bp, Homo sapiens
gtgtaggacaccctgagtttccggctgagctccccatcttcccccacccagtttgcctgagccacttctctcctgtagcccagtgtggtggaccgtgtggccagcatgcctctgatcagctccacctgcgacatggtgtccgcagcctatgcctccaccaaggagagctacccgcacatcaagactgtctgcgacgcagcagagaagggagtgaggaccctcacggcggctgctgtcagcggggctcagccgatcctctccaagctggagccccagattgcatcagccagcgaatacgcccacagggggctggacaagttggaggagaacctccccatcctgcagcagcccacggagaaggtcctggcggacaccaaggagcttgtgtcgtctaaggtgtcgggggcccaagagatggtgtctagcgccaaggacacggtggccacccaattgtcggaggcggtggacgcgacccgcggtgctgtgcagagcggcgtggacaagacaaagtccgtagtgaccggcggcgtccaatcagtcatgggctcccgcttgggccagatggtgctgagtggggtcgacacggtgctggggaagtcggaggagtgggcggacaaccacctgccccttacggatgccgaactggcccgcatcgccacatccctggatggcttcgacgtcgcgtccgtgcagcagcagcggcaggaacagagctacttcgtacgtctgggctccctgtcggagaggctgcggcagcacgcctatgagcactcgctgggcaagcttcgagccaccaagcagagggcacaggaggctctgctgcagctgtcgcaggccctaagcctgatggaaactgtcaagcaaggcgttgatcagaagctggtggaaggccaggagaagctgcaccagatgtggctcagctggaaccagaagcagctccagggccccgagaaggagccgcccaagccagagcaggtcgagtcccgggcgctcaccatgttccgggacattgcccagcaactgcaggccacctgtacctccctggggtccagcattcagggcctccccaccaatgtgaaggaccaggtgcagcaggcccgccgccaggtggaggacctccaggccacgttttccagcatccactccttccaggacctgtccagcagcattctggcccagagccgtgagcgtgtcgccagcgcccgcgaggccctggaccacatggtggaatatgtggcccagaacacacctgtcacgtggctcgtgggaccctttgcccctggaatcactgagaaagccccggaggagaagaagtagggggagaggagaggactcagcgggccccgtctctataatgcagctgtgctctggagtcctcaacccggggctcatttcaaacttattttctagccactcctcccagctcttctgtgctgtccacttgggaagctaaggctctcaaaacgggcatcacccagttgacccatctctcagcctctctgagcttggaagaagcctgttctgagcctcaccctatcagtcagtagagagagatgtccagaaaaaatatctttcaggaaagttctcccctgcagaattttttttccttgttaaatatcaggaatataggccgggtgcggtggctcacacctgtaatcccagcactttgggaggctgaggcgggcggaacacctgaggtcaggtgttcgagaccagccaggccaacatggtgaaaccccgtctctactaaaaatacaaaaaaaaatgagccgggcatggtagcaggtgtctgttatcccagttaggaggctgaggcaagagaatctcttgaacctgagaggcggaggttgcagtgagccaagatcgcgccattgcactccagcctgggggacaagagtgagacttagtctcaaaaaaaaaaaaaaaagaaaaaaaaatcagggatatagttcatatcccacttctttgtttacaccgatgtccctgaatatcagcctgtagctaatggacttgggatttctggtctaagtgggcctcctggggatggggtggtacactgagcttctgagcctcattgtagagtagaaaggtactggggcctgtgtggtaagccttgttgaaatgctctggtattcagtattgccttaataaacttcacccacaactgca

SEQ ID NO: 316333 - DNA, 2018 bp, Homo sapiens
atgtccggacgcggcaagcaaggcggaaaggcccgagctaaggctaagacccgctcttcgcgggccggactccagttccctgtgggccgcgtacaccgcttgctccgcaagggcaactactccgagcgagtcggggccggcgcgccagtgtatctggcggcggtgttggagtacctgaccgccgagatcctggagctggcgggcaacgccgcccgcgacaacaagaagacccgcatcatcccccgacacctgcagctggccatccgcaacgacgaggagctaaacaagttgctgggtaaagtcacaattgctcagggcggtgttctgcccaacatccaggctgtactgctccccaagaagactgagagtcaccacaaggccaaggcagggtttagaagttcgcaatggctcgtaccaagcagactgctcgcaagtccacgggtgggaaagcgccacgcaagcagctggccaccaaggctgctcgaaagagcgctccagccaccggcggcgtgaagaagccccaccgttaccggcccggcacggtggctctgcgcgagatccgccgctaccagaagtcgaccgagctgctgattcgcaaactgccattccagcgtctagtccgtgagatcgcgcaggacttcaagactgatctgcgttttcagagctcggcggtgatggcgctgcaggaggcctgcgaggcctacctggtggggctgtttgaggacaccaacctatgcgccattcacgccaagcgagtgactatcatgcccaaggacatccagcttgctcgccgcattcgtggggagagggcgtaaattgtcttgtgaatgtgtgctaaccaaaacccaaaggctcttttcagagccaaccaccttttctataaaagttgctgtttactgttgctgtccgtaaactggaacctctgttcactcaagggacgaggtctcactgtgttacccaggctggcctcaaaactccttagcttggccaggcgaggtggctcaggcctgtaatcacagcactttaggatgccaaggcgggcggatcacgtgatgccaagagttcgagaccagcctgcccaacacattgaaacttcgtctctactgagaatacaaaaattagccgggtgtggtggcacacgcctgcagtcccagctacatggaaagctgaggcaggagaagggcttgaacccgggaggcggaagttgcagtgaaccgagatcacaccactgcactccagcctgggcagcagagctagactccttcaaaaaaaaaaaaaaaatccccaaggacaaacaaaaccaccaaaaacaactccttagcttaagagattctcccgccttggcctcacaaaatgctgagattacaaacgtaggccaccgcgaccggcaagggccgatcttcatatcgtagccgccaacacctacttgagcgcggccacagagaaggccgctgcgcttcttggagacggctaagtcattagtgatgaactcacataccggaggggcctggacatcttgcacttcactgcaacttcggacttgcaacctttttctttacttcagtctttgacttgggagatagaccaggagtcacggcatgtacagtttcggacatgattgtaggtttggatatctaacagttaaaaaaaaaaaaagtcaggctgcgagtgtgtctgtgattacgtgtgtgtcacacacagacacgctgcgcgctgattggttcccagctcagtctttcagcttggcagcaacctagtctcaaccctgtttctgagttgtgtttgcggaaattcagaaaatcaaaatagtttaaatttcctgaggaggaatcacaccaattctattctacaatgaactggaacggctacggtgttatgatctttacattttctttctctagtttttacttaaggcagcctcggcctttatcaaaagttccaactttcagagattcacagttcagagggacaacttcttgattttcatttaaaatataaattcttccattcgtgtcttc

SEQ ID NO: 316334 - DNA, 5973 bp, Homo sapiens
cacgtgcatgtgtagcatgccttggtttttcctttggcatctgaaaaaggcacaacctgaaagacctagaacccagtgtcggtccccaggccctttgggacaggaagagaagagccgtgtggccgcggggaggatgtcctgcggcggggctgtcctcgcggactgactggactccatctcccagcgggcgccgcggcgcggccacgcccccccactccccgcgcgcgcccggtggagacttcgattttcagaattcctcctgggaatgctgactccttgcttggtgccctgatgcttctctgagataaactgatgaattggaaccatggtgcaaaagaagaagttctgtcctcggttacttgactatctagtgatcgtaggggccaggcacccgagcagtgatagcgtggcccagactcctgaattgctacggcgataccccttggaggatcacactgagtttcccctgcccccagatgtagtgttcttctgccagcccgagggctgcctgagcgtgcggcagcggcgcatgagccttcgggatgatacctcttttgtcttcaccctcactgacaaggacactggagtcacgcgatatggcatctgtgttaacttctaccgctccttccaaaagcgaatctctaaggagaagggggaaggtggggcagggtcccgtgggaaggaaggaacccatgccacctgtgcctcagaagagggtggcactgagagctcagagagtggctcatccctgcagcctctcagtgctgactctacccctgatgtgaaccagtctcctcggggcaaacgccgggccaaggcggggagccgctcccgcaacagtactctcacgtccctgtgcgtgctcagccactaccctttcttctccaccttccgagagtgtttgtatactctcaagcgcctggtggactgctgtagtgagcgccttctgggcaagaaactgggcatccctcgaggcgtacaaagggacaccatgtggcggatctttactggatcgctgctggtagaggagaagtcaagtgcccttctgcatgaccttcgagagattgaggcctggatctatcgattgctgcgctccccagtacccgtctctgggcagaagcgagtagacatcgaggtcctaccccaagagctccagccagctctgacctttgctcttccagacccatctcgattcaccctagtggatttcccactgcaccttcccttggaacttctaggtgtggacgcctgtctccaggtgctaacctgcattctgttagagcacaaggtggtgctacagtcccgagactacaatgcactctccatgtctgtgatggcattcgtggcaatgatctacccactggaatatatgtttcctgtcatcccgctgctacccacctgcatggcatcagcagagcagctgctgttggctccaaccccgtacatcattggggttcctgccagcttcttcctctacaaactggacttcaaaatgcctgatgatgtatggctagtggatctggacagcaatagggtgattgcccccaccaatgcagaagtgctgcctatcctgccagaaccagaatcactagagctgaaaaagcatttaaagcaggccttggccagcatgagtctcaacacccagcccatcctcaatctggagaaatttcatgagggccaggagatcccccttctcttgggaaggccttctaatgacctgcagtccacaccgtccactgaattcaacccactcatctatggcaatgatgtggattctgtggatgttgcaaccagggttgccatggtacggttcttcaattccgccaacgtgctgcagggatttcagatgcacacgcgtaccctgcgcctctttcctcggcctgtggtagcttttcaagctggctcctttctagcctcacgtccccggcagactccttttgccgagaaattggccaggactcaggctgtggagtactttggggaatggatccttaaccccaccaactatgcctttcagcgaattcacaacaatatgtttgatccagccctgattggtgacaagccaaagtggtatgctcatcagctgcagcctatccactatcgcgtctatgacagcaattcccagctggctgaggccctgagtgtaccaccagagcgggactctgactccgaacctactgatgatagtggcagtgatagtatggattatgacgattcaagctcttcttactcctcccttggtgactttgtcagtgaaatgatgaaatgtgacattaatggtgatactcccaatgtggaccctctgacacatgcagcactgggggatgccagcgaggtggagattgacgagctgcagaatcagaaggaagcagaagagcctggcccagacagtgagaactctcaggaaaaccccccactgcgctccagctctagcaccacagccagcagcagccccagcactgtcatccacggagccaactctgaacctgctgactctacggagatggatgataaggcagcagtaggcgtctccaagcccctcccttccgtgcctcccagcattggcaaatcgaacgtggacagacgtcaggcagaaattggagaggggtcagtgcgccggcgaatctatgacaatccatacttcgagccccaatatggctttccccctgaggaagatgaggatgagcagggggaaagttacactccccgattcagccaacatgtcagtggcaatcgggctcaaaagctgctgcggcccaacagcttgagactggcaagtgactcagatgcagagtcagactctcgggcaagctctcccaactccaccgtctccaacaccagcaccgagggcttcgggggcatcatgtcttttgccagcagcctctatcggaaccacagtaccagcttcagtctttcaaacctcacactgcccaccaaaggtgcccgagagaaggccacgcccttccccagtctgaaaggaaacaggagggcgttagtggatcagaagtcatctgtcattaaacacagcccaacagtgaaaagagaacctccatcaccccagggtcgatccagcaattctagtgagaaccagcagttcctgaaggaggtggtgcacagcgtgctggacggccagggagttggctggctcaacatgaaaaaggtgcgccggctgctggagagcgagcagctgcgagtctttgtcctgagcaagctgaaccgcatggtgcagtcagaggacgatgcccggcaggacatcatcccggatgtggagatcagtcggaaggtgtacaagggaatgttagacctcctcaagtgtacagtcctcagcttggagcagtcctatgcccacgcgggtctgggtggcatggccagcatctttgggcttttggagattgcccagacccactactatagtaaagaaccagacaagcggaagagaagtccaacagaaagtgtaaataccccagttggcaaggatcctggcctagctgggcggggggacccaaaggctatggcacaactgagagttccacaactgggacctcgggcaccaagtgccacaggaaagggtcctaaggaactggacaccagaagtttaaaggaagaaaattttatagcatctattgggcctgaagtaatcaaacctgtctttgaccttggtgagacagaggagaaaaagtcccagatcagcgcagacagtggtgtgagcctgacgtctagttcccagaggactgatcaagactctgtcatcggcgtgagtccagctgttatgatccgcagctcaagtcaggattctgaagttagcaccgtggtgagtaatagctctggagagacccttggagctgacagtgacttgagcagcaatgcaggtgatggaccaggtggcgagggcagtgttcacctggcaagctctcggggcactttgtctgatagtgaaattgagaccaactctgccacaagcaccatctttggtaaagcccacagcttgaagccaagcataaaggagaagctggcaggcagccccattcgtacttctgaagatgtgagccagcgagtctatctctatgagggactcctaggcaaagagcgttctactttatgggaccaaatgcaattctgggaagatgccttcttagatgctgtgatgttggagagagaagggatgggtatggaccagggtccccaggaaatgatcgacaggtacctgtcccttggagaacatgaccggaagcgcctggaagatgatgaagatcgcttgctggccacacttctgcacaacctcatctcctacatgctgctgatgaaggtaaataagaatgacatccgcaagaaggtgaggcgcctaatgggaaagtcgcacattgggcttgtgtacagccagcaaatcaatgaggtgcttgatcagctggcgaacctgaatggacgcgatctctctatctggtccagtggcagccggcacatgaagaagcagacatttgtggtacatgcagggacagatacaaacggagatatctttttcatggaggtgtgcgatgactgtgtggtgttgcgtagtaacatcggaacagtgtatgagcgctggtggtacgagaagctcatcaacatgacctactgtcccaagacgaaggtgttgtgcttgtggcgtagaaatggctctgagacccagctcaacaagttctatactaaaaagtgtcgggagctgtactactgtgtgaaggacagcatggagcgcgctgccgcccgacagcaaagcatcaaacccggacctgaattgggtggcgagttccctgtgcaggacctgaagactggtgagggtggcctgctgcaggtgaccctggaagggatcaacctcaaattcatgcacaatcaggttttcatagagctgaatcacattaaaaagtgcaatacagttcgaggcgtctttgtcctggaggaatttgttcctgaaattaaagaagtggtgagccacaagtacaagacaccaatggcccacgaaatctgctactccgtattatgtctcttctcgtacgtggctgcagttcatagcagtgaggaagatctcagaaccccgccccggcctgtctctagctgatggagaggggctacgcagctgccccagcccagggcacgcccctggccccttgctgttcccaagtgcacgatgctgctgtgactgaggagtggatgatgctcgtgtgtcctctgcaagccccctgctgtggcttggttggttaccggttatgtgtccctctgagtgtgtcttgagcgtgtccaccttctccctctccactcccagaagaccaaactgccttcccctcagggctcaagaatgtgtacagtctgtggggccggtgtgaacccactattttgtgtccttgagacatttgtgttgtggttccttgtccttgtccctggcgttataactgtccactgcaagagtctggctctcccttctctgtgacccggcatgactgggcgcctggagcagtttcactctgtgaggagtgagggaaccctggggctcaccctctcagaggaagggcacagagaggaagggaagaattggggggcagccggagtgagtggcagcctccctgcttccttctgcattcccaagccggcagctactgcccagggcccgcagtgttggctgctgcctgccacagcctctgtgactgcagtggagcggcgaattccctgtggcctgccacgccttcggcatcagaggatggagtggtcgaggctagtggagtcccagggaccgctggctgctctgcctgagcatcagggagggggcaggaaagaccaagctgggtttgcacatctgtctgcaggctgtctctccaggcacggggtgtcaggagggagagacagcctgggtatgggcaagaaatgactgtaaatatttcagccccacattatttatagaaaatgtacagttgtgtgaatgtgaaataaatgtcctcaactccc

SEQ ID NO: 316335 - DNA, 5850 bp, Homo sapiens
agtgcagacgcggaactggcgcccgctcggagcggcgccgcgctggggagcgactgacgccccgctgccgggggacgtcgggctgggcctggccagtcccccagagcttgggagacttcgattttcagaattcctcctgggaatgctgactccttgcttggtgccctgatgcttctctgagataaactgatgaattggaaccatggtgcaaaagaagaagttctgtcctcggttacttgactatctagtgatcgtaggggccaggcacccgagcagtgatagcgtggcccagactcctgaattgctacggcgataccccttggaggatcacactgagtttcccctgcccccagatgtagtgttcttctgccagcccgagggctgcctgagcgtgcggcagcggcgcatgagccttcgggatgatacctcttttgtcttcaccctcactgacaaggacactggagtcacgcgatatggcatctgtgttaacttctaccgctccttccaaaagcgaatctctaaggagaagggggaaggtggggcagggtcccgtgggaaggaaggaacccatgccacctgtgcctcagaagagggtggcactgagagctcagagagtggctcatccctgcagcctctcagtgctgactctacccctgatgtgaaccagtctcctcggggcaaacgccgggccaaggcggggagccgctcccgcaacagtactctcacgtccctgtgcgtgctcagccactaccctttcttctccaccttccgagagtgtttgtatactctcaagcgcctggtggactgctgtagtgagcgccttctgggcaagaaactgggcatccctcgaggcgtacaaagggacaccatgtggcggatctttactggatcgctgctggtagaggagaagtcaagtgcccttctgcatgaccttcgagagattgaggcctggatctatcgattgctgcgctccccagtacccgtctctgggcagaagcgagtagacatcgaggtcctaccccaagagctccagccagctctgacctttgctcttccagacccatctcgattcaccctagtggatttcccactgcaccttcccttggaacttctaggtgtggacgcctgtctccaggtgctaacctgcattctgttagagcacaaggtggtgctacagtcccgagactacaatgcactctccatgtctgtgatggcattcgtggcaatgatctacccactggaatatatgtttcctgtcatcccgctgctacccacctgcatggcatcagcagagcagctgctgttggctccaaccccgtacatcattggggttcctgccagcttcttcctctacaaactggacttcaaaatgcctgatgatgtatggctagtggatctggacagcaatagggtgattgcccccaccaatgcagaagtgctgcctatcctgccagaaccagaatcactagagctgaaaaagcatttaaagcaggccttggccagcatgagtctcaacacccagcccatcctcaatctggagaaatttcatgagggccaggagatcccccttctcttgggaaggccttctaatgacctgcagtccacaccgtccactgaattcaacccactcatctatggcaatgatgtggattctgtggatgttgcaaccagggttgccatggtacggttcttcaattccgccaacgtgctgcagggatttcagatgcacacgcgtaccctgcgcctctttcctcggcctgtggtagcttttcaagctggctcctttctagcctcacgtccccggcagactccttttgccgagaaattggccaggactcaggctgtggagtactttggggaatggatccttaaccccaccaactatgcctttcagcgaattcacaacaatatgtttgatccagccctgattggtgacaagccaaagtggtatgctcatcagctgcagcctatccactatcgcgtctatgacagcaattcccagctggctgaggccctgagtgtaccaccagagcgggactctgactccgaacctactgatgatagtggcagtgatagtatggattatgacgattcaagctcttcttactcctcccttggtgactttgtcagtgaaatgatgaaatgtgacattaatggtgatactcccaatgtggaccctctgacacatgcagcactgggggatgccagcgaggtggagattgacgagctgcagaatcagaaggaagcagaagagcctggcccagacagtgagaactctcaggaaaaccccccactgcgctccagctctagcaccacagccagcagcagccccagcactgtcatccacggagccaactctgaacctgctgactctacggagatggatgataaggcagcagtaggcgtctccaagcccctcccttccgtgcctcccagcattggcaaatcgaacgtggacagacgtcaggcagaaattggagaggggtcagtgcgccggcgaatctatgacaatccatacttcgagccccaatatggctttccccctgaggaagatgaggatgagcagggggaaagttacactccccgattcagccaacatgtcagtggcaatcgggctcaaaagctgctgcggcccaacagcttgagactggcaagtgactcagatgcagagtcagactctcgggcaagctctcccaactccaccgtctccaacaccagcaccgagggcttcgggggcatcatgtcttttgccagcagcctctatcggaaccacagtaccagcttcagtctttcaaacctcacactgcccaccaaaggtgcccgagagaaggccacgcccttccccagtctgaaaggaaacaggagggcgttagtggatcagaagtcatctgtcattaaacacagcccaacagtgaaaagagaacctccatcaccccagggtcgatccagcaattctagtgagaaccagcagttcctgaaggaggtggtgcacagcgtgctggacggccagggagttggctggctcaacatgaaaaaggtgcgccggctgctggagagcgagcagctgcgagtctttgtcctgagcaagctgaaccgcatggtgcagtcagaggacgatgcccggcaggacatcatcccggatgtggagatcagtcggaaggtgtacaagggaatgttagacctcctcaagtgtacagtcctcagcttggagcagtcctatgcccacgcgggtctgggtggcatggccagcatctttgggcttttggagattgcccagacccactactatagtaaagaaccagacaagcggaagagaagtccaacagaaagtgtaaataccccagttggcaaggatcctggcctagctgggcggggggacccaaaggctatggcacaactgagagttccacaactgggacctcgggcaccaagtgccacaggaaagggtcctaaggaactggacaccagaagtttaaaggaagaaaattttatagcatctattgggcctgaagtaatcaaacctgtctttgaccttggtgagacagaggagaaaaagtcccagatcagcgcagacagtggtgtgagcctgacgtctagttcccagaggactgatcaagactctgtcatcggcgtgagtccagctgttatgatccgcagctcaagtcaggattctgaagttagcaccgtggtgagtaatagctctggagagacccttggagctgacagtgacttgagcagcaatgcaggtgatggaccaggtggcgagggcagtgttcacctggcaagctctcggggcactttgtctgatagtgaaattgagaccaactctgccacaagcaccatctttggtaaagcccacagcttgaagccaagcataaaggagaagctggcaggcagccccattcgtacttctgaagatgtgagccagcgagtctatctctatgagggactcctaggcaaagagcgttctactttatgggaccaaatgcaattctgggaagatgccttcttagatgctgtgatgttggagagagaagggatgggtatggaccagggtccccaggaaatgatcgacaggtacctgtcccttggagaacatgaccggaagcgcctggaagatgatgaagatcgcttgctggccacacttctgcacaacctcatctcctacatgctgctgatgaaggtaaataagaatgacatccgcaagaaggtgaggcgcctaatgggaaagtcgcacattgggcttgtgtacagccagcaaatcaatgaggtgcttgatcagctggcgaacctgaatggacgcgatctctctatctggtccagtggcagccggcacatgaagaagcagacatttgtggtacatgcagggacagatacaaacggagatatctttttcatggaggtgtgcgatgactgtgtggtgttgcgtagtaacatcggaacagtgtatgagcgctggtggtacgagaagctcatcaacatgacctactgtcccaagacgaaggtgttgtgcttgtggcgtagaaatggctctgagacccagctcaacaagttctatactaaaaagtgtcgggagctgtactactgtgtgaaggacagcatggagcgcgctgccgcccgacagcaaagcatcaaacccggacctgaattgggtggcgagttccctgtgcaggacctgaagactggtgagggtggcctgctgcaggtgaccctggaagggatcaacctcaaattcatgcacaatcaggttttcatagagctgaatcacattaaaaagtgcaatacagttcgaggcgtctttgtcctggaggaatttgttcctgaaattaaagaagtggtgagccacaagtacaagacaccaatggcccacgaaatctgctactccgtattatgtctcttctcgtacgtggctgcagttcatagcagtgaggaagatctcagaaccccgccccggcctgtctctagctgatggagaggggctacgcagctgccccagcccagggcacgcccctggccccttgctgttcccaagtgcacgatgctgctgtgactgaggagtggatgatgctcgtgtgtcctctgcaagccccctgctgtggcttggttggttaccggttatgtgtccctctgagtgtgtcttgagcgtgtccaccttctccctctccactcccagaagaccaaactgccttcccctcagggctcaagaatgtgtacagtctgtggggccggtgtgaacccactattttgtgtccttgagacatttgtgttgtggttccttgtccttgtccctggcgttataactgtccactgcaagagtctggctctcccttctctgtgacccggcatgactgggcgcctggagcagtttcactctgtgaggagtgagggaaccctggggctcaccctctcagaggaagggcacagagaggaagggaagaattggggggcagccggagtgagtggcagcctccctgcttccttctgcattcccaagccggcagctactgcccagggcccgcagtgttggctgctgcctgccacagcctctgtgactgcagtggagcggcgaattccctgtggcctgccacgccttcggcatcagaggatggagtggtcgaggctagtggagtcccagggaccgctggctgctctgcctgagcatcagggagggggcaggaaagaccaagctgggtttgcacatctgtctgcaggctgtctctccaggcacggggtgtcaggagggagagacagcctgggtatgggcaagaaatgactgtaaatatttcagccccacattatttatagaaaatgtacagttgtgtgaatgtgaaataaatgtcctcaactccc

SEQ ID NO: 316336 - DNA, 5957 bp, Homo sapiens
agtgcagacgcggaactggcgcccgctcggagcggcgccgcgctggggagcgactgacgccccgctgccgggggacgtcgggctgggcctggccagtcccccagagcttgggagacttcgattttcagaattcctcctgggaatgctgactccttgcttggtgccctgatgcttctctgagataaactgatgaattggaaccatggtgcaaaagaagaagttctgtcctcggttacttgactatctagtgatcgtaggggccaggcacccgagcagtgatagcgtggcccagactcctgaattgctacggcgataccccttggaggatcacactgagtttcccctgcccccagatgtagtgttcttctgccagcccgagggctgcctgagcgtgcggcagcggcgcatgagccttcgggatgatacctcttttgtcttcaccctcactgacaaggacactggagtcacgcgatatggcatctgtgttaacttctaccgctccttccaaaagcgaatctctaaggagaagggggaaggtggggcagggtcccgtgggaaggaaggaacccatgccacctgtgcctcagaagagggtggcactgagagctcagagagtggctcatccctgcagcctctcagtgctgactctacccctgatgtgaaccagtctcctcggggcaaacgccgggccaaggcggggagccgctcccgcaacagtactctcacgtccctgtgcgtgctcagccactaccctttcttctccaccttccgagagtgtttgtatactctcaagcgcctggtggactgctgtagtgagcgccttctgggcaagaaactgggcatccctcgaggcgtacaaagggacaccatgtggcggatctttactggatcgctgctggtagaggagaagtcaagtgcccttctgcatgaccttcgagagattgaggcctggatctatcgattgctgcgctccccagtacccgtctctgggcagaagcgagtagacatcgaggtcctaccccaagagctccagccagctctgacctttgctcttccagacccatctcgattcaccctagtggatttcccactgcaccttcccttggaacttctaggtgtggacgcctgtctccaggtgctaacctgcattctgttagagcacaaggtggtgctacagtcccgagactacaatgcactctccatgtctgtgatggcattcgtggcaatgatctacccactggaatatatgtttcctgtcatcccgctgctacccacctgcatggcatcagcagagcagctgctgttggctccaaccccgtacatcattggggttcctgccagcttcttcctctacaaactggacttcaaaatgcctgatgatgtatggctagtggatctggacagcaatagggtgattgcccccaccaatgcagaagtgctgcctatcctgccagaaccagaatcactagagctgaaaaagcatttaaagcaggccttggccagcatgagtctcaacacccagcccatcctcaatctggagaaatttcatgagggccaggagatcccccttctcttgggaaggccttctaatgacctgcagtccacaccgtccactgaattcaacccactcatctatggcaatgatgtggattctgtggatgttgcaaccagggttgccatggtacggttcttcaattccgccaacgtgctgcagggatttcagatgcacacgcgtaccctgcgcctctttcctcggcctgtggtagcttttcaagctggctcctttctagcctcacgtccccggcagactccttttgccgagaaattggccaggactcaggctgtggagtactttggggaatggatccttaaccccaccaactatgcctttcagcgaattcacaacaatatgtttgatccagccctgattggtgacaagccaaagtggtatgctcatcagctgcagcctatccactatcgcgtctatgacagcaattcccagctggctgaggccctgagtgtaccaccagagcgggactctgactccgaacctactgatgatagtggcagtgatagtatggattatgacgattcaagctcttcttactcctcccttggtgactttgtcagtgaaatgatgaaatgtgacattaatggtgatactcccaatgtggaccctctgacacatgcagcactgggggatgccagcgaggtggagattgacgagctgcagaatcagaaggaagcagaagagcctggcccagacagtgagaactctcaggaaaaccccccactgcgctccagctctagcaccacagccagcagcagccccagcactgtcatccacggagccaactctgaacctgctgactctacggagatggatgataaggcagcagtaggcgtctccaagcccctcccttccgtgcctcccagcattggcaaatcgaacgtggacagacgtcaggcagaaattggagaggggtcagtgcgccggcgaatctatgacaatccatacttcgagccccaatatggctttccccctgaggaagatgaggatgagcagggggaaagttacactccccgattcagccaacatgtcagtggcaatcgggctcaaaagctgctgcggcccaacagcttgagactggcaagtgactcagatgcagagtcagactctcgggcaagctctcccaactccaccgtctccaacaccagcaccgagggcttcgggggcatcatgtcttttgccagcagcctctatcggaaccacagtaccagcttcagtctttcaaacctcacactgcccaccaaaggtgcccgagagaaggccacgcccttccccagtctgaaagtatttgggctaaatactctaatggagattgttactgaagccggccccgggagtggtgaaggaaacaggagggcgttagtggatcagaagtcatctgtcattaaacacagcccaacagtgaaaagagaacctccatcaccccagggtcgatccagcaattctagtgagaaccagcagttcctgaaggaggtggtgcacagcgtgctggacggccagggagttggctggctcaacatgaaaaaggtgcgccggctgctggagagcgagcagctgcgagtctttgtcctgagcaagctgaaccgcatggtgcagtcagaggacgatgcccggcaggacatcatcccggatgtggagatcagtcggaaggtgtacaagggaatgttagacctcctcaagtgtacagtcctcagcttggagcagtcctatgcccacgcgggtctgggtggcatggccagcatctttgggcttttggagattgcccagacccactactatagtaaagaaccagacaagcggaagagaagtccaacagaaagtgtaaataccccagttggcaaggatcctggcctagctgggcggggggacccaaaggctatggcacaactgagagttccacaactgggacctcgggcaccaagtgccacaggaaagggtcctaaggaactggacaccagaagtttaaaggaagaaaattttatagcatctattgaattgtggaacaagcaccaggaagtgaaaaagcaaaaagctttggaaaaacagaggcctgaagtaatcaaacctgtctttgaccttggtgagacagaggagaaaaagtcccagatcagcgcagacagtggtgtgagcctgacgtctagttcccagaggactgatcaagactctgtcatcggcgtgagtccagctgttatgatccgcagctcaagtcaggattctgaagttagcaccgtggtgagtaatagctctggagagacccttggagctgacagtgacttgagcagcaatgcaggtgatggaccaggtggcgagggcagtgttcacctggcaagctctcggggcactttgtctgatagtgaaattgagaccaactctgccacaagcaccatctttggtaaagcccacagcttgaagccaagcataaaggagaagctggcaggcagccccattcgtacttctgaagatgtgagccagcgagtctatctctatgagggactcctaggaagggacaaaggatccatgtgggaccagttagaggatgcagctatggagaccttttctataagcaaagagcgttctactttatgggaccaaatgcaattctgggaagatgccttcttagatgctgtgatgttggagagagaagggatgggtatggaccagggtccccaggaaatgatcgacaggtacctgtcccttggagaacatgaccggaagcgcctggaagatgatgaagatcgcttgctggccacacttctgcacaacctcatctcctacatgctgctgatgaaggtaaataagaatgacatccgcaagaaggtgaggcgcctaatgggaaagtcgcacattgggcttgtgtacagccagcaaatcaatgaggtgcttgatcagctggcgaacctgaatggacgcgatctctctatctggtccagtggcagccggcacatgaagaagcagacatttgtggtacatgcagggacagatacaaacggagatatctttttcatggaggtgtgcgatgactgtgtggtgttgcgtagtaacatcggaacagtgtatgagcgctggtggtacgagaagctcatcaacatgacctactgtcccaagacgaaggtgttgtgcttgtggcgtagaaatggctctgagacccagctcaacaagttctatactaaaaagtgtcgggagctgtactactgtgtgaaggacagcatggagcgcgctgccgcccgacagcaaagcatcaaacccggacctgaattgggtggcgagttccctgtgcaggacctgaagactggtgagggtggcctgctgcaggtgaccctggaagggatcaacctcaaattcatgcacaatcagttcctgaaattaaagaagtggtgagccacaagtacaagacaccaatggcccacgaaatctgctactccgtattatgtctcttctcgtacgtggctgcagttcatagcagtgaggaagatctcagaaccccgccccggcctgtctctagctgatggagaggggctacgcagctgccccagcccagggcacgcccctggccccttgctgttcccaagtgcacgatgctgctgtgactgaggagtggatgatgctcgtgtgtcctctgcaagccccctgctgtggcttggttggttaccggttatgtgtccctctgagtgtgtcttgagcgtgtccaccttctccctctccactcccagaagaccaaactgccttcccctcagggctcaagaatgtgtacagtctgtggggccggtgtgaacccactattttgtgtccttgagacatttgtgttgtggttccttgtccttgtccctggcgttataactgtccactgcaagagtctggctctcccttctctgtgacccggcatgactgggcgcctggagcagtttcactctgtgaggagtgagggaaccctggggctcaccctctcagaggaagggcacagagaggaagggaagaattggggggcagccggagtgagtggcagcctccctgcttccttctgcattcccaagccggcagctactgcccagggcccgcagtgttggctgctgcctgccacagcctctgtgactgcagtggagcggcgaattccctgtggcctgccacgccttcggcatcagaggatggagtggtcgaggctagtggagtcccagggaccgctggctgctctgcctgagcatcagggagggggcaggaaagaccaagctgggtttgcacatctgtctgcaggctgtctctccaggcacggggtgtcaggagggagagacagcctgggtatgggcaagaaatgactgtaaatatttcagccccacattatttatagaaaatgtacagttgtgtgaatgtgaaataaatgtcctcaactccc

SEQ ID NO: 316337 - DNA, 487 bp, Homo sapiens
ggagagacagcctgggtatgggcaagaaatgactgtaaatatttcagccccacattatttatagaaaatgtacagttgtgtgaatgtgaaataaatgtcctcacctccctgcttccttctgcattcccaagccggcagctactgcccagggcccgcagtgttggctgctgcctgccacagcctctgtgactgcagtggagcggcgaattccctgtggcctgccacgccttcggcatcagaggatggagtggtcgaggctagtggagtcccagggaccgctggctgctctgcctgagcatcagggagggggcaggaaagaccaagctgggtttgcacatctgtctgcaggctgtctctccaggcacggggtgtcaggagggagagacagcctgggtatgggcaagaaatgactgtaaatatttcagccccacattatttatagaaaatgtacagttgtgtgaatgtgaaataaatgtcctcaactccc

SEQ ID NO: 316338 - DNA, 5710 bp, Homo sapiens
accgcggccgcgcgcccccctctgcccccgctgcccaggattggtaggctccaccgctcggcagccggcttccctgctcggacgccgagcaccgccaaagcgcacttcgattttcagaattcctcctgggaatgctgactccttgcttggtgccctgatgcttctctgagataaactgatgaattggaaccatggtgcaaaagaagaagttctgtcctcggttacttgactatctagtgatcgtaggggccaggcacccgagcagtgatagcgtggcccagactcctgaattgctacggcgataccccttggaggatcacactgagtttcccctgcccccagatgtagtgttcttctgccagcccgagggctgcctgagcgtgcggcagcggcgcatgagccttcgggatgatacctcttttgtcttcaccctcactgacaaggacactggagtcacgcgatatggcatctgtgttaacttctaccgctccttccaaaagcgaatctctaaggagaagggggaaggtggggcagggtcccgtgggaaggaaggaacccatgccacctgtgcctcagaagagggtggcactgagagctcagagagtggctcatccctgcagcctctcagtgctgactctacccctgatgtgaaccagtctcctcggggcaaacgccgggccaaggcggggagccgctcccgcaacagtactctcacgtccctgtgcgtgctcagccactaccctttcttctccaccttccgagagtgtttgtatactctcaagcgcctggtggactgctgtagtgagcgccttctgggcaagaaactgggcatccctcgaggcgtacaaagggacaccatgtggcggatctttactggatcgctgctggtagaggagaagtcaagtgcccttctgcatgaccttcgagagattgaggcctggatctatcgattgctgcgctccccagtacccgtctctgggcagaagcgagtagacatcgaggtcctaccccaagagctccagccagctctgacctttgctcttccagacccatctcgattcaccctagtggatttcccactgcaccttcccttggaacttctaggtgtggacgcctgtctccaggtgctaacctgcattctgttagagcacaaggtggtgctacagtcccgagactacaatgcactctccatgtctgtgatggcattcgtggcaatgatctacccactggaatatatgtttcctgtcatcccgctgctacccacctgcatggcatcagcagagcagctgctgttggctccaaccccgtacatcattggggttcctgccagcttcttcctctacaaactggacttcaaaatgcctgatgatgtatggctagtggatctggacagcaatagggtgattgcccccaccaatgcagaagtgctgcctatcctgccagaaccagaatcactagagctgaaaaagcatttaaagcaggccttggccagcatgagtctcaacacccagcccatcctcaatctggagaaatttcatgagggccaggagatcccccttctcttgggaaggccttctaatgacctgcagtccacaccgtccactgaattcaacccactcatctatggcaatgatgtggattctgtggatgttgcaaccagggttgccatggtacggttcttcaattccgccaacgtgctgcagggatttcagatgcacacgcgtaccctgcgcctctttcctcggcctgtggtagcttttcaagctggctcctttctagcctcacgtccccggcagactccttttgccgagaaattggccaggactcaggctgtggagtactttggggaatggatccttaaccccaccaactatgcctttcagcgaattcacaacaatatgtttgatccagccctgattggtgacaagccaaagtggtatgctcatcagctgcagcctatccactatcgcgtctatgacagcaattcccagctggctgaggccctgagtgtaccaccagagcgggactctgactccgaacctactgatgatagtggcagtgatagtatggattatgacgattcaagctcttcttactcctcccttggtgactttgtcagtgaaatgatgaaatgtgacattaatggtgatactcccaatgtggaccctctgacacatgcagcactgggggatgccagcgaggtggagattgacgagctgcagaatcagaaggaagcagaagagcctggcccagacagtgagaactctcaggaaaaccccccactgcgctccagctctagcaccacagccagcagcagccccagcactgtcatccacggagccaactctgaacctgctgactctacggagatggatgataaggcagcagtaggcgtctccaagcccctcccttccgtgcctcccagcattggcaaatcgaacgtggacagacgtcaggcagaaattggagagggggctcaaaagctgctgcggcccaacagcttgagactggcaagtgactcagatgcagagtcagactctcgggcaagctctcccaactccaccgtctccaacaccagcaccgagggcttcgggggcatcatgtcttttgccagcagcctctatcggaaccacagtaccagcttcagtctttcaaacctcacactgcccaccaaaggtgcccgagagaaggccacgcccttccccagtctgaaaggaaacaggagggcgttagtggatcagaagtcatctgtcattaaacacagcccaacagtgaaaagagaacctccatcaccccagggtcgatccagcaattctagtgagaaccagcagttcctgaaggaggtggtgcacagcgtgctggacggccagggagttggctggctcaacatgaaaaaggtgcgccggctgctggagagcgagcagctgcgagtctttgtcctgagcaagctgaaccgcatggtgcagtcagaggacgatgcccggcaggacatcatcccggatgtggagatcagtcggaaggtgtacaagggaatgttagacctcctcaagtgtacagtcctcagcttggagcagtcctatgcccacgcgggtctgggtggcatggccagcatctttgggcttttggagattgcccagacccactactatagtaaagaaccagacaagcggaagagaagtccaacagaaagtgtaaataccccagttggcaaggatcctggcctagctgggcggggggacccaaaggctatggcacaactgagagttccacaactgggacctcgggcaccaagtgccacaggaaagggtcctaaggaactggacaccagaagtttaaaggaagaaaattttatagcatctattgggcctgaagtaatcaaacctgtctttgaccttggtgagacagaggagaaaaagtcccagatcagcgcagacagtggtgtgagcctgacgtctagttcccagaggactgatcaagactctgtcatcggcgtgagtccagctgttatgatccgcagctcaagtcaggattctgaagttagcaccgtggtgagtaatagctctggagagacccttggagctgacagtgacttgagcagcaatgcaggtgatggaccaggtggcgagggcagtgttcacctggcaagctctcggggcactttgtctgatagtgaaattgagaccaactctgccacaagcaccatctttggtaaagcccacagcttgaagccaagcataaaggagaagctggcaggcagccccattcgtacttctgaagatgtgagccagcgagtctatctctatgagggactcctaggcaaagagcgttctactttatgggaccaaatgcaattctgggaagatgccttcttagatgctgtgatgttggagagagaagggatgggtatggaccagggtccccaggaaatgatcgacaggtacctgtcccttggagaacatgaccggaagcgcctggaagatgatgaagatcgcttgctggccacacttctgcacaacctcatctcctacatgctgctgatgaaggtaaataagaatgacatccgcaagaaggtgaggcgcctaatgggaaagtcgcacattgggcttgtgtacagccagcaaatcaatgaggtgcttgatcagctggcgaacctgaatggacgcgatctctctatctggtccagtggcagccggcacatgaagaagcagacatttgtggtacatgcagggacagatacaaacggagatatctttttcatggaggtgtgcgatgactgtgtggtgttgcgtagtaacatcggaacagtgtatgagcgctggtggtacgagaagctcatcaacatgacctactgtcccaagacgaaggtgttgtgcttgtggcgtagaaatggctctgagacccagctcaacaagttctatactaaaaagtgtcgggagctgtactactgtgtgaaggacagcatggagcgcgctgccgcccgacagcaaagcatcaaacccggacctgaattgggtggcgagttccctgtgcaggacctgaagactggtgagggtggcctgctgcaggtgaccctggaagggatcaacctcaaattcatgcacaatcaggttttcatagagctgaatcacattaaaaagtgcaatacagttcgaggcgtctttgtcctggaggaatttgttcctgaaattaaagaagtggtgagccacaagtacaagacaccaatggcccacgaaatctgctactccgtattatgtctcttctcgtacgtggctgcagttcatagcagtgaggaagatctcagaaccccgccccggcctgtctctagctgatggagaggggctacgcagctgccccagcccagggcacgcccctggccccttgctgttcccaagtgcacgatgctgctgtgactgaggagtggatgatgctcgtgtgtcctctgcaagccccctgctgtggcttggttggttaccggttatgtgtccctctgagtgtgtcttgagcgtgtccaccttctccctctccactcccagaagaccaaactgccttcccctcagggctcaagaatgtgtacagtctgtggggccggtgtgaacccactattttgtgtccttgagacatttgtgttgtggttccttgtccttgtccctggcgttataactgtccactgcaagagtctggctctcccttctctgtgacccggcatgactgggcgcctggagcagtttcactctgtgaggagtgagggaaccctggggctcaccctctcagaggaagggcacagagaggaagggaagaattggggggcagccggagtgagtggcagcctccctgcttccttctgcattcccaagccggcagctactgcccagggcccgcagtgttggctgctgcctgccacagcctctgtgactgcagtggagcggcgaattccctgtggcctgccacgccttcggcatcagaggatggagtggtcgaggctagtggagtcccagggaccgctggctgctctgcctgagcatcagggagggggcaggaaagaccaagctgggtttgcacatctgtctgcaggctgtctctccaggcacggggtgtcaggagggagagacagcctgggtatgggcaagaaatgactgtaaatatttcagccccacattatttatagaaaatgtacagttgtgtgaatgtgaaataaatgtcctcaactccc

SEQ ID NO: 316339 - DNA, 5744 bp, Homo sapiens
accgcggccgcgcgcccccctctgcccccgctgcccaggattggtaggctccaccgctcggcagccggcttccctgctcggacgccgagcaccgccaaagcgcacttcgattttcagaattcctcctgggaatgctgactccttgcttggtgccctgatgcttctctgagataaactgatgaattggaaccatggtgcaaaagaagaagttctgtcctcggttacttgactatctagtgatcgtaggggccaggcacccgagcagtgatagcgtggcccagactcctgaattgctacggcgataccccttggaggatcacactgagtttcccctgcccccagatgtagtgttcttctgccagcccgagggctgcctgagcgtgcggcagcggcgcatgagccttcgggatgatacctcttttgtcttcaccctcactgacaaggacactggagtcacgcgatatggcatctgtgttaacttctaccgctccttccaaaagcgaatctctaaggagaagggggaaggtggggcagggtcccgtgggaaggaaggaacccatgccacctgtgcctcagaagagggtggcactgagagctcagagagtggctcatccctgcagcctctcagtgctgactctacccctgatgtgaaccagtctcctcggggcaaacgccgggccaaggcggggagccgctcccgcaacagtactctcacgtccctgtgcgtgctcagccactaccctttcttctccaccttccgagagtgtttgtatactctcaagcgcctggtggactgctgtagtgagcgccttctgggcaagaaactgggcatccctcgaggcgtacaaagggacaccatgtggcggatctttactggatcgctgctggtagaggagaagtcaagtgcccttctgcatgaccttcgagagattgaggcctggatctatcgattgctgcgctccccagtacccgtctctgggcagaagcgagtagacatcgaggtcctaccccaagagctccagccagctctgacctttgctcttccagacccatctcgattcaccctagtggatttcccactgcaccttcccttggaacttctaggtgtggacgcctgtctccaggtgctaacctgcattctgttagagcacaaggtggtgctacagtcccgagactacaatgcactctccatgtctgtgatggcattcgtggcaatgatctacccactggaatatatgtttcctgtcatcccgctgctacccacctgcatggcatcagcagagcagctgctgttggctccaaccccgtacatcattggggttcctgccagcttcttcctctacaaactggacttcaaaatgcctgatgatgtatggctagtggatctggacagcaatagggtgattgcccccaccaatgcagaagtgctgcctatcctgccagaaccagaatcactagagctgaaaaagcatttaaagcaggccttggccagcatgagtctcaacacccagcccatcctcaatctggagaaatttcatgagggccaggagatcccccttctcttgggaaggccttctaatgacctgcagtccacaccgtccactgaattcaacccactcatctatggcaatgatgtggattctgtggatgttgcaaccagggttgccatggtacggttcttcaattccgccaacgtgctgcagggatttcagatgcacacgcgtaccctgcgcctctttcctcggcctgtggtagcttttcaagctggctcctttctagcctcacgtccccggcagactccttttgccgagaaattggccaggactcaggctgtggagtactttggggaatggatccttaaccccaccaactatgcctttcagcgaattcacaacaatatgtttgatccagccctgattggtgacaagccaaagtggtatgctcatcagctgcagcctatccactatcgcgtctatgacagcaattcccagctggctgaggccctgagtgtaccaccagagcgggactctgactccgaacctactgatgatagtggcagtgatagtatggattatgacgattcaagctcttcttactcctcccttggtgactttgtcagtgaaatgatgaaatgtgacattaatggtgatactcccaatgtggaccctctgacacatgcagcactgggggatgccagcgaggtggagattgacgagctgcagaatcagaaggaagcagaagagcctggcccagacagtgagaactctcaggaaaaccccccactgcgctccagctctagcaccacagccagcagcagccccagcactgtcatccacggagccaactctgaacctgctgactctacggagatggatgataaggcagcagtaggcgtctccaagcccctcccttccgtgcctcccagcattggcaaatcgaacgtggacagacgtcaggcagaaattggagagggggctcaaaagctgctgcggcccaacagcttgagactggcaagtgactcagatgcagagtcagactctcgggcaagctctcccaactccaccgtctccaacaccagcaccgagggcttcgggggcatcatgtcttttgccagcagcctctatcggaaccacagtaccagcttcagtctttcaaacctcacactgcccaccaaaggtgcccgagagaaggccacgcccttccccagtctgaaaggaaacaggagggcgttagtggatcagaagtcatctgtcattaaacacagcccaacagtgaaaagagaacctccatcaccccagggtcgatccagcaattctagtgagaaccagcagttcctgaaggaggtggtgcacagcgtgctggacggccagggagttggctggctcaacatgaaaaaggtgcgccggctgctggagagcgagcagctgcgagtctttgtcctgagcaagctgaaccgcatggtgcagtcagaggacgatgcccggcaggacatcatcccggatgtggagatcagtcggaaggtgtacaagggaatgttagacctcctcaagtgtacagtcctcagcttggagcagtcctatgcccacgcgggtctgggtggcatggccagcatctttgggcttttggagattgcccagacccactactatagtaaagaaccagacaagcggaagagaagtccaacagaaagtgtaaataccccagttggcaaggatcctggcctagctgggcggggggacccaaaggctatggcacaactgagagttccacaactgggacctcgggcaccaagtgccacaggaaagggtcctaaggaactggacaccagaagtttaaaggaagaaaattttatagcatctattgggcctgaagtaatcaaacctgtctttgaccttggtgagacagaggagaaaaagtcccagatcagcgcagacagtggtgtgagcctgacgtctagttcccagaggactgatcaagactctgtcatcggcgtgagtccagctgttatgatccgcagctcaagtcaggattctgaagttagcaccgtggtgagtaatagctctggagagacccttggagctgacagtgacttgagcagcaatgcaggtgatggaccaggtggcgagggcagtgttcacctggcaagctctcggggcactttgtctgatagtgaaattgagaccaactctgccacaagcaccatctttggtaaagcccacagcttgaagccaagcataaaggagaagctggcaggcagccccattcgtacttctgaagatgtgagccagcgagtctatctctatgagggactcctaggcaaagagcgttctactttatgggaccaaatgcaattctgggaagatgccttcttagatgctgtgatgttggagagagaagggatgggtatggaccagggtccccaggaaatgatcgacaggtacctgtcccttggagaacatgaccggaagcgcctggaagatgatgaagatcgcttgctggccacacttctgcacaacctcatctcctacatgctgctgatgaaggtaaataagaatgacatccgcaagaaggtgaggcgcctaatgggaaagtcgcacattgggcttgtgtacagccagcaaatcaatgaggtgcttgatcagctggcgaacctgaatggacgcgatctctctatctggtccagtggcagccggcacatgaagaagcagacatttgtggtacatgcagggacagatacaaacggagatatctttttcatggaggtgtgcgatgactgtgtggtgttgcgtagtaacatcggaacagtgtatgagcgctggtggtacgagaagctcatcaacatgacctactgtcccaagacgaaggtgttgtgcttgtggcgtagaaatggctctgagacccagctcaacaagttctatactaaaaagtgtcgggagctgtactactgtgtgaaggacagcatggagcgcgctgccgcccgacagcaaagcatcaaacccggacctgaattgggtggcgagttccctgtgcaggacctgaagactggtgagggtggcctgctgcaggtgaccctggaagggatcaacctcaaattcatgcacaatcaggttttcatagagctgaatcacattaaaaagtgcaatacagttcgaggcgtctttgtcctggaggaatttgttcctgaaattaaagaagtggtgagccacaagtacaagacaccaatggcccacgaaatctgctactccgtattatgtctcttctcgtacgtggctgcagttcatagcagtgaggaagatctcagaaccccgccccggcctgtctctagctgatggagaggggctacgcagctgccccagcccagggcacgcccctggccccttgctgttcccaagtgcacgatgctgctgtgactgaggagtggatgatgctcgtgtgtcctctgcaagccccctgctgtggcttggttggttaccggttatgtgtccctctgagtgtgtcttgagcgtgtccaccttctccctctccactcccagaagaccaaactgccttcccctcagggctcaagaatgtgtacagtctgtggggccggtgtgaacccactattttgtgtccttgagacatttgtgttgtggttccttgtccttgtccctggcgttataactgtccactgcaagagtctggctctcccttctctgtgacccggcatgactgggcgcctggagcagtttcactctgtgaggagtgagggaaccctggggctcaccctctcagaggaagggcacagagaggaagggaagaattggggggcagccggagtgagtggcagcctccctgcttccttctgcattcccaagccggcagctactgcccagggcccgcagtgttggctgctgcctgccacagcctctgtgactgcagtggagcggcgaattccctgtggcctgccacgccttcggcatcagaggatggagtggtcgaggctagtggagtcccagggaccgctggctgctctgcctgagcatcagggagggggcaggaaagaccaagctgggtttgcacatctgtctgcaggctgtctctccaggcacggggtgtcaggagggagagacagcctgggtatgggcaagaaatgactgtaaatatttcagccccacattatttatagaaaatgtacagttgtgtgaatgtgaaataaatgtcctcaactcccaaaaaaaaaaggtaaaaaatggaggaaatttaaa

SEQ ID NO: 316340 - DNA, 6095 bp, Homo sapiens
accgcggccgcgcgcccccctctgcccccgctgcccaggattggtaggctccaccgctcggcagccggcttccctgctcggacgccgagcaccgccaaagcgcacttcgattttcagaattcctcctgggaatgctgactccttgcttggtgccctgatgcttctctgagataaactgatgaattggaaccatggtgcaaaagaagaagttctgtcctcggttacttgactatctagtgatcgtaggggccaggcacccgagcagtgatagcgtggcccagactcctgaattgctacggcgataccccttggaggatcacactgagtttcccctgcccccagatgtagtgttcttctgccagcccgagggctgcctgagcgtgcggcagcggcgcatgagccttcgggatgatacctcttttgtcttcaccctcactgacaaggacactggagtcacgcgatatggcatctgtgttaacttctaccgctccttccaaaagcgaatctctaaggagaagggggaaggtggggcagggtcccgtgggaaggaaggaacccatgccacctgtgcctcagaagagggtggcactgagagctcagagagtggctcatccctgcagcctctcagtgctgactctacccctgatgtgaaccagtctcctcggggcaaacgccgggccaaggcggggagccgctcccgcaacagtactctcacgtccctgtgcgtgctcagccactaccctttcttctccaccttccgagagtgtttgtatactctcaagcgcctggtggactgctgtagtgagcgccttctgggcaagaaactgggcatccctcgaggcgtacaaagggacaccatgtggcggatctttactggatcgctgctggtagaggagaagtcaagtgcccttctgcatgaccttcgagagattgaggcctggatctatcgattgctgcgctccccagtacccgtctctgggcagaagcgagtagacatcgaggtcctaccccaagagctccagccagctctgacctttgctcttccagacccatctcgattcaccctagtggatttcccactgcaccttcccttggaacttctaggtgtggacgcctgtctccaggtgctaacctgcattctgttagagcacaaggtggtgctacagtcccgagactacaatgcactctccatgtctgtgatggcattcgtggcaatgatctacccactggaatatatgtttcctgtcatcccgctgctacccacctgcatggcatcagcagagcagctgctgttggctccaaccccgtacatcattggggttcctgccagcttcttcctctacaaactggacttcaaaatgcctgatgatgtatggctagtggatctggacagcaatagggtgattgcccccaccaatgcagaagtgctgcctatcctgccagaaccagaatcactagagctgaaaaagcatttaaagcaggccttggccagcatgagtctcaacacccagcccatcctcaatctggagaaatttcatgagggccaggagatcccccttctcttgggaaggccttctaatgacctgcagtccacaccgtccactgaattcaacccactcatctatggcaatgatgtggattctgtggatgttgcaaccagggttgccatggtacggttcttcaattccgccaacgtgctgcagggatttcagatgcacacgcgtaccctgcgcctctttcctcggcctgtggtagcttttcaagctggctcctttctagcctcacgtccccggcagactccttttgccgagaaattggccaggactcaggctgtggagtactttggggaatggatccttaaccccaccaactatgcctttcagcgaattcacaacaatatgtttgatccagccctgattggtgacaagccaaagtggtatgctcatcagctgcagcctatccactatcgcgtctatgacagcaattcccagctggctgaggccctgagtgtaccaccagagcgggactctgactccgaacctactgatgatagtggcagtgatagtatggattatgacgattcaagctcttcttactcctcccttggtgactttgtcagtgaaatgatgaaatgtgacattaatggtgatactcccaatgtggaccctctgacacatgcagcactgggggatgccagcgaggtggagattgacgagctgcagaatcagaaggaagcagaagagcctggcccagacagtgagaactctcaggaaaaccccccactgcgctccagctctagcaccacagccagcagcagccccagcactgtcatccacggagccaactctgaacctgctgactctacggagatggatgataaggcagcagtaggcgtctccaagcccctcccttccgtgcctcccagcattggcaaatcgaacgtggacagacgtcaggcagaaattggagaggggtcagtgcgccggcgaatctatgacaatccatacttcgagccccaatatggctttccccctgaggaagatgaggatgagcagggggaaagttacactccccgattcagccaacatgtcagtggcaatcggtgagagcctgggcatcccttctagatgggtgactgaaggacctcacctcagtggaccctgggcaagggttaatcagaaagtctgagaagtctgaatgctctcgtggtcctgccatccccagaggatggtgttctgatccaggggcttaggaattacgggaagggagtggcaactgtagtatagcataattatggcccatactcccaagatcaggtacccctgcctggggatcataggtgcctctgtgcattcaagggctcaaaagctgctgcggcccaacagcttgagactggcaagtgactcagatgcagagtcagactctcgggcaagctctcccaactccaccgtctccaacaccagcaccgagggcttcgggggcatcatgtcttttgccagcagcctctatcggaaccacagtaccagcttcagtctttcaaacctcacactgcccaccaaaggtgcccgagagaaggccacgcccttccccagtctgaaaggaaacaggagggcgttagtggatcagaagtcatctgtcattaaacacagcccaacagtgaaaagagaacctccatcaccccagggtcgatccagcaattctagtgagaaccagcagttcctgaaggaggtggtgcacagcgtgctggacggccagggagttggctggctcaacatgaaaaaggtgcgccggctgctggagagcgagcagctgcgagtctttgtcctgagcaagctgaaccgcatggtgcagtcagaggacgatgcccggcaggacatcatcccggatgtggagatcagtcggaaggtgtacaagggaatgttagacctcctcaagtgtacagtcctcagcttggagcagtcctatgcccacgcgggtctgggtggcatggccagcatctttgggcttttggagattgcccagacccactactatagtaaagaaccagacaagcggaagagaagtccaacagaaagtgtaaataccccagttggcaaggatcctggcctagctgggcggggggacccaaaggctatggcacaactgagagttccacaactgggacctcgggcaccaagtgccacaggaaagggtcctaaggaactggacaccagaagtttaaaggaagaaaattttatagcatctattgggcctgaagtaatcaaacctgtctttgaccttggtgagacagaggagaaaaagtcccagatcagcgcagacagtggtgtgagcctgacgtctagttcccagaggactgatcaagactctgtcatcggcgtgagtccagctgttatgatccgcagctcaagtcaggattctgaagttagcaccgtggtgagtaatagctctggagagacccttggagctgacagtgacttgagcagcaatgcaggtgatggaccaggtggcgagggcagtgttcacctggcaagctctcggggcactttgtctgatagtgaaattgagaccaactctgccacaagcaccatctttggtaaagcccacagcttgaagccaagcataaaggagaagctggcaggcagccccattcgtacttctgaagatgtgagccagcgagtctatctctatgagggactcctaggcaaagagcgttctactttatgggaccaaatgcaattctgggaagatgccttcttagatgctgtgatgttggagagagaagggatgggtatggaccagggtccccaggaaatgatcgacaggtacctgtcccttggagaacatgaccggaagcgcctggaagatgatgaagatcgcttgctggccacacttctgcacaacctcatctcctacatgctgctgatgaaggtaaataagaatgacatccgcaagaaggtgaggcgcctaatgggaaagtcgcacattgggcttgtgtacagccagcaaatcaatgaggtgcttgatcagctggcgaacctgaatggacgcgatctctctatctggtccagtggcagccggcacatgaagaagcagacatttgtggtacatgcagggacagatacaaacggagatatctttttcatggaggtgtgcgatgactgtgtggtgttgcgtagtaacatcggaacagtgtatgagcgctggtggtacgagaagctcatcaacatgacctactgtcccaagacgaaggtgttgtgcttgtggcgtagaaatggctctgagacccagctcaacaagttctatactaaaaagtgtcgggagctgtactactgtgtgaaggacagcatggagcgcgctgccgcccgacagcaaagcatcaaacccggacctgaattgggtggcgagttccctgtgcaggacctgaagactggtgagggtggcctgctgcaggtgaccctggaagggatcaacctcaaattcatgcacaatcaggttttcatagagctgaatcacattaaaaagtgcaatacagttcgaggcgtctttgtcctggaggaatttgttcctgaaattaaagaagtggtgagccacaagtacaagacaccaatggcccacgaaatctgctactccgtattatgtctcttctcgtacgtggctgcagttcatagcagtgaggaagatctcagaaccccgccccggcctgtctctagctgatggagaggggctacgcagctgccccagcccagggcacgcccctggccccttgctgttcccaagtgcacgatgctgctgtgactgaggagtggatgatgctcgtgtgtcctctgcaagccccctgctgtggcttggttggttaccggttatgtgtccctctgagtgtgtcttgagcgtgtccaccttctccctctccactcccagaagaccaaactgccttcccctcagggctcaagaatgtgtacagtctgtggggccggtgtgaacccactattttgtgtccttgagacatttgtgttgtggttccttgtccttgtccctggcgttataactgtccactgcaagagtctggctctcccttctctgtgacccggcatgactgggcgcctggagcagtttcactctgtgaggagtgagggaaccctggggctcaccctctcagaggaagggcacagagaggaagggaagaattggggggcagccggagtgagtggcagcctccctgcttccttctgcattcccaagccggcagctactgcccagggcccgcagtgttggctgctgcctgccacagcctctgtgactgcagtggagcggcgaattccctgtggcctgccacgccttcggcatcagaggatggagtggtcgaggctagtggagtcccagggaccgctggctgctctgcctgagcatcagggagggggcaggaaagaccaagctgggtttgcacatctgtctgcaggctgtctctccaggcacggggtgtcaggagggagagacagcctgggtatgggcaagaaatgactgtaaatatttcagccccacattatttatagaaaatgtacagttgtgtgaatgtgaaataaatgtcctcaactccc

SEQ ID NO: 316341 - DNA, 4289 bp, Homo sapiens
tataaaggttactcttctggtctctgtcttcaagttccctttgattgattcatgtaatctttgatgtacttcttgtaggcttcttttgtgaacttgttcctgcaggtgatggttcatgagggccaggagatcccccttctcttgggaaggccttctaatgacctgcagtccacaccgtccactgaattcaacccactcatctatggcaatgatgtggattctgtggatgttgcaaccagggttgccatggtacggttcttcaattccgccaacgtgctgcagggatttcagatgcacacgcgtaccctgcgcctctttcctcggcctgtggtagcttttcaagctggctcctttctagcctcacgtccccggcagactccttttgccgagaaattggccaggactcaggctgtggagtactttggggaatggatccttaaccccaccaactatgcctttcagcgaattcacaacaatatgtttgatccagccctgattggtgacaagccaaagtggtatgctcatcagctgcagcctatccactatcgcgtctatgacagcaattcccagctggctgaggccctgagtgtaccaccagagcgggactctgactccgaacctactgatgatagtggcagtgatagtatggattatgacgattcaagctcttcttactcctcccttggtgactttgtcagtgaaatgatgaaatgtgacattaatggtgatactcccaatgtggaccctctgacacatgcagcactgggggatgccagcgaggtggagattgacgagctgcagaatcagaaggaagcagaagagcctggcccagacagtgagaactctcaggaaaaccccccactgcgctccagctctagcaccacagccagcagcagccccagcactgtcatccacggagccaactctgaacctgctgactctacggagatggatgataaggcagcagtaggcgtctccaagcccctcccttccgtgcctcccagcattggcaaatcgaacgtggacagacgtcaggcagaaattggagagggggctcaaaagctgctgcggcccaacagcttgagactggcaagtgactcagatgcagagtcagactctcgggcaagctctcccaactccaccgtctccaacaccagcaccgagggcttcgggggcatcatgtcttttgccagcagcctctatcggaaccacagtaccagcttcagtctttcaaacctcacactgcccaccaaaggtgcccgagagaaggccacgcccttccccagtctgaaaggaaacaggagggcgttagtggatcagaagtcatctgtcattaaacacagcccaacagtgaaaagagaacctccatcaccccagggtcgatccagcaattctagtgagaaccagcagttcctgaaggaggtggtgcacagcgtgctggacggccagggagttggctggctcaacatgaaaaaggtgcgccggctgctggagagcgagcagctgcgagtctttgtcctgagcaagctgaaccgcatggtgcagtcagaggacgatgcccggcaggacatcatcccggatgtggagatcagtcggaaggtgtacaagggaatgttagacctcctcaagtgtacagtcctcagcttggagcagtcctatgcccacgcgggtctgggtggcatggccagcatctttgggcttttggagattgcccagacccactactatagtaaagaaccagacaagcggaagagaagtccaacagaaagtgtaaataccccagttggcaaggatcctggcctagctgggcggggggacccaaaggctatggcacaactgagagttccacaactgggacctcgggcaccaagtgccacaggaaagggtcctaaggaactggacaccagaagtttaaaggaagaaaattttatagcatctattgggcctgaagtaatcaaacctgtctttgaccttggtgagacagaggagaaaaagtcccagatcagcgcagacagtggtgtgagcctgacgtctagttcccagaggactgatcaagactctgtcatcggcgtgagtccagctgttatgatccgcagctcaagtcaggattctgaagttagcaccgtggtgagtaatagctctggagagacccttggagctgacagtgacttgagcagcaatgcaggtgatggaccaggtggcgagggcagtgttcacctggcaagctctcggggcactttgtctgatagtgaaattgagaccaactctgccacaagcaccatctttggtaaagcccacagcttgaagccaagcataaaggagaagctggcaggcagccccattcgtacttctgaagatgtgagccagcgagtctatctctatgagggactcctaggcaaagagcgttctactttatgggaccaaatgcaattctgggaagatgccttcttagatgctgtgatgttggagagagaagggatgggtatggaccagggtccccaggaaatgatcgacaggtacctgtcccttggagaacatgaccggaagcgcctggaagatgatgaagatcgcttgctggccacacttctgcacaacctcatctcctacatgctgctgatgaaggtaaataagaatgacatccgcaagaaggtgaggcgcctaatgggaaagtcgcacattgggcttgtgtacagccagcaaatcaatgaggtgcttgatcagctggcgaacctgaatggacgcgatctctctatctggtccagtggcagccggcacatgaagaagcagacatttgtggtacatgcagggacagatacaaacggagatatctttttcatggaggtgtgcgatgactgtgtggtgttgcgtagtaacatcggaacagtgtatgagcgctggtggtacgagaagctcatcaacatgacctactgtcccaagacgaaggtgttgtgcttgtggcgtagaaatggctctgagacccagctcaacaagttctatactaaaaagtgtcgggagctgtactactgtgtgaaggacagcatggagcgcgctgccgcccgacagcaaagcatcaaacccggacctgaattgggtggcgagttccctgtgcaggacctgaagactggtgagggtggcctgctgcaggtgaccctggaagggatcaacctcaaattcatgcacaatcaggttttcatagagctgaatcacattaaaaagtgcaatacagttcgaggcgtctttgtcctggaggaatttgttcctgaaattaaagaagtggtgagccacaagtacaagacaccaatggcccacgaaatctgctactccgtattatgtctcttctcgtacgtggctgcagttcatagcagtgaggaagatctcagaaccccgccccggcctgtctctagctgatggagaggggctacgcagctgccccagcccagggcacgcccctggccccttgctgttcccaagtgcacgatgctgctgtgactgaggagtggatgatgctcgtgtgtcctctgcaagccccctgctgtggcttggttggttaccggttatgtgtccctctgagtgtgtcttgagcgtgtccaccttctccctctccactcccagaagaccaaactgccttcccctcagggctcaagaatgtgtacagtctgtggggccggtgtgaacccactattttgtgtccttgagacatttgtgttgtggttccttgtccttgtccctggcgttataactgtccactgcaagagtctggctctcccttctctgtgacccggcatgactgggcgcctggagcagtttcactctgtgaggagtgagggaaccctggggctcaccctctcagaggaagggcacagagaggaagggaagaattggggggcagccggagtgagtggcagcctccctgcttccttctgcattcccaagccggcagctactgcccagggcccgcagtgttggctgctgcctgccacagcctctgtgactgcagtggagcggcgaattccctgtggcctgccacgccttcggcatcagaggatggagtggtcgaggctagtggagtcccagggaccgctggctgctctgcctgagcatcagggagggggcaggaaagaccaagctgggtttgcacatctgtctgcaggctgtctctccaggcacggggtgtcaggagggagagacagcctgggtatgggcaagaaatgactgtaaatatttcagccccacattatttatagaaaatgtacagttgtgtgaatgtgaaataaatgtcctcaactccc

SEQ ID NO: 316342 - DNA, 2720 bp, Homo sapiens
  misc_feature (49)..(52): n is a, c, g, or t
  misc_feature (57)..(57): n is a, c, g, or t
  misc_feature (67)..(67): n is a, c, g, or t
  misc_feature (79)..(79): n is a, c, g, or t
  misc_feature (82)..(83): n is a, c, g, or t
agctcggtaccctctgcgacacctcattgatttgctggctgtacacaannnnaatgngcgactttcncattaggcgccncannttcttgcggatgtcattcttatttaccttcatcagcagcatgtaggagatgaggttgtgcagaagtgtggccagcatctttgggcttttggagattgcccagacccactactatagtaaagaaccagacaagcggaagagaagtccaacagaaagtgtaaataccccagttggcaaggatcctggcctagctgggcggggggacccaaaggctatggcacaactgagagttccacaactgggacctcgggcaccaagtgccacaggaaagggtcctaaggaactggacaccagaagtttaaaggaagaaaattttatagcatctattgaggactgatcaagactctgtcatcggcgtgagtccagctgttatgatccgcagctcaagtcaggattctgaagttagcaccgtggtgagtaatagctctggagagacccttggagctgacagtgacttgagcagcaatgcaggtgatggaccaggtggcgagggcagtgttcacctggcaagctctcggggcactttgtctgatagtgaaattgagaccaactctgccacaagcaccatctttggtaaagcccacagcttgaagccaagcataaaggagaagctggcaggcagccccattcgtacttctgaagatgtgagccagcgagtctatctctatgagggactcctaggaagggacaaaggatccatgtgggaccagttagaggatgcagctatggagaccttttctataagcaaagagcgttctactttatgggaccaaatgcaattctgggaagatgccttcttagatgctgtgatgttggagagagaagggatgggtatggaccagggtccccaggaaatgatcgacaggtacctgtcccttggagaacatgaccggaagcgcctggaagatgatgaagatcgcttgctggccacacttctgcacaacctcatctcctacatgctgctgatgaaggtaaataagaatgacatccgcaagaaggtgaggcgcctaatgggaaagtcgcacattgggcttgtgtacagccagcaaatcaatgaggtgcttgatcagctggcgaacctgaatggacgcgatctctctatctggtccagtggcagccggcacatgaagaagcagacatttgtggtacatgcagggacagatacaaacggagatatctttttcatggaggtgtgcgatgactgtgtggtgttgcgtagtaacatcggaacagtgtatgagcgctggtggtacgagaagctcatcaacatgacctactgtcccaagacgaaggtgttgtgcttgtggcgtagaaatggctctgagacccagctcaacaagttctatactaaaaagtgtcgggagctgtactactgtgtgaaggacagcatggagcgcgctgccgcccgacagcaaagcatcaaacccggacctgaattgggtggcgagttccctgtgcaggacctgaagactggtgagggtggcctgctgcaggtgaccctggaagggatcaacctcaaattcatgcacaatcaggttttcatagagctgaatcacattaaaaagtgcaatacagttcgaggcgtctttgtcctggaggaatttgttcctgaaattaaagaagtggtgagccacaagtacaagacaccaatggcccacgaaatctgctactccgtattatgtctcttctcgtacgtggctgcagttcatagcagtgaggaagatctcagaaccccgccccggcctgtctctagctgatggagaggggctacgcagctgccccagcccagggcacgcccctggccccttgctgttcccaagtgcacgatgctgctgtgactgaggagtggatgatgctcgtgtgtcctctgcaagccccctgctgtggcttggttggttaccggttatgtgtccctctgagtgtgtcttgagcgtgtccaccttctccctctccactcccagaagaccaaactgccttcccctcagggctcaagaatgtgtacagtctgtggggccggtgtgaacccactattttgtgtccttgagacatttgtgttgtggttccttgtccttgtccctggcgttataactgtccactgcaagagtctggctctcccttctctgtgacccggcatgactgggcgcctggagcagtttcactctgtgaggagtgagggaaccctggggctcaccctctcagaggaagggcacagagaggaagggaagaattggggggcagccggagtgagtggcagcctccctgcttccttctgcattcccaagccggcagctactgcccagggcccgcagtgttggctgctgcctgccacagcctctgtgactgcagtggagcggcgaattccctgtggcctgccacgccttcggcatcagaggatggagtggtcgaggctagtggagtcccagggaccgctggctgctctgcctgagcatcagggagggggcaggaaagaccaagctgggtttgcacatctgtctgcaggctgtctctccaggcacggggtgtcaggagggagagacagcctgggtatgggcaagaaatgactgtaaatatttcagccccacattatttatagaaaatgtacagttgtgtgaatgtgaaataaatgtcctcaactccc

SEQ ID NO: 316343 - DNA, 1572 bp, Homo sapiens
ccacgagggtccgacatgtagcttaaatgtctgcgttgtatctgtccctgcatggacagatacaaaagatatctccgttgtatctgtccctgcatgtaccacaaatgtctgcttcttcatgtaggtgtgcgatgactgtgtggtgttgcgtagtaacatcggaacagtgtatgagcgctggtggtacgagaagctcatcaacatgacctactgtcccaagacgaaggtgttgtgcttgtggcgtagaaatggctctgagacccagctcaacaagttctatactaaaaagtgtcgggagctgtactactgtgtgaaggacagcatggagcgcgctgccgcccgacagcaaagcatcaaacccggacctgaattgggtggcgagttccctgtgcaggacctgaagactggtgagggtggcctgctgcaggtgaccctggaagggatcaacctcaaattcatgcacaatcaggttttcatagagctgaatcacattaaaaagtgcaatacagttcgaggcgtctttgtcctggaggaatttgttcctgaaattaaagaagtggtgagccacaagtacaagacaccaatggcccacgaaatctgctactccgtattatgtctcttctcgtacgtggctgcagttcatagcagtgaggaagatctcagaaccccgccccggcctgtctctagctgatggagaggggctacgcagctgccccagcccagggcacgcccctggccccttgctgttcccaagtgcacgatgctgctgtgactgaggagtggatgatgctcgtgtgtcctctgcaagccccctgctgtggcttggttggttaccggttatgtgtccctctgagtgtgtcttgagcgtgtccaccttctccctctccactcccagaagaccaaactgccttcccctcagggctcaagaatgtgtacagtctgtggggccggtgtgaacccactattttgtgtccttgagacatttgtgttgtggttccttgtccttgtccctggcgttataactgtccactgcaagagtctggctctcccttctctgtgacccggcatgactgggcgcctggagcagtttcactctgtgaggagtgagggaaccctggggctcaccctctcagaggaagggcacagagaggaagggaagaattggggggcagccggagtgagtggcagcctccctgcttccttctgcattcccaagccggcagctactgcccagggcccgcagtgttggctgctgcctgccacagcctctgtgactgcagtggagcggcgaattccctgtggcctgccacgccttcggcatcagaggatggagtggtcgaggctagtggagtcccagggaccgctggctgctctgcctgagcatcagggagggggcaggaaagaccaagctgggtttgcacatctgtctgcaggctgtctctccaggcacggggtgtcaggagggagagacagcctgggtatgggcaagaaatgactgtaaatatttcagccccacattatttatagaaaatgtacagttgtgtgaatgtgaaataaatgtcctcaactccc

SEQ ID NO: 316344 - DNA, 1174 bp, Homo sapiens
ccccgactagcccgacagcaaagcatcaaacccggacctgaattgggtggcgagttccctgtgcaggacctgaagactggtgagggtggcctgctgcaggtgaccctggaagggatcaacctcaaattcatgcacaatcagttcctgaaattaaagaagtggtgagccacaagtacaagacaccaatggcccacgaaatctgctactccgtattatgtctcttctcgtacgtggctgcagttcatagcagtgaggaagatctcagaaccccgccccggcctgtctctagctgatggagaggggctacgcagctgccccagcccagggcacgcccctggccccttgctgttcccaagtgcacgatgctgctgtgactgaggagtggatgatgctcgtgtgtcctctgcaagccccctgctgtggcttggttggttaccggttatgtgtccctctgagtgtgtcttgagcgtgtccaccttctccctctccactcccagaagaccaaactgccttcccctcagggctcaagaatgtgtacagtctgtggggccggtgtgaacccactattttgtgtccttgagacatttgtgttgtggttccttgtccttgtccctggcgttataactgtccactgcaagagtctggctctcccttctctgtgacccggcatgactgggcgcctggagcagtttcactctgtgaggagtgagggaaccctggggctcaccctctcagaggaagggcacagagaggaagggaagaattggggggcagccggagtgagtggcagcctccctgcttccttctgcattcccaagccggcagctactgcccagggcccgcagtgttggctgctgcctgccacagcctctgtgactgcagtggagcggcgaattccctgtggcctgccacgccttcggcatcagaggatggagtggtcgaggctagtggagtcccagggaccgctggctgctctgcctgagcatcagggagggggcaggaaagaccaagctgggtttgcacatctgtctgcaggctgtctctccaggcacggggtgtcaggagggagagacagcctgggtatgggcaagaaatgactgtaaatatttcagccccacattatttatagaaaatgtacagttgtgtgaatgtgaaataaatgtcctcaactccc

SEQ ID NO: 316345 - DNA, 1550 bp, Homo sapiens
cttcatccagcctcaagaccctctgtgtagggggctgggaataacgggaactgtgtttaacatgacccaattttcaggctggtgacgagttcacgggtgtctcagcaaagttggacacaagctagagagagctctctcctcccagccaaaacctgggaattccccactgcagctcctcaggggccctggacagtagctgtgaccaggctggtgaaaggcccgtccctcccatccagggctttcaaagaagtgggtagaatcacggccatcaagtaaacgccactgcggatgacagaggcctagctgaggaggctagggccatgtcctcccagctggcagagtctggacagagcctctggtggcctctgccctgtcatagcctaagctgctgcagccactgtgagaggccacagaggggaaggggaccctgacgccgggcgctgccgcctgggggagcatggcacgattgctcttagtgttgaactttctgttttgtctcttgcccgtccggttttagttcctgaaattaaagaagtggtgagccacaagtacaagacaccaatggcccacgaaatctgctactccgtattatgtctcttctcgtacgtggctgcagttcatagcagtgaggaagatctcagaaccccgccccggcctgtctctagctgatggagaggggctacgcagctgccccagcccagggcacgcccctggccccttgctgttcccaagtgcacgatgctgctgtgactgaggagtggatgatgctcgtgtgtcctctgcaagccccctgctgtggcttggttggttaccggttatgtgtccctctgagtgtgtcttgagcgtgtccaccttctccctctccactcccagaagaccaaactgccttcccctcagggctcaagaatgtgtacagtctgtggggccggtgtgaacccactattttgtgtccttgagacatttgtgttgtggttccttgtccttgtccctggcgttataactgtccactgcaagagtctggctctcccttctctgtgacccggcatgactgggcgcctggagcagtttcactctgtgaggagtgagggaaccctggggctcaccctctcagaggaagggcacagagaggaagggaagaattggggggcagccggagtgagtggcagcctccctgcttccttctgcattcccaagccggcagctactgcccagggcccgcagtgttggctgctgcctgccacagcctctgtgactgcagtggagcggcgaattccctgtggcctgccacgccttcggcatcagaggatggagtggtcgaggctagtggagtcccagggaccgctggctgctctgcctgagcatcagggagggggcaggaaagaccaagctgggtttgcacatctgtctgcaggctgtctctccaggcacggggtgtcaggagggagagacagcctgggtatgggcaagaaatgactgtaaatatttcagccccacattatttatagaaaatgtacagttgtgtgaatgtgaaataaatgtcctcaactccc

SEQ ID NO: 316346 - DNA, 5391 bp, Homo sapiens
accgcggccgcgcgcccccctctgcccccgctgcccaggattggtaggctccaccgctcggcagccggcttccctgctcggacgccgagcaccgccaaagcgcacttcgattttcagaattcctcctgggaatgctgactccttgcttggtgccctgatgcttctctgagataaactgatgaattggaaccatggtgcaaaagaagaagttctgtcctcggttacttgactatctagtgatcgtaggggccaggcacccgagcagtgatagcgtggcccagactcctgaattgctacggcgataccccttggaggatcacactgagtttcccctgcccccagatgtagtgttcttctgccagcccgagggctgcctgagcgtgcggcagcggcgcatgagccttcgggatgatacctcttttgtcttcaccctcactgacaaggacactggagtcacgcgatatggcatctgtgttaacttctaccgctccttccaaaagcgaatctctaaggagaagggggaaggtggggcagggtcccgtgggaaggaaggaacccatgccacctgtgcctcagaagagggtggcactgagagctcagagagtggctcatccctgcagcctctcagtgctgactctacccctgatgtgaaccagtctcctcggggcaaacgccgggccaaggcggggagccgctcccgcaacagtactctcacgtccctgtgcgtgctcagccactaccctttcttctccaccttccgagagtgtttgtatactctcaagcgcctggtggactgctgtagtgagcgccttctgggcaagaaactgggcatccctcgaggcgtacaaagggacaccatgtggcggatctttactggatcgctgctggtagaggagaagtcaagtgcccttctgcatgaccttcgagagattgaggcctggatctatcgattgctgcgctccccagtacccgtctctgggcagaagcgagtagacatcgaggtcctaccccaagagctccagccagctctgacctttgctcttccagacccatctcgattcaccctagtggatttcccactgcaccttcccttggaacttctaggtgtggacgcctgtctccaggtgctaacctgcattctgttagagcacaaggtggtgctacagtcccgagactacaatgcactctccatgtctgtgatggcattcgtggcaatgatctacccactggaatatatgtttcctgtcatcccgctgctacccacctgcatggcatcagcagagcagctgctgttggctccaaccccgtacatcattggggttcctgccagcttcttcctctacaaactggacttcaaaatgcctgatgatgtatggctagtggatctggacagcaatagggtgattgcccccaccaatgcagaagtgctgcctatcctgccagaaccagaatcactagagctgaaaaagcatttaaagcaggccttggccagcatgagtctcaacacccagcccatcctcaatctggagaaatttcatgagggccaggagatcccccttctcttgggaaggccttctaatgacctgcagtccacaccgtccactgaattcaacccactcatctatggcaatgatgtggattctgtggatgttgcaaccagggttgccatggtacggttcttcaattccgccaacgtgctgcagggatttcagatgcacacgcgtaccctgcgcctctttcctcggcctgtggtagcttttcaagctggctcctttctagcctcacgtccccggcagactccttttgccgagaaattggccaggactcaggctgtggagtactttggggaatggatccttaaccccaccaactatgcctttcagcgaattcacaacaatatgtttgatccagccctgattggtgacaagccaaagtggtatgctcatcagctgcagcctatccactatcgcgtctatgacagcaattcccagctggctgaggccctgagtgtaccaccagagcgggactctgactccgaacctactgatgatagtggcagtgatagtatggattatgacgattcaagctcttcttactcctcccttggtgactttgtcagtgaaatgatgaaatgtgacattaatggtgatactcccaatgtggaccctctgacacatgcagcactgggggatgccagcgaggtggagattgacgagctgcagaatcagaaggaagcagaagagcctggcccagacagtgagaactctcaggaaaaccccccactgcgctccagctctagcaccacagccagcagcagccccagcactgtcatccacggagccaactctgaacctgctgactctacggagatggatgataaggcagcagtaggcgtctccaagcccctcccttccgtgcctcccagcattggcaaatcgaacgtggacagacgtcaggcagaaattggagagggggctcaaaagctgctgcggcccaacagcttgagactggcaagtgactcagatgcagagtcagactctcgggcaagctctcccaactccaccgtctccaacaccagcaccgagggcttcgggggcatcatgtcttttgccagcagcctctatcggaaccacagtaccagcttcagtctttcaaacctcacactgcccaccaaaggtgcccgagagaaggccacgcccttccccagtctgaaaggaaacaggagggcgttagtggatcagaagtcatctgtcattaaacacagcccaacagtgaaaagagaacctccatcaccccagggtcgatccagcaattctagtgagaaccagcagttcctgaaggaggtggtgcacagcgtgctggacggccagggagttggctggctcaacatgaaaaaggtgcgccggctgctggagagcgagcagctgcgagtctttgtcctgagcaagctgaaccgcatggtgcagtcagaggacgatgcccggcaggacatcatcccggatgtggagatcagtcggaaggtgtacaagggaatgttagacctcctcaagtgtacagtcctcagcttggagcagtcctatgcccacgcgggtctgggtggcatggccagcatctttgggcttttggagattgcccagacccactactatagtaaagaaccagacaagcggaagagaagtccaacagaaagtgtaaataccccagttggcaaggatcctggcctagctgggcggggggacccaaaggctatggcacaactgagagttccacaactgggacctcgggcaccaagtgccacaggaaagggtcctaaggaactggacaccagaagtttaaaggaagaaaattttatagcatctattgggcctgaagtaatcaaacctgtctttgaccttggtgagacagaggagaaaaagtcccagatcagcgcagacagtggtgtgagcctgacgtctagttcccagaggactgatcaagactctgtcatcggcgtgagtccagctgttatgatccgcagctcaagtcaggattctgaagttagcaccgtggtgagtaatagctctggagagacccttggagctgacagtgacttgagcagcaatgcaggtgatggaccaggtggcgagggcagtgttcacctggcaagctctcggggcactttgtctgatagtgaaattgagaccaactctgccacaagcaccatctttggtaaagcccacagcttgaagccaagcataaaggagaagctggcaggcagccccattcgtacttctgaagatgtgagccagcgagtctatctctatgagggactcctaggcaaagagcgttctactttatgggaccaaatgcaattctgggaagatgccttcttagatgctgtgatgttggagagagaagggatgggtatggaccagggtccccaggaaatgatcgacaggtacctgtcccttggagaacatgaccggaagcgcctggaagatgatgaagatcgcttgctggccacacttctgcacaacctcatctcctacatgctgctgatgaaggtaaataagaatgacatccgcaagaaggtgaggcgcctaatgggaaagtcgcacattgggcttgtgtacagccagcaaatcaatgaggtgcttgatcagctggcgaacctgaatggacgcgatctctctatctggtccagtggcagccggcacatgaagaagcagacatttgtggtacatgcagggacagatacaaacggagatatctttttcatggaggtgtgcgatgactgtgtggtgttgcgtagtaacatcggaacagtgtatgagcgctggtggtacgagaagctcatcaacatgacctactgtcccaagacgaaggtgttgtgcttgtggcgtagaaatggctctgagacccagctcaacaagttctatactaaaaagtgtcgggagctgtactactgtgtgaaggacagcatggagcgcgctgccgcccgacagcaaagcatcaaacccggacctgaattgggtggcgagttccctgtgcaggacctgaagactggtgagggtggcctgctgcaggtgaccctggaagggatcaacctcaaattcatgcacaatcaggttttcatagagctgaatcacattaaaaagtgcaatacagttcgaggcgtctttgtcctggaggaatttggtaattacactattttgctcttaggtctggactcacatggcagtaactcaaacctcggagctccagaggagggtctaggggcagggagaagaagaacctctgtagagaagtcaggaggagcaggagtgacaaggaagaaaagggacccctgagatgagagccgggatgtggaagggaaagatagataatggatcgcagaagagcaatggggcctcaggtgggtttcgagtttagaggtggtcctgaagcagctcagtgaagtagcaccacctccccgtgctgggccagccagtggtcagaaagtttgggacacagcagactggcgacccccaagctccactatgtccatgtcacctgctgcaatctctctagcagcccagtgcgctagccagcctccctggcgccgctctggtctccacctggcctctgtgccagacaaaggggcaccgggcgtcgcaggcagactcacttgagggacagaggagtctagcgggacagctgtagccggaagctgggagccagcgctagggagtggtgtagtgggttctcaccctggggctttgagttcctgctgtgtttgtgcttcattcttttgtgcccctcatcgctgctatgaaaaccttcgttctccagcaggtaaagtgacctcggctcgtgctgcctctccccaggtctctgccttgggccctgccctgggtgggtagctcccatcga

SEQ ID NO: 316347 - DNA, 3098 bp, Homo sapiens
accgcggccgcgcgcccccctctgcccccgctgcccaggattggtaggctccaccgctcggcagccggcttccctgctcggacgccgagcaccgccaaagcgcacttcgattttcagaattcctcctgggaatgctgactccttgcttggtgccctgatgcttctctgagataaactgatgaattggaaccatggtgcaaaagaagaagttctgtcctcggttacttgactatctagtgatcgtaggggccaggcacccgagcagtgatagcgtggcccagactcctgaattgctacggcgataccccttggaggatcacactgagtttcccctgcccccagatgtagtgttcttctgccagcccgagggctgcctgagcgtgcggcagcggcgcatgagccttcgggatgatacctcttttgtcttcaccctcactgacaaggacactggagtcacgcgatatggcatctgtgttaacttctaccgctccttccaaaagcgaatctctaaggagaagggggaaggtggggcagggtcccgtgggaaggaaggaacccatgccacctgtgcctcagaagagggtggcactgagagctcagagagtggctcatccctgcagcctctcagtgctgactctacccctgatgtgaaccagtctcctcggggcaaacgccgggccaaggcggggagccgctcccgcaacagtactctcacgtccctgtgcgtgctcagccactaccctttcttctccaccttccgagagtgtttgtatactctcaagcgcctggtggactgctgtagtgagcgccttctgggcaagaaactgggcatccctcgaggcgtacaaagggacaccatgtggcggatctttactggatcgctgctggtagaggagaagtcaagtgcccttctgcatgaccttcgagagattgaggcctggatctatcgattgctgcgctccccagtacccgtctctgggcagaagcgagtagacatcgaggtcctaccccaagagctccagccagctctgacctttgctcttccagacccatctcgattcaccctagtggatttcccactgcaccttcccttggaacttctaggtgtggacgcctgtctccaggtgctaacctgcattctgttagagcacaaggtggtgctacagtcccgagactacaatgcactctccatgtctgtgatggcattcgtggcaatgatctacccactggaatatatgtttcctgtcatcccgctgctacccacctgcatggcatcagcagagcagctgctgttggctccaaccccgtacatcattggggttcctgccagcttcttcctctacaaactggacttcaaaatgcctgatgatgtatggctagtggatctggacagcaatagggtgattgcccccaccaatgcagaagtgctgcctatcctgccagaaccagaatcactagagctgaaaaagcatttaaagcaggccttggccagcatgagtctcaacacccagcccatcctcaatctggagaaatttcatgagggccaggagatcccccttctcttgggaaggccttctaatgacctgcagtccacaccgtccactgaattcaacccactcatctatggcaatgatgtggattctgtggatgttgcaaccagggttgccatggtacggttcttcaattccgccaacgtgctgcagggatttcagatgcacacgcgtaccctgcgcctctttcctcggcctgtggtagcttttcaagctggctcctttctagcctcacgtccccggcagactccttttgccgagaaattggccaggactcaggctgtggagtactttggggaatggatccttaaccccaccaactatgcctttcagcgaattcacaacaatatgtttgatccagccctgattggtgacaagccaaagtggtatgctcatcagctgcagcctatccactatcgcgtctatgacagcaattcccagctggctgaggccctgagtgtaccaccagagcgggactctgactccgaacctactgatgatagtggcagtgatagtatggattatgacgattcaagctcttcttactcctcccttggtgactttgtcagtgaaatgatgaaatgtgacattaatggtgatactcccaatgtggaccctctgacacatgcagcactgggggatgccagcgaggtggagattgacgagctgcagaatcagaaggaagcagaagagcctggcccagacagtgagaactctcaggaaaaccccccactgcgctccagctctagcaccacagccagcagcagccccagcactgtcatccacggagccaactctgaacctgctgactctacggagatggatgataaggcagcagtaggcgtctccaagcccctcccttccgtgcctcccagcattggcaaatcgaacgtggacagacgtcaggcagaaattggagaggggtcagtgcgccggcgaatctatgacaatccatacttcgagccccaatatggctttccccctgaggaagatgaggatgagcagggggaaagttacactccccgattcagccaacatgtcagtggcaatcgggctcaaaagctgctgcggcccaacagcttgagactggcaagtgactcagatgcagagtcagactctcgggcaagctctcccaactccaccgtctccaacaccagcaccgagggcttcgggggcatcatgtcttttgccagcagcctctatcggaaccacagtaccatgttggctgctgcctgccacagcctctgtgactgcagtggagcggcgaattccctgtggcctgccacgccttcggcatcagaggatggagtggtcgaggctagtggagtcccagggaccgctggctgctctgcctgagcatcagggagggggcaggaaagaccaagctgggtttgcacatctgtctgcaggctgtctctccaggcacggggtgtcaggagggagagacagcctgggtatgggcaagaaatgactgtaaatatttcagccccacattatttatagaaaatgtacagttgtgtgaatgtgaaataaatgtcctcaactccc

SEQ ID NO: 316348 - DNA, 215 bp, Homo sapiens
gtgagtctacctgccctctgctccgctctgccttgtgcctctgtcctcctgatggactttgatttttcctttgctaatgtttgacctgtgccttctatcctggctctgctttagactttttcctgcctttctttcaggcgttgcttgcctttttttccttgctgctgactttctgttcttttccctcatggggtagatatgtttgatccagccct

SEQ ID NO: 316349 - DNA, 300 bp, Homo sapiens
agaggccagttttaagggtggtcttttcttagagccttggttgtctcctggtcacttggcttccagctctgaggtgcccaagaaccaaggttatgtgcattcctcaagctttgggagaatgctcagattatctggcttactgctcctcggaggggtagaggggttgcggtattgtggtacacctactaattgtgtattttgtgtcccagtatttgggctaaatactctaatggagattgttactgaagccggccccgggagtggtgaaggtgggtcttgcctgtgagctgtgcatgatct

SEQ ID NO: 316350 - DNA, 407 bp, Homo sapiens
cgtgggaaggaaggaacccatgccacctgtgcctcagaagagggtggcactgagagctcagagagtggctcatccctgcagcctctcagtgctgactctacccctgatgtgaaccagtctcctcggggcaaacgccgggccaaggcggggagccgctcccgcaacagtactctcacgtccctgtgcgtgctcagccactaccctttcttctccaccttccgagagtgtttgtatactctcaagcgcctggtggactgctgtagtgagcgccttctgggcaagaaactgggcatccctcgaggcgtacaaaggtacagtttgctgctgatgcctaatgggggaagcatttagagattccatgtaattggtctttgaggggcataggaaatttcctctacagctcaagg

SEQ ID NO: 316351 - DNA, 559 bp, Homo sapiens
caggcagcacccatattttccaaggtgttacagtcaggttactttatccaaaatagcatcttgagctttatttgttgactgtggttaaaatttgatagcccattccatcccttcaggctgctgaatttgtctttatgttcttcaggcacccgagcagtgatagcgtggcccagactcctgaattgctacggcgataccccttggaggatcacactgagtttcccctgcccccagatgtagtgttcttctgccagcccgagggctgcctgagcgtgcggcagcggcgcatgagccttcgggatgatacctcttttgtcttcaccctcactgacaaggacactggagtcacgcgatatggcatctgtgttaacttctaccgctccttccaaaagcgaatctctaaggagaagggggaaggtggggcagggtcccgtgggaaggaaggaacccatgccacctgtgcctcagaagagggtggcactgagagctcagagagtggctcatccctgcagcctctcagtgctgactctacccctgatgtgaaccagtctcctcgggg

SEQ ID NO: 316352 - DNA, 562 bp, Homo sapiens
agtgaggcgtggggagtggttggaggtgaggatgagtcaacaggttggggcccaaaggcacagcgatcctgttctcagattgtgcatgagcagccgagcctgctaaccgcagctccgcacttgtccatccccctgcggctacaccatgtccagctcctacgatgaggcctcactggcgccagaggagaccaccgacagcttctgggaggtggggaactacaagcggaccgtgaagcgcatcgatgacggccaccgtctatgcaacgacctgatgaactgcgtgcaggagcgcgccaagatcgagaaggcgtacgggcagcagctcaccgactgggccaagcgttggcgccagctcatcgagaaaggtgctcccccaggctcacatcgtgcgcgcccccaggccgtcacgagccccctaggtctgggtcctaggagccccggctacttgcatgcaccatgccctccatctaccagacacaggacattttcaggcgctgttccctcctagatcaaaccaggcctacctgttcatctctattttgtacaattttaggttgaatta

SEQ ID NO: 316353 - DNA, 4237 bp, Homo sapiens
  misc_feature (1)..(1): n is a, c, g, or t
  misc_feature (20)..(20): n is a, c, g, or t
  misc_feature (54)..(54): n is a, c, g, or t
  misc_feature (99)..(99): n is a, c, g, or t
nagagcgacgcggtggcggnggcagcgccagccccctcctcccccgggaagtcngccgggcttgaggccgggccccagacgtcccgcttcgccccgagncgccgccgatggtccccggagctcctgcccccagtgcatgagcagccgagcctgctaaccgcagctccgcacttgtccatccccctgcggctacaccatgtccagctcctacgatgaggcctcactggcgccagaggagaccaccgacagcttctgggaggtggggaactacaagcggaccgtgaagcgcatcgatgacggccaccgtctatgcaacgacctgatgaactgcgtgcaggagcgcgccaagatcgagaaggcgtacgggcagcagctcaccgactgggccaagcgttggcgccagctcatcgagaaaggcccacagtatggcagcctggagcgggcctggggtgccataatgacagaggcagacaaggtgagcgagctgcaccaggaggtgaagaacaatctgctgaatgaggacctggagaaggtgaagaactggcagaaggacgcctatcacaagcagatcatgggtggcttcaaggagacgaaggaggctgaagatggcttccgcaaggcccagaagccttgggccaagaagatgaaggagctggaggcagccaagaaggcctaccatttggcttgcaaagaggaaaagctggccatgacacgggagatgaacagcaagacggagcaatcggtcacacctgagcagcaaaagaagctgcaggacaaagtggacaagtgcaagcaggatgtgcagaagacacaggagaagtatgagaaagtgctggaagatgtgggcaagaccacaccccagtacatggagaacatggagcaggtgtttgagcaatgccagcaatttgaggaaaagcggctggtcttcctcaaggaggtgctgctggacatcaaacggcacctcaacctggctgagaacagcagctacatccatgtgtaccgtgagctggagcaggccatccggggggctgatgcccaggaagacctcagatggttccgcagcaccagtggccccggcatgcccatgaactggccccagtttgaggagtggaacccagaccttcctcacaccaccaccaagaaggagaaacagcctaagaaggcagagggagtggcgctgaccaatgccactggggcggtagagtccacatcccaggctggggaccgcggcagtgttagcagctacgacagaggccagccctacgccaccgagtggtcagacgacgagagtgggaacccctttgggggcagtgagaccaacgggggcgccaacccctttgaggacgactccaagggagtgcgcgtgcgggcactctacgactatgacggccaggagcaggacgagctcagctttaaggccggagacgaactcaccaagctgggcgaggaggatgagcagggctggtgccgtgggcggctggacagcgggcagctgggcctctaccctgccaactacgtggaggctatctagaggccccctccctccatactcccgtcactcctccccactgccgcccctcccctcccactctcgtctccttcccctcgccatagagttccagacatattttccgatcaagcttttatttttttaaaagtcaaaacagaacaaaacaaagtatgcagagacagagcatttgcagggccacctggaggctggggtgctggggcttggggtggccccagggtaggtaacagtcttaggacttagcccaacatcacaacatctgctcttcgggttccaccaaagagtctcctgagccctgagggatggatgtctcctgacccttccaccccgcctcactccctccgtcccactccactccaggctgccggcacctgccccattccctggcctggtttcctaacctcttcttcctcccctgccctgcttcccttcctccaccaccctgctctcaaaggcctcctctccagacccctggaagggaggcttccccatctttagttttccactctgccccggggagcacccttctactcctagccacgtcccttgggaccggtgggactggaggaggaacggtcaccctcctcccccatggaggtttccaggggtcccccagacatgaaagaggggtgagctggaggaagtcatggtgtcactggggtacaggagggtgaatgaagggcatgcaggccctcagcccgggctgtgccagccctcccagccccaggcccatctgagggaccaagacgctgttacgcaggcccttctttccagctatcagcactttcagcatcggctcttcagcagatccaaaccccctcagcaacttgcagaggacctgtcccctctcaaaagtcccctggcctagggtggggacccccaaacctacggcaaagccagcaacagtagcagcctgctcccatttgctggggaggagatcatcttgttcccctggccccccactctccctccatgtccatccaaaaaccataaaatcactgggttccacatcagcctccatgaggccaagccttgtacctgcaaggctcttggcctaaccattcctctgtcctcttctctggcctgcctggggagcccgtgaaggccgcacgggtgcctccagcctgagacatcaggggagagcctgcagctgagttcagcagaaaggaggaatcctggccctcaggaagaagatagtcacatgtttttcttccttgtccccacagcccccagaacaacattctccctgctggcagcccttccatgtctccaaacctgggtcagagtgaaaggacctttgggggtgggtgggagcaaagggcccacctgctggttggtgaaagcagtggtgccggagtgctaggtaccgcacgagagggtgcgggggcttgggaagcagaccagggttggacaaaaccccatgagggcggggagctggaagaaaagtctcttggggacctctggggcaaggagctgagaagtcctgcagcaccaggtgagacttgcttacagtggatgccacttctaggcctctggaccgcagatgccctcctccctcctgcacacctggcctcctgggcctccaggtaaagagagagagccagcccagccctgtttcccctcagtcctcctttgctcctgctgcttctcccaacagcccactgttaggaggtagtagaccccagcctcaaggctctgaccttcttcatgtgggcacagagggtcctgacactctggcagggcctgagctggggcaggcctccctcagggccaggggcgatggcaccccggggacaggcagacctccttcctgccgtcagcacccccttccttatcactgtctggtctccgagcttcggctgcagcctgaggtgtgtcctgggctcctcagagcctgaagcaagcttttggaagcctgcagtcctcccagctccagtgcagaagcctctctctccagcctttccccaggcaggagttggggttgggggcctctgtccctcatcgcttaccttggaaaggtgggaagctggcaatctgcaccttggggcctgggctccccctctctgtgccagcggcttcccagcacctgggaggggctgcagccccagctggactccagcctgtccctcttagcactctagctgcccactccagggcagggactcgaaaccccctccgtcctgagcagccacctccagggccctgtttgggaccactctctcagtccccaggtcctcagggccccagagcgggagggtctcctacctggaagtccccctgagctccagggcccagccctacctgccagtgctggtgtcagggcactcaacaccgagtgtgggggccacgccccttgccatgcccacggcctcctcctgtagcccctgcctgcacccacgatgctgcacgggcccgccctggtggggctcggcgagtaatgtgttttgtccccagttaaccaccattctgcggcctggttctgcaaggaaccagggctgccccaccgcccgccgtctgccgccctaggcttcctgactccattagttccgacacttgtgaaactccgagaagtgctgtggtctcagcaatgcacctgttttgtacatgattgtgtaatttaaaggtatataaatacaaatatatatatatatcagttgtgattgtatgactgtggataaaatccagaactgtgtcaacctggctgcgcat

SEQ ID NO: 316354 - DNA, 4286 bp, Homo sapiens
gccttcctgagtgagcggtggagggaaccctagaggacagagcccccagcccggcagcaggccccctctccgcccgccaccacggaggagaaggaggacagccagcccctccagccctggcctggcccagcgggggcagtaagctcctacttgcccccagcttggtgcccacacgggcccagtgcatgagcagccgagcctgctaaccgcagctccgcacttgtccatccccctgcggctacaccatgtccagctcctacgatgaggcctcactggcgccagaggagaccaccgacagcttctgggaggtggggaactacaagcggaccgtgaagcgcatcgatgacggccaccgtctatgcaacgacctgatgaactgcgtgcaggagcgcgccaagatcgagaaggcgtacgggcagcagctcaccgactgggccaagcgttggcgccagctcatcgagaaaggcccacagtatggcagcctggagcgggcctggggtgccataatgacagaggcagacaaggtgagcgagctgcaccaggaggtgaagaacaatctgctgaatgaggacctggagaaggtgaagaactggcagaaggacgcctatcacaagcagatcatgggtggcttcaaggagacgaaggaggctgaagatggcttccgcaaggcccagaagccttgggccaagaagatgaaggagctggaggcagccaagaaggcctaccatttggcttgcaaagaggaaaagctggccatgacacgggagatgaacagcaagacggagcaatcggtcacacctgagcagcaaaagaagctgcaggacaaagtggacaagtgcaagcaggatgtgcagaagacacaggagaagtatgagaaagtgctggaagatgtgggcaagaccacaccccagtacatggagaacatggagcaggtgtttgagcaatgccagcaatttgaggaaaagcggctggtcttcctcaaggaggtgctgctggacatcaaacggcacctcaacctggctgagaacagcagctacatccatgtgtaccgtgagctggagcaggccatccggggggctgatgcccaggaagacctcagatggttccgcagcaccagtggccccggcatgcccatgaactggccccagtttgaggagtggaacccagaccttcctcacaccaccaccaagaaggagaaacagcctaagaaggcagagggagtggcgctgaccaatgccactggggcggtagagtccacatcccaggctggggaccgcggcagtgttagcagctacgacagaggccagccctacgccaccgagtggtcagacgacgagagtgggaacccctttgggggcagtgagaccaacgggggcgccaacccctttgaggacgactccaagggagtgcgcgtgcgggcactctacgactatgacggccaggagcaggacgagctcagctttaaggccggagacgaactcaccaagctgggcgaggaggatgagcagggctggtgccgtgggcggctggacagcgggcagctgggcctctaccctgccaactacgtggaggctatctagaggccccctccctccatactcccgtcactcctccccactgccgcccctcccctcccactctcgtctccttcccctcgccatagagttccagacatattttccgatcaagcttttatttttttaaaagtcaaaacagaacaaaacaaagtatgcagagacagagcatttgcagggccacctggaggctggggtgctggggcttggggtggccccagggtaggtaacagtcttaggacttagcccaacatcacaacatctgctcttcgggttccaccaaagagtctcctgagccctgagggatggatgtctcctgacccttccaccccgcctcactccctccgtcccactccactccaggctgccggcacctgccccattccctggcctggtttcctaacctcttcttcctcccctgccctgcttcccttcctccaccaccctgctctcaaaggcctcctctccagacccctggaagggaggcttccccatctttagttttccactctgccccggggagcacccttctactcctagccacgtcccttgggaccggtgggactggaggaggaacggtcaccctcctcccccatggaggtttccaggggtcccccagacatgaaagaggggtgagctggaggaagtcatggtgtcactggggtacaggagggtgaatgaagggcatgcaggccctcagcccgggctgtgccagccctcccagccccaggcccatctgagggaccaagacgctgttacgcaggcccttctttccagctatcagcactttcagcatcggctcttcagcagatccaaaccccctcagcaacttgcagaggacctgtcccctctcaaaagtcccctggcctagggtggggacccccaaacctacggcaaagccagcaacagtagcagcctgctcccatttgctggggaggagatcatcttgttcccctggccccccactctccctccatgtccatccaaaaaccataaaatcactgggttccacatcagcctccatgaggccaagccttgtacctgcaaggctcttggcctaaccattcctctgtcctcttctctggcctgcctggggagcccgtgaaggccgcacgggtgcctccagcctgagacatcaggggagagcctgcagctgagttcagcagaaaggaggaatcctggccctcaggaagaagatagtcacatgtttttcttccttgtccccacagcccccagaacaacattctccctgctggcagcccttccatgtctccaaacctgggtcagagtgaaaggacctttgggggtgggtgggagcaaagggcccacctgctggttggtgaaagcagtggtgccggagtgctaggtaccgcacgagagggtgcgggggcttgggaagcagaccagggttggacaaaaccccatgagggcggggagctggaagaaaagtctcttggggacctctggggcaaggagctgagaagtcctgcagcaccaggtgagacttgcttacagtggatgccacttctaggcctctggaccgcagatgccctcctccctcctgcacacctggcctcctgggcctccaggtaaagagagagagccagcccagccctgtttcccctcagtcctcctttgctcctgctgcttctcccaacagcccactgttaggaggtagtagaccccagcctcaaggctctgaccttcttcatgtgggcacagagggtcctgacactctggcagggcctgagctggggcaggcctccctcagggccaggggcgatggcaccccggggacaggcagacctccttcctgccgtcagcacccccttccttatcactgtctggtctccgagcttcggctgcagcctgaggtgtgtcctgggctcctcagagcctgaagcaagcttttggaagcctgcagtcctcccagctccagtgcagaagcctctctctccagcctttccccaggcaggagttggggttgggggcctctgtccctcatcgcttaccttggaaaggtgggaagctggcaatctgcaccttggggcctgggctccccctctctgtgccagcggcttcccagcacctgggaggggctgcagccccagctggactccagcctgtccctcttagcactctagctgcccactccagggcagggactcgaaaccccctccgtcctgagcagccacctccagggccctgtttgggaccactctctcagtccccaggtcctcagggccccagagcgggagggtctcctacctggaagtccccctgagctccagggcccagccctacctgccagtgctggtgtcagggcactcaacaccgagtgtgggggccacgccccttgccatgcccacggcctcctcctgtagcccctgcctgcacccacgatgctgcacgggcccgccctggtggggctcggcgagtaatgtgttttgtccccagttaaccaccattctgcggcctggttctgcaaggaaccagggctgccccaccgcccgccgtctgccgccctaggcttcctgactccattagttccgacacttgtgaaactccgagaagtgctgtggtctcagcaatgcacctgttttgtacatgattgtgtaatttaaaggtatataaatacaaatatatatatatatcagttgtgattgtatgactgtggataaaatccagaactgtgtcaacctggctgcgcat

SEQ ID NO: 316355 - DNA, 4186 bp, Homo sapiens
agtgaggcgtggggagtggttggaggtgaggatgagtcaacaggttggggcccaaaggcacagcgatcctgttctcagattgtgcatgagcagccgagcctgctaaccgcagctccgcacttgtccatccccctgcggctacaccatgtccagctcctacgatgaggcctcactggcgccagaggagaccaccgacagcttctgggaggtggggaactacaagcggaccgtgaagcgcatcgatgacggccaccgtctatgcaacgacctgatgaactgcgtgcaggagcgcgccaagatcgagaaggcgtacgggcagcagctcaccgactgggccaagcgttggcgccagctcatcgagaaaggcccacagtatggcagcctggagcgggcctggggtgccataatgacagaggcagacaaggtgagcgagctgcaccaggaggtgaagaacaatctgctgaatgaggacctggagaaggtgaagaactggcagaaggacgcctatcacaagcagatcatgggtggcttcaaggagacgaaggaggctgaagatggcttccgcaaggcccagaagccttgggccaagaagatgaaggagctggaggcagccaagaaggcctaccatttggcttgcaaagaggaaaagctggccatgacacgggagatgaacagcaagacggagcaatcggtcacacctgagcagcaaaagaagctgcaggacaaagtggacaagtgcaagcaggatgtgcagaagacacaggagaagtatgagaaagtgctggaagatgtgggcaagaccacaccccagtacatggagaacatggagcaggtgtttgagcaatgccagcaatttgaggaaaagcggctggtcttcctcaaggaggtgctgctggacatcaaacggcacctcaacctggctgagaacagcagctacatccatgtgtaccgtgagctggagcaggccatccggggggctgatgcccaggaagacctcagatggttccgcagcaccagtggccccggcatgcccatgaactggccccagtttgaggagtggaacccagaccttcctcacaccaccaccaagaaggagaaacagcctaagaaggcagagggagtggcgctgaccaatgccactggggcggtagagtccacatcccaggctggggaccgcggcagtgttagcagctacgacagaggccagccctacgccaccgagtggtcagacgacgagagtgggaacccctttgggggcagtgagaccaacgggggcgccaacccctttgaggacgactccaagggagtgcgcgtgcgggcactctacgactatgacggccaggagcaggacgagctcagctttaaggccggagacgaactcaccaagctgggcgaggaggatgagcagggctggtgccgtgggcggctggacagcgggcagctgggcctctaccctgccaactacgtggaggctatctagaggccccctccctccatactcccgtcactcctccccactgccgcccctcccctcccactctcgtctccttcccctcgccatagagttccagacatattttccgatcaagcttttatttttttaaaagtcaaaacagaacaaaacaaagtatgcagagacagagcatttgcagggccacctggaggctggggtgctggggcttggggtggccccagggtaggtaacagtcttaggacttagcccaacatcacaacatctgctcttcgggttccaccaaagagtctcctgagccctgagggatggatgtctcctgacccttccaccccgcctcactccctccgtcccactccactccaggctgccggcacctgccccattccctggcctggtttcctaacctcttcttcctcccctgccctgcttcccttcctccaccaccctgctctcaaaggcctcctctccagacccctggaagggaggcttccccatctttagttttccactctgccccggggagcacccttctactcctagccacgtcccttgggaccggtgggactggaggaggaacggtcaccctcctcccccatggaggtttccaggggtcccccagacatgaaagaggggtgagctggaggaagtcatggtgtcactggggtacaggagggtgaatgaagggcatgcaggccctcagcccgggctgtgccagccctcccagccccaggcccatctgagggaccaagacgctgttacgcaggcccttctttccagctatcagcactttcagcatcggctcttcagcagatccaaaccccctcagcaacttgcagaggacctgtcccctctcaaaagtcccctggcctagggtggggacccccaaacctacggcaaagccagcaacagtagcagcctgctcccatttgctggggaggagatcatcttgttcccctggccccccactctccctccatgtccatccaaaaaccataaaatcactgggttccacatcagcctccatgaggccaagccttgtacctgcaaggctcttggcctaaccattcctctgtcctcttctctggcctgcctggggagcccgtgaaggccgcacgggtgcctccagcctgagacatcaggggagagcctgcagctgagttcagcagaaaggaggaatcctggccctcaggaagaagatagtcacatgtttttcttccttgtccccacagcccccagaacaacattctccctgctggcagcccttccatgtctccaaacctgggtcagagtgaaaggacctttgggggtgggtgggagcaaagggcccacctgctggttggtgaaagcagtggtgccggagtgctaggtaccgcacgagagggtgcgggggcttgggaagcagaccagggttggacaaaaccccatgagggcggggagctggaagaaaagtctcttggggacctctggggcaaggagctgagaagtcctgcagcaccaggtgagacttgcttacagtggatgccacttctaggcctctggaccgcagatgccctcctccctcctgcacacctggcctcctgggcctccaggtaaagagagagagccagcccagccctgtttcccctcagtcctcctttgctcctgctgcttctcccaacagcccactgttaggaggtagtagaccccagcctcaaggctctgaccttcttcatgtgggcacagagggtcctgacactctggcagggcctgagctggggcaggcctccctcagggccaggggcgatggcaccccggggacaggcagacctccttcctgccgtcagcacccccttccttatcactgtctggtctccgagcttcggctgcagcctgaggtgtgtcctgggctcctcagagcctgaagcaagcttttggaagcctgcagtcctcccagctccagtgcagaagcctctctctccagcctttccccaggcaggagttggggttgggggcctctgtccctcatcgcttaccttggaaaggtgggaagctggcaatctgcaccttggggcctgggctccccctctctgtgccagcggcttcccagcacctgggaggggctgcagccccagctggactccagcctgtccctcttagcactctagctgcccactccagggcagggactcgaaaccccctccgtcctgagcagccacctccagggccctgtttgggaccactctctcagtccccaggtcctcagggccccagagcgggagggtctcctacctggaagtccccctgagctccagggcccagccctacctgccagtgctggtgtcagggcactcaacaccgagtgtgggggccacgccccttgccatgcccacggcctcctcctgtagcccctgcctgcacccacgatgctgcacgggcccgccctggtggggctcggcgagtaatgtgttttgtccccagttaaccaccattctgcggcctggttctgcaaggaaccagggctgccccaccgcccgccgtctgccgccctaggcttcctgactccattagttccgacacttgtgaaactccgagaagtgctgtggtctcagcaatgcacctgttttgtacatgattgtgtaatttaaaggtatataaatacaaatatatatatatatcagttgtgattgtatgactgtggataaaatccagaactgtgtcaacctggctgcgcat

SEQ ID NO: 316356 - DNA, 3291 bp, Homo sapiens
  misc_feature (1)..(1): n is a, c, g, or t
  misc_feature (20)..(20): n is a, c, g, or t
  misc_feature (54)..(54): n is a, c, g, or t
  misc_feature (99)..(99): n is a, c, g, or t
nagagcgacgcggtggcggnggcagcgccagccccctcctcccccgggaagtcngccgggcttgaggccgggccccagacgtcccgcttcgccccgagncgccgccgatggtccccggagctcctgcccccagtgcatgagcagccgagcctgctaaccgcagctccgcacttgtccatccccctgcggctacaccatgtccagctcctacgatgaggcctcactggcgccagaggagaccaccgacagcttctgggaggtggggaactacaagcggaccgtgaagcgcatcgatgacggccaccgtctatgcaacgacctgatgaactgcgtgcaggagcgcgccaagatcgagaaggcgtacgggcagcagctcaccgactgggccaagcgttggcgccagctcatcgagaaaggcccacagtatggcagcctggagcgggcctggggtgccataatgacagaggcagacaaggtgagcgagctgcaccaggaggtgaagaacaatctgctgaatgaggacctggagaaggtgaagaactggcagaaggacgcctatcacaagcagatcatgggtggcttcaaggagacgaaggaggctgaagatggcttccgcaaggcccagaagccttgggccaagaagatgaaggagctggaggcagccaagaaggcctaccatttggcttgcaaagaggaaaagctggccatgacacgggagatgaacagcaagacggagcaatcggtcacacctgagcagcaaaagaagctgcaggacaaagtggacaagtgcaagcaggatgtgcagaagacacaggagaagtatgagaaagtgctggaagatgtgggcaagaccacaccccagtacatggagaacatggagcaggtgtttgagcaatgccagcaatttgaggaaaagcggctggtcttcctcaaggaggtgctgctggacatcaaacggcacctcaacctggctgagaacagcagctacatccatgtgtaccgtgagctggagcaggccatccggggggctgatgcccaggaagacctcagatggttccgcagcaccagtggccccggcatgcccatgaactggccccagtttgaggagtggaacccagaccttcctcacaccaccaccaagaaggagaaacagcctaagaaggcagagggagtggcgctgaccaatgccactggggcggtagagtccacatcccaggctggggaccgcggcagtgttagcagctacgacagaggccagccctacgccaccgagtggtcagacgacgagagtgggaacccctttgggggcagtgagaccaacgggggcgccaacccctttgaggacgactccaagggagtgcgcgtgcgggcactctacgactatgacggccaggagcaggacgagctcagctttaaggccggagacgaactcaccaagctgggcgaggaggatgagcagggctggtgccgtgggcggctggacagcgggcagctgggcctctaccctgccaactacgtggaggctatctagaggccccctccctccatactcccgtcactcctccccactgccgcccctcccctcccactctcgtctccttcccctcgccatagagttccagacatattttccgatcaagcttttatttttttaaaagtcaaaacagaacaaaacaaagtatgcagagacagagcatttgcagggccacctggaggctggggtgctggggcttggggtggccccagggtaggtaacagtcttaggacttagcccaacatcacaacatctgctcttcgggttccaccaaagagtctcctgagccctgagggatggatgtctcctgacccttccaccccgcctcactccctccgtcccactccactccaggctgccggcacctgccccattccctggcctggtttcctaacctcttcttcctcccctgccctgcttcccttcctccaccaccctgctctcaaaggcctcctctccagacccctggaagggaggcttccccatctttagttttccactctgccccggggagcacccttctactcctagccacgtcccttgggaccggtgggactggaggaggaacggtcaccctcctcccccatggaggtttccaggggtcccccagacatgaaagaggggtgagctggaggaagtcatggtgtcactggggtacaggagggtgaatgaagggcatgcaggccctcagcccgggctgtgccagccctcccagccccaggcccatctgagggaccaagacgctgttacgcaggcccttctttccagctatcagcactttcagcatcggctcttcagcagatccaaaccccctcagcaacttgcagaggacctgtcccctctcaaaagtcccctggcctagggtggggacccccttccttatcactgtctggtctccgagcttcggctgcagcctgaggtgtgtcctgggctcctcagagcctgaagcaagcttttggaagcctgcagtcctcccagctccagtgcagaagcctctctctccagcctttccccaggcaggagttggggttgggggcctctgtccctcatcgcttaccttggaaaggtgggaagctggcaatctgcaccttggggcctgggctccccctctctgtgccagcggcttcccagcacctgggaggggctgcagccccagctggactccagcctgtccctcttagcactctagctgcccactccagggcagggactcgaaaccccctccgtcctgagcagccacctccagggccctgtttgggaccactctctcagtccccaggtcctcagggccccagagcgggagggtctcctacctggaagtccccctgagctccagggcccagccctacctgccagtgctggtgtcagggcactcaacaccgagtgtgggggccacgccccttgccatgcccacggcctcctcctgtagcccctgcctgcacccacgatgctgcacgggcccgccctggtggggctcggcgagtaatgtgttttgtccccagttaaccaccattctgcggcctggttctgcaaggaaccagggctgccccaccgcccgccgtctgccgccctaggcttcctgactccattagttccgacacttgtgaaactccgagaagtgctgtggtctcagcaatgcacctgttttgtacatgattgtgtaatttaaaggtatataaatacaaatatatatatatatcagttgtgattgtatgactgtggataaaatccagaactgtgtcaacctggctgcgcat

SEQ ID NO: 316357 - DNA, 411 bp, Homo sapiens
taattcgttgtcatctgactttttaaaaggagttaaacttagaatgcaattcctccgtgtcacagcagctgaagttgtgctgttggtatcctaaaattctagagagtgttggtatcatcatgtagaattccaaatcctgcagggctaattcatccgccaccatctagtctaggttgcaaaagctagaaatccagtgcaaagtggtggcttaagaaaaataaagaatttatcagttcatattacagatccagggcttagagtgatgtcagcagaactgcctcctctttgactgcatttgcaagcaggctgtctccctgggctggaaaaaatggtgcctcaggctcctatccactctacttcttaacagccctagagggaagagatctcctctttcctgaaagctccaagaaa

SEQ ID NO: 316358 - DNA, 969 bp, Homo sapiens
cgagacgctggcgaaagcatcgggtctcgggacttctgagtggcctgggttaccgcgcgatctacactgagacaaggaagttggaaaagccgagtagttataccagaagatcagggtctcacagactcgcaacttctcttccattttccccaatggcgcatgtcttacaaaaacccaagcactctgggactcactccatagtccaggagttccaggttccggattatgttccatggcagcagtccaagcaggaaaccaagccatctactctgcctccagtccaacaagccaacagccttcatacaagcaaaatgaagactttgactagggtccaaccagtgtttcacttcaagcccactacggtggtgacaagctgccagccgaagaatccaagagaactacatagaaggcggaagttggaccctgggaagatgcatgccaaaatctggttaatgaagacgtcgctcaggagcgggagggccgctctgcgagagctccgaagccgtgagaacttcctcagcaagctcaaccgggagctgatcgagaccatccaggagatggagaacagcacgaccctgcacgtgcgggccctgctgcagcagcaggacaccctggcgaccatcatcgacatcttggagtactcaaacaagaagaggctgcagcaattgaaatctgagcttcaggagtgggaagaaaagaagaaatgcaagatgagctatcttgagcagcaggcagagcagctgaatgccaagattgagaagacccaggaggaagtgaacttcctgagcacttacatggaccatgagtattccatcaagtctgtccagatctccactcttatgcgccagctgcagcaggttaaggacagccagcaggatgaagctggatgacttcgctgaaaagtcccgtaagggtcctgaatcctgtacggctgatatacgaagtgaacactcaaactcggggagtaac

SEQ ID NO: 316359 - DNA, 1555 bp, Homo sapiens
cactcccgcggggctattgtccccggtaaactgcagtttctggttcgagactccaatcctgtttcgaattgctgcttgctgccccttgggctggggataatggaagttctttcccttcccaactctttccagacccaagcactctgggactcactccatagtccaggagttccaggttccggattatgttccatggcagcagtccaagcaggaaaccaagccatctactctgcctccagtccaacaagccaacagccttcatacaagcaaaatgaagactttgactagggtccaaccagtgtttcacttcaagcccactacggtggtgacaagctgccagccgaagaatccaagagaactacatagaaggcggaagttggaccctgggaagatgcatgccaaaatctggttaatgaagacgtcgctcaggagcgggagggccgctctgcgagagctccgaagccgtgagaacttcctcagcaagctcaaccgggagctgatcgagaccatccaggagatggagaacagcacgaccctgcacgtgcgggccctgctgcagcagcaggacaccctggcgaccatcatcgacatcttggagtactcaaacaagaagaggctgcagcaattgaaatctgagcttcaggagtgggaagaaaagaagaaatgcaagatgagctatcttgagcagcaggcagagcagctgaatgccaagattgagaagacccaggaggaagtgaacttcctgagcacttacatggaccatgagtattccatcaagtctgtccagatctccactcttatgcgccagctgcagcaggttaaggacagccagcaggatgagctggatgacctcggtgagatgcgcagaaaggtcctggaatccttgtccgacaagattcagaagaagaagaaaaaaattctgagttctgtggtggcggaaacccagcgtccctatgaagaggctctcctacagaagatgtgggaaagccaggacttcctgaaatgcatgcaaaggttcagagaatttattgaccagtttgaggagaacatgcctgtattaagggccgaggtggaagagctccaagcccagacccgggaaccccgagaggtcatatttgaggatgttctgcttcggagacccaagtgcaccccagacatggatgtcatcctcaacattcctgtggaagagccactacccttctagatggcagtgccatgggccgccctcccctcctgctctcttcccagcacctggagccttggatcatttacttccaggaccggatctccattcagaccctgatctacagtctccctgctccctctgcccttcctccctctttctttccctccctccctccctcccttcttccccccttcccttccctcctccttccttcctcctctccctccctccctcctttctttcttcctgtggttttttcctctcttcttcccttctttctggttggtgctgctgggccaggtgggaatttctgattaaatctgctattccttttttaccaataaagctggatttacatttgcttttttg

SEQ ID NO: 316360 - DNA, 2425 bp, Homo sapiens
cactcccgcggggctattgtccccggtaaactgcagtttctggttcgagactccaatcctgtttcgaattgctgcttgctgccccttgggctggggataatggaagttctttcccttcccaactctttccagacccaagcactctgggactcactccatagtccaggagttccaggttccggattatgttccatggcagcagtccaagcaggaaaccaagccatctactctgcctccagtccaacaagccaacagccttcatacaagcaaaatgaagactttgactagggtccaaccagtgtttcacttcaagcccactacggtggtgacaagctgccagccgaagaatccaagagaactacatagaaggcggaagttggaccctgggaagatgcatgccaaaatctggttaatgaagacgtcgctcaggagcgggagggccgctctgcgagagctccgaagccgtgagaacttcctcagcaagctcaaccgggagctgatcgagaccatccaggagatggagaacagcacgaccctgcacgtgcgggccctgctgcagcagcaggacaccctggcgaccatcatcgacatcttggagtactcaaacaagaagaggctgcagcaattgaaatctgagcttcaggagtgggaagaaaagaagaaatgcaagatgagctatcttgagcagcaggcagagcagctgaatgccaagattgagaagacccaggaggaagtgaacttcctgagcacttacatggaccatgagtattccatcaagtctgtccagatctccactcttatgcgccagctgcagcaggttaaggacagccagcaggatgagctggatgacctcggtgagatgcgcagaaaggtcctggaatccttgtccgacaagattcagaagaagaagaaaaaaattctgagttctgtggtggcggtgagtagccagttgctgtgtgggagcggggatccaggtctcacccccaccccgccctcttccccatcctctgcctccaggcccactgcagccccatcggtctctaccatgttctgctgcccaggaagaggcacctgggggccagacctcttcttcctccacaggaaacccagcgtccctatgaagaggctctcctacagaagatgtgggaaagccaggacttcctgaaatgcatgcaaaggttcagagaagtgcgtgggcaaggaaggtggtggtccctgtagggaagcagtggatgggcagtccccacggcctgtgggaatgagtcaggcttctcctgatctggcgctcaggaggtctctgattctggtgttggcctccctccttgccggtgccattactgtcacttgtctttcatctgggaaggcgattggcactgacctaggccttgcctcattagccagcaatgctggctaatgacccatttacaaccatcaccaaacatcacctattcagccattaaccaccgtgcatctttaccccttgattcttgttactgcccaccacccattatcagtgttaatgaacttcaccatcactgccttcttgaattaattttcattatcttgcctcttcactggtttttaatgtgcatgcccttcactatctctgccagcctccattcattcccatgattgagcattccccgccactttgtaacctgtctccattctccatgatccctcacctgtttcagcaccactgaatattgtcactaacttggaagccagccgcaccttgcatggggaagtcccctctctggagtccagcaagtcccagtgacagaacccataccatttccccagatagctttgctcctcgttcattttggcctttctccctttggttgggggccatttgcctctcccttctcccctgctgtgcctttcctctcagtttattgaccagtttgaggagaacatgcctgtattaagggccgaggtggaagagctccaagcccagacccgggaaccccgagaggtcatatttgaggatgttctgcttcggagacccaagtgcaccccagacatggatgtcatcctcaacattcctgtggaagagccactacccttctagatggcagtgccatgggccgccctcccctcctgctctcttcccagcacctggagccttggatcatttacttccaggaccggatctccattcagaccctgatctacagtctccctgctccctctgcccttcctccctctttctttccctccctccctccctcccttcttccccccttcccttccctcctccttccttcctcctctccctccctccctcctttctttcttcctgtggttttttcctctcttcttcccttctttctggttggtgctgctgggccaggtgggaatttctgattaaatctgctattccttttttaccaataaagctggatttacatttgcttttttg

SEQ ID NO: 316361 - DNA, 2261 bp, Homo sapiens
cactcccgcggggctattgtccccggtaaactgcagtttctggttcgagactccaatcctgtttcgaattgctgcttgctgccccttgggctggggataatggaagttctttcccttcccaactctttccagacccaagcactctgggactcactccatagtccaggagttccaggttccggattatgttccatggcagcagtccaagcaggaaaccaagccatctactctgcctccagtccaacaagccaacagccttcatacaagcaaaatgaagactttgactagggtccaaccagtgtttcacttcaagcccactacggtggtgacaagctgccagccgaagaatccaagagaactacatagaaggcggaagttggaccctgggaagatgcatgccaaaatctggttaatgaagacgtcgctcaggagcgggagggccgctctgcgagagctccgaagccgtgagaacttcctcagcaagctcaaccgggagctgatcgagaccatccaggagatggagaacagcacgaccctgcacgtgcgggccctgctgcagcagcaggacaccctggcgaccatcatcgacatcttggagtactcaaacaagaagaggctgcagcaattgaaatctgagcttcaggagtgggaagaaaagaagaaatgcaagatgagctatcttgagcagcaggcagagcagctgaatgccaagattgagaagacccaggaggaagtgaacttcctgagcacttacatggaccatgagtattccatcaagtctgtccagatctccactcttatgcgccagctgcagcaggttaaggacagccagcaggatgagctggatgacctcggtgagatgcgcagaaaggtcctggaatccttgtccgacaagattcagaagaagaagaaaaaaattctgagttctgtggtggcggaaacccagcgtccctatgaagaggctctcctacagaagatgtgggaaagccaggacttcctgaaatgcatgcaaaggttcagagaagtgcgtgggcaaggaaggtggtggtccctgtagggaagcagtggatgggcagtccccacggcctgtgggaatgagtcaggcttctcctgatctggcgctcaggaggtctctgattctggtgttggcctccctccttgccggtgccattactgtcacttgtctttcatctgggaaggcgattggcactgacctaggccttgcctcattagccagcaatgctggctaatgacccatttacaaccatcaccaaacatcacctattcagccattaaccaccgtgcatctttaccccttgattcttgttactgcccaccacccattatcagtgttaatgaacttcaccatcactgccttcttgaattaattttcattatcttgcctcttcactggtttttaatgtgcatgcccttcactatctctgccagcctccattcattcccatgattgagcattccccgccactttgtaacctgtctccattctccatgatccctcacctgtttcagcaccactgaatattgtcactaacttggaagccagccgcaccttgcatggggaagtcccctctctggagtccagcaagtcccagtgacagaacccataccatttccccagatagctttgctcctcgttcattttggcctttctccctttggttgggggccatttgcctctcccttctcccctgctgtgcctttcctctcagtttattgaccagtttgaggagaacatgcctgtattaagggccgaggtggaagagctccaagcccagacccgggaaccccgagaggtcatatttgaggatgttctgcttcggagacccaagtgcaccccagacatggatgtcatcctcaacattcctgtggaagagccactacccttctagatggcagtgccatgggccgccctcccctcctgctctcttcccagcacctggagccttggatcatttacttccaggaccggatctccattcagaccctgatctacagtctccctgctccctctgcccttcctccctctttctttccctccctccctccctcccttcttccccccttcccttccctcctccttccttcctcctctccctccctccctcctttctttcttcctgtggttttttcctctcttcttcccttctttctggttggtgctgctgggccaggtgggaatttctgattaaatctgctattccttttttaccaataaagctggatttacatttgcttttttg

SEQ ID NO: 316362 - DNA, 1595 bp, Homo sapiens
cgagacgctggcgaaagcatcgggtctcgggacttctgagtggcctgggttaccgcgcgatctacactgagacaaggaagttggaaaagccgagtagttataccagaagatcagggtctcacagactcgcaacttctcttccattttccccaatggcgcatgtcttacaaaaacccaagcactctgggactcactccatagtccaggagttccaggttccggattatgttccatggcagcagtccaagcaggaaaccaagccatctactctgcctccagtccaacaagccaacagccttcatacaagcaaaatgaagactttgactagggtccaaccagtgtttcacttcaagcccactacggtggtgacaagctgccagccgaagaatccaagagaactacatagaaggcggaagttggaccctgggaagatgcatgccaaaatctggttaatgaagacgtcgctcaggagcgggagggccgctctgcgagagctccgaagccgtgagaacttcctcagcaagctcaaccgggagctgatcgagaccatccaggagatggagaacagcacgaccctgcacgtgcgggccctgctgcagcagcaggacaccctggcgaccatcatcgacatcttggagtactcaaacaagaagaggctgcagcaattgaaatctgagcttcaggagtgggaagaaaagaagaaatgcaagatgagctatcttgagcagcaggcagagcagctgaatgccaagattgagaagacccaggaggaagtgaacttcctgagcacttacatggaccatgagtattccatcaagtctgtccagatctccactcttatgcgccagctgcagcaggttaaggacagccagcaggatgagctggatgacctcggtgagatgcgcagaaaggtcctggaatccttgtccgacaagattcagaagaagaagaaaaaaattctgagttctgtggtggcggaaacccagcgtccctatgaagaggctctcctacagaagatgtgggaaagccaggacttcctgaaatgcatgcaaaggttcagagaatttattgaccagtttgaggagaacatgcctgtattaagggccgaggtggaagagctccaagcccagacccgggaaccccgagaggtcatatttgaggatgttctgcttcggagacccaagtgcaccccagacatggatgtcatcctcaacattcctgtggaagagccactacccttctagatggcagtgccatgggccgccctcccctcctgctctcttcccagcacctggagccttggatcatttacttccaggaccggatctccattcagaccctgatctacagtctccctgctccctctgcccttcctccctctttctttccctccctccctccctcccttcttccccccttcccttccctcctccttccttcctcctctccctccctccctcctttctttcttcctgtggttttttcctctcttcttcccttctttctggttggtgctgctgggccaggtgggaatttctgattaaatctgctattccttttttaccaataaagctggatttacatttgcttttttg

SEQ ID NO: 316363 - DNA, 1408 bp, Homo sapiens
  misc_feature (6)..(6): n is a, c, g, or t
ggcagnaggcggagaccactgttcaaggccacaggattatgttccatggcagcagtccaagcaggaaaccaagccatctactctgcctccagtccaacaagccaacagccttcatacaagcaaaatgaagactttgactagggtccaaccagtgtttcacttcaagcccactacggtggtgacaagctgccagccgaagaatccaagagaactacatagaaggcggaagttggaccctgggaagatgcatgccaaaatctggttaatgaagacgtcgctcaggagcgggagggccgctctgcgagagctccgaagccgtgagaacttcctcagcaagctcaaccgggagctgatcgagaccatccaggagatggagaacagcacgaccctgcacgtgcgggccctgctgcagcagcaggacaccctggcgaccatcatcgacatcttggagtactcaaacaagaagaggctgcagcaattgaaatctgagcttcaggagtgggaagaaaagaagaaatgcaagatgagctatcttgagcagcaggcagagcagctgaatgccaagattgagaagacccaggaggaagtgaacttcctgagcacttacatggaccatgagtattccatcaagtctgtccagatctccactcttatgcgccagctgcagcaggttaaggacagccagcaggatgagctggatgacctcggtgagatgcgcagaaaggtcctggaatccttgtccgacaagattcagaagaagaagaaaaaaattctgagttctgtggtggcggaaacccagcgtccctatgaagaggctctcctacagaagatgtgggaaagccaggacttcctgaaatgcatgcaaaggttcagagaatttattgaccagtttgaggagaacatgcctgtattaagggccgaggtggaagagctccaagcccagacccgggaaccccgagaggtcatatttgaggatgttctgcttcggagacccaagtgcaccccagacatggatgtcatcctcaacattcctgtggaagagccactacccttctagatggcagtgccatgggccgccctcccctcctgctctcttcccagcacctggagccttggatcatttacttccaggaccggatctccattcagaccctgatctacagtctccctgctccctctgcccttcctccctctttctttccctccctccctccctcccttcttccccccttcccttccctcctccttccttcctcctctccctccctccctcctttctttcttcctgtggttttttcctctcttcttcccttctttctggttggtgctgctgggccaggtgggaatttctgattaaatctgctattccttttttaccaataaagctggatttacatttgcttttttg

SEQ ID NO: 316364 - DNA, 1771 bp, Homo sapiens
cgagacgctggcgaaagcatcgggtctcgggacttctgagtggcctgggttaccgcgcgatctacactgagacaaggaagttggaaaagccgagtagttataccagaagatcagggtctcacagactcgcaacttctcttccattttccccaatggcgcatgtcttacaaaaacccaagcactctgggactcactccatagtccaggagttccaggttccggattatgttccatggcagcagtccaagcaggaaaccaagccatctactctgcctccagtccaacaagccaacagccttcatacaagcaaaatgaagactttgactagggtccaaccaggcagaaccacagcccttagagtgtttcagagacagccagttggagttttgcgtggctgctgtgccttcgtctggtgttgtggtcccacttctcaggtcactagaagtaagagtaacaactggtaatgtgtatccagcactgaatatgcatcaggcactattccaaacacctttaagtgtttcacttcaagcccactacggtggtgacaagctgccagccgaagaatccaagagaactacatagaaggcggaagttggaccctgggaagatgcatgccaaaatctggttaatgaagacgtcgctcaggagcgggagggccgctctgcgagagctccgaagccgtgagaacttcctcagcaagctcaaccgggagctgatcgagaccatccaggagatggagaacagcacgaccctgcacgtgcgggccctgctgcagcagcaggacaccctggcgaccatcatcgacatcttggagtactcaaacaagaagaggctgcagcaattgaaatctgagcttcaggagtgggaagaaaagaagaaatgcaagatgagctatcttgagcagcaggcagagcagctgaatgccaagattgagaagacccaggaggaagtgaacttcctgagcacttacatggaccatgagtattccatcaagtctgtccagatctccactcttatgcgccagctgcagcaggttaaggacagccagcaggatgagctggatgacctcggtgagatgcgcagaaaggtcctggaatccttgtccgacaagattcagaagaagaagaaaaaaattctgagttctgtggtggcggaaacccagcgtccctatgaagaggctctcctacagaagatgtgggaaagccaggacttcctgaaatgcatgcaaaggttcagagaatttattgaccagtttgaggagaacatgcctgtattaagggccgaggtggaagagctccaagcccagacccgggaaccccgagaggtcatatttgaggatgttctgcttcggagacccaagtgcaccccagacatggatgtcatcctcaacattcctgtggaagagccactacccttctagatggcagtgccatgggccgccctcccctcctgctctcttcccagcacctggagccttggatcatttacttccaggaccggatctccattcagaccctgatctacagtctccctgctccctctgcccttcctccctctttctttccctccctccctccctcccttcttccccccttcccttccctcctccttccttcctcctctccctccctccctcctttctttcttcctgtggttttttcctctcttcttcccttctttctggttggtgctgctgggccaggtgggaatttctgattaaatctgctattccttttttaccaataaagctggatttacatttgcttttttg

SEQ ID NO: 316365 - DNA, 1437 bp, Homo sapiens
cactcccgcggggctattgtccccggtaaactgcagtttctggttcgagactccaatcctgtttcgaattgctgcttgctgccccttgggctggggataatggaagttctttcccttcccaactctttccagacccaagcactctgggactcactccatagtccaggagttccaggttccgtgtttcacttcaagcccactacggtggtgacaagctgccagccgaagaatccaagagaactacatagaaggcggaagttggaccctgggaagatgcatgccaaaatctggttaatgaagacgtcgctcaggagcgggagggccgctctgcgagagctccgaagccgtgagaacttcctcagcaagctcaaccgggagctgatcgagaccatccaggagatggagaacagcacgaccctgcacgtgcgggccctgctgcagcagcaggacaccctggcgaccatcatcgacatcttggagtactcaaacaagaagaggctgcagcaattgaaatctgagcttcaggagtgggaagaaaagaagaaatgcaagatgagctatcttgagcagcaggcagagcagctgaatgccaagattgagaagacccaggaggaagtgaacttcctgagcacttacatggaccatgagtattccatcaagtctgtccagatctccactcttatgcgccagctgcagcaggttaaggacagccagcaggatgagctggatgacctcggtgagatgcgcagaaaggtcctggaatccttgtccgacaagattcagaagaagaagaaaaaaattctgagttctgtggtggcggaaacccagcgtccctatgaagaggctctcctacagaagatgtgggaaagccaggacttcctgaaatgcatgcaaaggttcagagaatttattgaccagtttgaggagaacatgcctgtattaagggccgaggtggaagagctccaagcccagacccgggaaccccgagaggtcatatttgaggatgttctgcttcggagacccaagtgcaccccagacatggatgtcatcctcaacattcctgtggaagagccactacccttctagatggcagtgccatgggccgccctcccctcctgctctcttcccagcacctggagccttggatcatttacttccaggaccggatctccattcagaccctgatctacagtctccctgctccctctgcccttcctccctctttctttccctccctccctccctcccttcttccccccttcccttccctcctccttccttcctcctctccctccctccctcctttctttcttcctgtggttttttcctctcttcttcccttctttctggttggtgctgctgggccaggtgggaatttctgattaaatctgctattccttttttaccaataaagctggatttacatttgcttttttg

SEQ ID NO: 316366 - DNA, 2143 bp, Homo sapiens
cactcccgcggggctattgtccccggtaaactgcagtttctggttcgagactccaatcctgtttcgaattgctgcttgctgccccttgggctggggataatggaagttctttcccttcccaactctttccagacccaagcactctgggactcactccatagtccaggagttccaggttccgtgtttcacttcaagcccactacggtggtgacaagctgccagccgaagaatccaagagaactacatagaaggcggaagttggaccctgggaagatgcatgccaaaatctggttaatgaagacgtcgctcaggagcgggagggccgctctgcgagagctccgaagccgtgagaacttcctcagcaagctcaaccgggagctgatcgagaccatccaggagatggagaacagcacgaccctgcacgtgcgggccctgctgcagcagcaggacaccctggcgaccatcatcgacatcttggagtactcaaacaagaagaggctgcagcaattgaaatctgagcttcaggagtgggaagaaaagaagaaatgcaagatgagctatcttgagcagcaggcagagcagctgaatgccaagattgagaagacccaggaggaagtgaacttcctgagcacttacatggaccatgagtattccatcaagtctgtccagatctccactcttatgcgccagctgcagcaggttaaggacagccagcaggatgagctggatgacctcggtgagatgcgcagaaaggtcctggaatccttgtccgacaagattcagaagaagaagaaaaaaattctgagttctgtggtggcggaaacccagcgtccctatgaagaggctctcctacagaagatgtgggaaagccaggacttcctgaaatgcatgcaaaggttcagagaagtgcgtgggcaaggaaggtggtggtccctgtagggaagcagtggatgggcagtccccacggcctgtgggaatgagtcaggcttctcctgatctggcgctcaggaggtctctgattctggtgttggcctccctccttgccggtgccattactgtcacttgtctttcatctgggaaggcgattggcactgacctaggccttgcctcattagccagcaatgctggctaatgacccatttacaaccatcaccaaacatcacctattcagccattaaccaccgtgcatctttaccccttgattcttgttactgcccaccacccattatcagtgttaatgaacttcaccatcactgccttcttgaattaattttcattatcttgcctcttcactggtttttaatgtgcatgcccttcactatctctgccagcctccattcattcccatgattgagcattccccgccactttgtaacctgtctccattctccatgatccctcacctgtttcagcaccactgaatattgtcactaacttggaagccagccgcaccttgcatggggaagtcccctctctggagtccagcaagtcccagtgacagaacccataccatttccccagatagctttgctcctcgttcattttggcctttctccctttggttgggggccatttgcctctcccttctcccctgctgtgcctttcctctcagtttattgaccagtttgaggagaacatgcctgtattaagggccgaggtggaagagctccaagcccagacccgggaaccccgagaggtcatatttgaggatgttctgcttcggagacccaagtgcaccccagacatggatgtcatcctcaacattcctgtggaagagccactacccttctagatggcagtgccatgggccgccctcccctcctgctctcttcccagcacctggagccttggatcatttacttccaggaccggatctccattcagaccctgatctacagtctccctgctccctctgcccttcctccctctttctttccctccctccctccctcccttcttccccccttcccttccctcctccttccttcctcctctccctccctccctcctttctttcttcctgtggttttttcctctcttcttcccttctttctggttggtgctgctgggccaggtgggaatttctgattaaatctgctattccttttttaccaataaagctggatttacatttgcttttttg

SEQ ID NO: 316367 - DNA, 1329 bp, Homo sapiens
aacggatgagagtcccggagctcccgggcggcgcagacaatggggaaccgcccagcttgggccgcgtttaccagcaggaggccgcacgggggcgggcgtctggcggggccggggcggcgggtccacgggctttcgggggctcaggccgggcagggcgcagcgccgcctctctgctcttccctccgcccgcagacgtcgctcaggagcgggagggccgctctgcgagagctccgaagccgtgagaacttcctcagcaagctcaaccgggagctgatcgagaccatccaggagatggagaacagcacgaccctgcacgtgcgggccctgctgcagcagcaggacaccctggcgaccatcatcgacatcttggagtactcaaacaagaagaggctgcagcaattgaaatctgagcttcaggagtgggaagaaaagaagaaatgcaagatgagctatcttgagcagcaggcagagcagctgaatgccaagattgagaagacccaggaggaagtgaacttcctgagcacttacatggaccatgagtattccatcaagtctgtccagatctccactcttatgcgccagctgcagcaggttaaggacagccagcaggatgagctggatgacctcggtgagatgcgcagaaaggtcctggaatccttgtccgacaagattcagaagaagaagaaaaaaattctgagttctgtggtggcggaaacccagcgtccctatgaagaggctctcctacagaagatgtgggaaagccaggacttcctgaaatgcatgcaaaggttcagagaatttattgaccagtttgaggagaacatgcctgtattaagggccgaggtggaagagctccaagcccagacccgggaaccccgagaggtcatatttgaggatgttctgcttcggagacccaagtgcaccccagacatggatgtcatcctcaacattcctgtggaagagccactacccttctagatggcagtgccatgggccgccctcccctcctgctctcttcccagcacctggagccttggatcatttacttccaggaccggatctccattcagaccctgatctacagtctccctgctccctctgcccttcctccctctttctttccctccctccctccctcccttcttccccccttcccttccctcctccttccttcctcctctccctccctccctcctttctttcttcctgtggttttttcctctcttcttcccttctttctggttggtgctgctgggccaggtgggaatttctgattaaatctgctattccttttttaccaataaagctggatttacatttgcttttttg

SEQ ID NO: 316368 - DNA, 2199 bp, Homo sapiens
aacggatgagagtcccggagctcccgggcggcgcagacaatggggaaccgcccagcttgggccgcgtttaccagcaggaggccgcacgggggcgggcgtctggcggggccggggcggcgggtccacgggctttcgggggctcaggccgggcagggcgcagcgccgcctctctgctcttccctccgcccgcagacgtcgctcaggagcgggagggccgctctgcgagagctccgaagccgtgagaacttcctcagcaagctcaaccgggagctgatcgagaccatccaggagatggagaacagcacgaccctgcacgtgcgggccctgctgcagcagcaggacaccctggcgaccatcatcgacatcttggagtactcaaacaagaagaggctgcagcaattgaaatctgagcttcaggagtgggaagaaaagaagaaatgcaagatgagctatcttgagcagcaggcagagcagctgaatgccaagattgagaagacccaggaggaagtgaacttcctgagcacttacatggaccatgagtattccatcaagtctgtccagatctccactcttatgcgccagctgcagcaggttaaggacagccagcaggatgagctggatgacctcggtgagatgcgcagaaaggtcctggaatccttgtccgacaagattcagaagaagaagaaaaaaattctgagttctgtggtggcggtgagtagccagttgctgtgtgggagcggggatccaggtctcacccccaccccgccctcttccccatcctctgcctccaggcccactgcagccccatcggtctctaccatgttctgctgcccaggaagaggcacctgggggccagacctcttcttcctccacaggaaacccagcgtccctatgaagaggctctcctacagaagatgtgggaaagccaggacttcctgaaatgcatgcaaaggttcagagaagtgcgtgggcaaggaaggtggtggtccctgtagggaagcagtggatgggcagtccccacggcctgtgggaatgagtcaggcttctcctgatctggcgctcaggaggtctctgattctggtgttggcctccctccttgccggtgccattactgtcacttgtctttcatctgggaaggcgattggcactgacctaggccttgcctcattagccagcaatgctggctaatgacccatttacaaccatcaccaaacatcacctattcagccattaaccaccgtgcatctttaccccttgattcttgttactgcccaccacccattatcagtgttaatgaacttcaccatcactgccttcttgaattaattttcattatcttgcctcttcactggtttttaatgtgcatgcccttcactatctctgccagcctccattcattcccatgattgagcattccccgccactttgtaacctgtctccattctccatgatccctcacctgtttcagcaccactgaatattgtcactaacttggaagccagccgcaccttgcatggggaagtcccctctctggagtccagcaagtcccagtgacagaacccataccatttccccagatagctttgctcctcgttcattttggcctttctccctttggttgggggccatttgcctctcccttctcccctgctgtgcctttcctctcagtttattgaccagtttgaggagaacatgcctgtattaagggccgaggtggaagagctccaagcccagacccgggaaccccgagaggtcatatttgaggatgttctgcttcggagacccaagtgcaccccagacatggatgtcatcctcaacattcctgtggaagagccactacccttctagatggcagtgccatgggccgccctcccctcctgctctcttcccagcacctggagccttggatcatttacttccaggaccggatctccattcagaccctgatctacagtctccctgctccctctgcccttcctccctctttctttccctccctccctccctcccttcttccccccttcccttccctcctccttccttcctcctctccctccctccctcctttctttcttcctgtggttttttcctctcttcttcccttctttctggttggtgctgctgggccaggtgggaatttctgattaaatctgctattccttttttaccaataaagctggatttacatttgcttttttg

SEQ ID NO: 316369 - DNA, 1264 bp, Homo sapiens
ggtctgatgatgaatttgtgaactctatctttggtatatcttttattaaactgcactgttttgtttagtggatgggcagtccccacggcctgtgggaatgagtcaggcttctcctgatctggcgctcaggaggtctctgattctggtgttggcctccctccttgccggtgccattactgtcacttgtctttcatctgggaaggcgattggcactgacctaggccttgcctcattagccagcaatgctggctaatgacccatttacaaccatcaccaaacatcacctattcagccattaaccaccgtgcatctttaccccttgattcttgttactgcccaccacccattatcagtgttaatgaacttcaccatcactgccttcttgaattaattttcattatcttgcctcttcactggtttttaatgtgcatgcccttcactatctctgccagcctccattcattcccatgattgagcattccccgccactttgtaacctgtctccattctccatgatccctcacctgtttcagcaccactgaatattgtcactaacttggaagccagccgcaccttgcatggggaagtcccctctctggagtccagcaagtcccagtgacagaacccataccatttccccagatagctttgctcctcgttcattttggcctttctccctttggttgggggccatttgcctctcccttctcccctgctgtgcctttcctctcagtttattgaccagtttgaggagaacatgcctgtattaagggccgaggtggaagagctccaagcccagacccgggaaccccgagaggtcatatttgaggatgttctgcttcggagacccaagtgcaccccagacatggatgtcatcctcaacattcctgtggaagagccactacccttctagatggcagtgccatgggccgccctcccctcctgctctcttcccagcacctggagccttggatcatttacttccaggaccggatctccattcagaccctgatctacagtctccctgctccctctgcccttcctccctctttctttccctccctccctccctcccttcttccccccttcccttccctcctccttccttcctcctctccctccctccctcctttctttcttcctgtggttttttcctctcttcttcccttctttctggttggtgctgctgggccaggtgggaatttctgattaaatctgctattccttttttaccaataaagctggatttacatttgcttttttg

SEQ ID NO: 316370 - DNA, 430 bp, Homo sapiens
cactcccgcggggctattgtccccggtaaactgcagtttctggttcgagactccaatcctgtttcgaattgctgcttgctgccccttgggctggggataatggaagttctttcccttcccaactctttccagacccaagcactctgggactcactccatagtccaggagttccaggttccggattatgttccatggcagcagtccaagcaggaaaccaagccatctactctgcctccagtccaacaagccaacagccttcatacaagcaaaatgaagactttgactagggtccaaccaggtgggcggaggcacctgggagctggtgtgggggttggagacaggatagagtggctgcttttggctcttggtgacaccacttatattagggtaggctaactgatgtaataaacaatgcccaaattgcaagta

SEQ ID NO: 316371 - DNA, 992 bp, Homo sapiens
cgagacgctggcgaaagcatcgggtctcgggacttctgagtggcctgggttaccgcgcgatctacactgagacaaggaagttggaaaagccgagtagttataccagaagatcagggtctcacagactcgcaacttctcttccattttccccaatggcgcatgtcttacaaaaacccaagcactctgggactcactccatagtccaggagttccaggttccggattatgttccatggcagcagtccaagcaggaaaccaagccatctactctgcctccagtccaacaagccaacagccttcatacaagcaaaatgaagactttgactagggtccaaccaggtgggcggaggcacctgggagctggtgtgggggttggagacaggatagagtggctgcttttggctcttggtgacaccacttatattagggtaggctaactgatgtaataaacaatgcccaaattgcaagtattgatatagaagtttatatctcatttatgccacagtacatttgtggatctgaggaaggagggattctgttccacatggtcattcagggatccaggttcctttgaccttgtgggtctgatattttgtaaggtcttgaagtcttctgctggatacttttgcatccagctggcatagagggaagagagagaacaagaacatggacaattatgtgggcattttttttggggggggtccagatttgaagtgacaaatgttactcctactcatgtttcaggggccataatttagccacatgacctctgctaaccacaagggaaggtgggaaatgtagtccatctgtttttccaggaggaaaagaaaacaaggtttggtgaaatcgtagaataaactctgccacatcattatcatgctttacaggggagttccgaggccttgggtcaggctcaggcagacatggggtcagattttggctctgccatttactcacttggaaaaatcattcatctctctgagccttggttt

SEQ ID NO: 316372 - DNA, 439 bp, Homo sapiens
tgcttgagggaaggtcttgcctcctgtccctgctgacctccctaacccctccccagatcttgagcagcaggcagagcagctgaatgccaagattgagaagacccaggaggaagtgaacttcctgagcacttacatggaccatgagtattccatcaagtctgtccagatctccactcttatgcgccagctgcagcaggttaaggacagccagcaggtaggggagcccctgcccctctcccaccagactgtgtgggaggcaggactggtgaccaacacccttctgctggctcccaggatgagctggatgacctcggtgagatgcgcagaaaggtcctggaatccttgtccgacaagattcagaagaagaagaaaaaaattctgagttctgtggtggcggtgagtagccagttgctgtgtgggagcggggatccaggtctca

SEQ ID NO: 316373 - DNA, 626 bp, Homo sapiens
cgattagcctctggtcaggtttctgggagtgaggttgggactggggactcctctgaggaagtgctgggtggccgcctctgagagccagcagagcctgtgggtgagttgactccacccctcccgcagaccatcatcgacatcttggagtactcaaacaagaagaggctgcagcaattgaaatctgagcttcaggagtgggaagaaaagaagaaatgcaagatgagctgtaagaatccctggcaaattccttgaccctcccccctggcaccttggggaggtcagcagcagagcattcaccttgtacttgccattcagaaaccctcagccccattggctctcttcttggcagatgggaatgctaagatacagagcgaatagcatagttacccaacacttagctctttccaggccccgtatctgggtctctaccaatgtctgcattgttacaggcacacactcagtcattgcaactacttggaggcagggaagctgtcctcccattttacagatgaggaaaccgaggctaagagaggtgcagtagcttgtggaaggttatatagctaggagccagaatccaatcctagcctggctctgtttcctgccaaggtccttctgggagtcagtgg

SEQ ID NO: 316374 - DNA, 832 bp, Homo sapiens
aacagcttgttatttggtggattgtggcagtaaatcggggcgagtggggaacccggcgcaggaactgcagccgcggctgggagtggtgctgcccggacgggggcccacggaggtcagaggggaggaggactctggagctgacagcgcgcacttcacccgcagttgttctagcgactgcgaagatagctcgctgagctggaaccccacagatcaccaacaaaaatgaaggcggcagatgagcctgcctacctgacagtgggaaccgatgtcagtgccaagtaccgaggtgccttctgtgaggcaaagattaagactgtgaaaaggctggtgaaagttaagaattaagcaccataaaaggaggaaacgtctgacttgttctatgcccaacacatagagtagtgcctgatacatagtggaccctcaaaatttgttgaatgaatcagtgaactagagcagtgattcctaaagggtccctccagaccagcagcatcagccttacttgggaacttgttccaaatgcaaattttccccaccccagatctacttcatcagaaactctgggggtactcctgaaacaggataataccacacaattggtacaagatgaccaagtaaagggtcctttaagagttggagctattgttgaaacaaggacatctgatggatcttttcaggaagctattatcagcaagttgacagatgctagttggtataccgtgggggttattggggggtgtgccatcggcaaaggcagggcaagctgcaaagacgggaatagagaaagttcgatgaaagaatgaccgccggatattgttaagaagttggccatatt

SEQ ID NO: 316375 - DNA, 5637 bp, Homo sapiens
aacagcttgttatttggtggattgtggcagtaaatcggggcgagtggggaacccggcgcaggaactgcagccgcggctgggagtggtgctgcccggacgggggcccacggaggtcagaggggaggaggactctggagctgacagcgcgcacttcacccgcagttgttctagcgactgcgaagatagctcgctgagctggaaccccacagatcaccaacaaaaatgaaggcggcagatgagcctgcctacctgacagtgggaaccgatgtcagtgccaagtaccgaggtgccttctgtgaggcaaagattaagactgtgaaaaggctggtgaaagttaaggtactcctgaaacaggataataccacacaattggtacaagatgaccaagtaaagggtcctttaagagttggagctattgttgaaacaaggacatctgatggatcttttcaggaagctattatcagcaagttgacagatgctagttggtataccgtggtgtttgatgatggtgatgagcgaacattgagacgtacctcactttgtctgaaaggagagagacattttgcagagagtgagacacttgaccagcttccattaacaaatccagagcattttggaactccagtaattgcaaagaagacgaacagaggaaggagatcttctcttcctgttactgaagatgaaaaggaagaagaaagcagtgaagaggaagatgaagacaagcgccgtctcaatgatgaattactaggaaaagttgtaagtgtggtgtctgcaacggagaggactgaatggtatcctgctttggtaatatctcccagctgtaatgatgacatcacagtgaaaaaggatcagtgtttagttcgatcatttattgattctaaattttactctatagcaagaaaggacattaaggaagtagacattctcaatctaccggaatctgagctctccactaaaccagggcttcagaaagcaagcatcttcttaaaaactagagttgttcctgataattggaaaatggatataagtgaaatccttgagtcatccagtagtgatgatgaagatggcccagctgaagaaaatgatgaagagaaggaaaaggaggccaaaaagacagaagaagaggtgcctgaggaagaacttgatcctgaagagagggacaacttcctccagcagctttataagtttatggaagacagaggtactccaatcaacaaaccacctgttttgggctataaagatctcaatctcttcaaactcttcagactggtttatcatcagggtggatgtgacaatattgatagtggtgctgtatggaagcaaatttatatggaccttggcattcctattttgaattcagctgcttcctacaatgtaaaaactgcttatagaaagtatctctatggttttgaggagtactgccgttcggcaaatattcagttcagaactgttcatcaccatgaaccaaaagtaaaagaggaaaaaaaagacttagaagaatcaatggaagaggctctcaaattagatcaagaaatgcctttaacagaagtgaagagtgaacctgaggaaaatatcgattcaaacagtgaaagtgaaagagaagagatagaattaaaatctccgaggggacgaaggagaattgctcgagatgtaaattctattaaaaaggaaattgaagaagagaaaacagaagacaaattaaaagataatgatacagaaaataaggatgtagatgatgactatgaaactgcagagaaaaaagaaaatgagctactactggggagaaaaaatacaccaaagcaaaaagagaagaaaattaaaaaacaggaggattctgacaaagactcagatgaagaggaagagaaaagccaagagagggaagaaactgaaagcaaatgtgactctgaaggagaggaagatgaggaagacatggaaccctgcctaacaggaaccaaagtgaaagtaaaatatggacgagggaagactcagaaaatttatgaagccagtattaaaagcactgaaattgatgacggagaagttttatatttggtacattactatggatggaatgtcaggtatgatgagtgggtgaaggctgacaggataatctggcctttggacaaaggtggaccaaagaaaaaacagaagaaaaaagctaaaaataaagaagatagtgaagtggacgaaaagagagatgaggagaggcagaagtcaaaacggggacgacctcctttaaaatcaaccctctcatcaaacatgccgtatggcttatctaagacagcaaacagtgaaggaaaatcagactcttgttcatctgatagtgaaacagaagatgctttagaaaagaatttaataaatgaagaactttctcttaaagatgaactagaaaaaaatgaaaatttgaatgatgataagctagatgaagaaaatccaaagatttctgcacatatattaaaagaaaatgataggactcaaatgcagcctttagaaaccctgaagttagaagttggagagaatgaacaaatagtacagatttttgggaacaaaatggaaaaaacagaagaagttaagaaagaagccgaaaaatctccaaaaggaaagggaagacgaagcaagacaaaagatctttctttagaaattataaagatttcatcatttggccagaatgaagcaggaagtgaacctcatatagaagctcatagtcttgaattgtcttcattagacaataaaaacttttcttctgctacagaagatgaaattgaccaatgtgtgaaagaaaagaagttgaaacggaaaatactaggacaatcatcgccagagaaaaaaataagaattgagaatggaatggaaatgacaaatactgtatctcaagaaaggaccagtgattgtattggatctgagggaatgaaaaacttaaattttgaacagcactttgaaagagaaaatgaaggaatgccatcattgatagcagagtcaaaccaatgcatccaacaactgactagtgaaagatttgatagtccagctgaagaaactgtaaatattccactaaaagaagatgaggatgcaatgcctctgatcgggcctgaaaccttggtttgccatgaagtagatttggatgatttggatgaaaaggataagaccagcattgaggatgtagcagttgaaagctctgagtctaactctcttgtttctattccacctgccctacctcctgtagtccaacataacttttcagtagcttcaccacttactcttagtcaagatgagtctcgaagcgtaaaaagtgagagtgatataacgattgaagttgatagtattgctgaagaatctcaagaaggtctctgtgagagggaatcggcaaatggatttgaaactaatgttgcctctggtacctgtagtataattgtacaagagagagagagcagagagaagggtcagaagaggccaagtgatggaaatagtggattaatggcaaaaaagcaaaagcgtaccccaaagcgaacaagtgctgcagccaaaaatgaaaagaatggaacaggacaaagcagtgatagtgaagatcttcctgtcctagacaattcaagtaaatgtaccccagtaaagcatcttaatgtatctaagccacagaaacttgcacgatctcctgcaagaatatccccgcacatcaaagatggagagaaagataaacacagagaaaaacatccgaattcatcccctaggacatataaatggagctttcagctcaatgaattagataatatgaacagtacagagagaatctcatttctccaagaaaaactacaggaaatcagaaaatattatatgtctttgaagtctgaagttgcaaccatagacaggaggagaaaaagattaaaaaagaaagacagggaagtgtctcatgcgggagcctccatgtcatctgcttcatcagacactggaatgagtccctcatcatcgtctcccccacaaaatgtacttgctgtagaatgtaggtgataaacattttctctaccttcccagcagtttgctgccatggacataaatccccaaaccctgaattacaaccacagaaagcactcaactggtttgacattgctaagtatatcctgtatacttttccaggctggattgtatctattcccctctctcttcttttttcttgttgcaaaaaataagctgattaataagtgaaggttaagcagcctgccatatttgtcataatttttcctctttacttttgtttttcgtttgttgtgatatagaacaaagggcacttagcaaatttgaatttgtataataaagctttcaggtgttacagaaatcgtagacaagcaagtgcacatgataaacatcaaaatattacccagctgaatagttactgctgcactttcactaagatgtatttgaacacttggtgagtagggggtttatgttgtgttttttttcattatcgttttttttatttttgtggaagcacttgctatttagaactgccaaagtatatgttcagcagtgtgcccaggattgaaggtgtaaatgggacaaaataaattgtgaaaggaagtgtagttgactgaaaactacagttgtaataagtcttccactttttataggatttttgagcacacaattatgcaaatattttaatgtttattaatgtttacagtggaattgtgaataagttttcagtggactatcttatcccttgacaaaaatattttgtcttttttctatgtaatttcagagtttttattttgttacaaaaagacaaaaatgaaatatataacaacaatgaagttatttaacaagatttctaaagctgaaatttttgtgtaaaataaggtattatcttgcaacttgttaaatatatttattcagacattggatgttgtatttttatgtattttttaaaatattaataaaatttaaaaaaagaaaattctaggttaattcactctttggatgacaatagctctcagctgtcctttttacaggaggttgcatcctgcagccttgcctgtgttaaagggagtctgtctcagtccatcaaacagtatagaactataaatgggcatctggatcattaaagtatgtccttgtttagaaactttggcagtcctagtatttaaactgttttgaggatcaaatttttggttgcccttaagatactttgtcacagtttttatgtttgctatactgccgaatgaatttatatctcccaaagttgagatgcaacaactaagtaaagcaactatgtatgctttgtctgtgaattgttccacagactgatagattttgtaaataattcttccaaaatcatgtatttaaagcagttttgcatatacattatgtaaaaaggtgattttataaaagcagtttttaaattcatgtttgtacattgaaaggggttttttttttaaacctccttttctgtgtttaatatgctgtagaataataacctagatgctctagactgtatatcaggatctgatttacaagaaaaagtcagagctaaacactagtgatggcatagcattactgaaatcattgtttcttaatttcattttactacattgtgaacttgtgattcagattccattttctcagagaattaaaaacaaaaaaagtactcttgta

SEQ ID NO: 316376 - DNA, 5889 bp, Homo sapiens
aacagcttgttatttggtggattgtggcagtaaatcggggcgagtggggaacccggcgcaggaactgcagccgcggctgggagtggtgctgcccggacgggggcccacggaggtcagaggggaggaggactctggagctgacagcgcgcacttcacccgcagttgttctagcgactgcgaagatagctcgctgagctggaaccccacagatcaccaacaaaaatgaaggcggcagatgagcctgcctacctgacagtgggaaccgatgtcagtgccaagtaccgaggtgccttctgtgaggcaaagattaagactgtgaaaaggctggtgaaagttaaggtactcctgaaacaggataataccacacaattggtacaagatgaccaagtaaagggtcctttaagagttggagctattgttgaaacaaggacatctgatggatcttttcaggaagctattatcagcaagttgacagatgctagttggtataccgtggtgtttgatgatggtgatgagcgaacattgagacgtacctcactttgtctgaaaggagagagacattttgcagagagtgagacacttgaccagcttccattaacaaatccagagcattttggaactccagtaattgcaaagaagacgaacagaggaaggagatcttctcttcctgttactgaagatgaaaaggaagaagaaagcagtgaagaggaagatgaagacaagcgccgtctcaatgatgaattactaggaaaagttgtaagtgtggtgtctgcaacggagaggactgaatggtatcctgctttggtaatatctcccagctgtaatgatgacatcacagtgaaaaaggatcagtgtttagttcgatcatttattgattctaaattttactctatagcaagaaaggacattaaggaagtagacattctcaatctaccggaatctgagctctccactaaaccagggcttcagaaagcaagcatcttcttaaaaactagagttgttcctgataattggaaaatggatataagtgaaatccttgagtcatccagtagtgatgatgaagatggcccagctgaagaaaatgatgaagagaaggaaaaggaggccaaaaagacagaagaagaggtgcctgaggaagaacttgatcctgaagagagggacaacttcctccagcagctttataagtttatggaagacagaggtactccaatcaacaaaccacctgttttgggctataaagatctcaatctcttcaaactcttcagactggtttatcatcagggtggatgtgacaatattgatagtggtgctgtatggaagcaaatttatatggaccttggcattcctattttgaattcagctgcttcctacaatgtaaaaactgcttatagaaagtatctctatggttttgaggagtactgccgttcggcaaatattcagttcagaactgttcatcaccatgaaccaaaagtaaaagaggaaaaaaaagacttagaagaatcaatggaagaggctctcaaattagatcaagaaatgcctttaacagaagtgaagagtgaacctgaggaaaatatcgattcaaacagtgaaagtgaaagagaagagatagaattaaaatctccgaggggacgaaggagaattgctcgagatgtaaattctattaaaaaggaaattgaagaagagaaaacagaagacaaattaaaagataatgatacagaaaataaggatgtagatgatgactatgaaactgcagagaaaaaagaaaatgagctactactggggagaaaaaatacaccaaagcaaaaagagaagaaaattaaaaaacaggaggattctgacaaagactcagatgaagaggaagagaaaagccaagagagggaagaaactgaaagcaaatgtgactctgaaggagaggaagatgaggaagacatggaaccctgcctaacaggaaccaaagtgaaagtaaaatatggacgagggaagactcagaaaatttatgaagccagtattaaaagcactgaaattgatgacggagaagttttatatttggtacattactatggatggaatgtcaggtatgatgagtgggtgaaggctgacaggataatctggcctttggacaaaggtggaccaaagaaaaaacagaagaaaaaagctaaaaataaagaagatagtgaagtggacgaaaagagagatgaggagaggcagaagtcaaaacggggacgacctcctttaaaatcaaccctctcatcaaacatgccgtatggcttatctaagacagcaaacagtgaaggaaaatcagactcttgttcatctgatagtgaaacagaagatgctttagaaaagaatttaataaatgaagaactttctcttaaagatgaactagaaaaaaatgaaaatttgaatgatgataagctagatgaagaaaatccaaagatttctgcacatatattaaaagaaaatgataggactcaaatgcagcctttagaaaccctgaagttagaagttggagagaatgaacaaatagtacagatttttgggaacaaaatggaaaaaacagaagaagttaagaaagaagccgaaaaatctccaaaaggaaagggaagacgaagcaagacaaaagatctttctttagaaattataaagatttcatcatttggccagaatgaagcaggaagtgaacctcatatagaagctcatagtcttgaattgtcttcattagacaataaaaacttttcttctgctacagaagatgaaattgaccaatgtgtgaaagaaaagaagttgaaacggaaaatactaggacaatcatcgccagagaaaaaaataagaattgagaatggaatggaaatgacaaatactgtatctcaagaaaggaccagtgattgtattggatctgagggaatgaaaaacttaaattttgaacagcactttgaaagagaaaatgaaggaatgccatcattgatagcagagtcaaaccaatgcatccaacaactgactagtgaaagatttgatagtccagctgaagaaactgtaaatattccactaaaagaagatgaggatgcaatgcctctgatcgggcctgaaaccttggtttgccatgaagtagatttggatgatttggatgaaaaggataagaccagcattgaggatgtagcagttgaaagctctgagtctaactctcttgtttctattccacctgccctacctcctgtagtccaacataacttttcagtagcttcaccacttactcttagtcaagatgagtctcgaagcgtaaaaagtgagagtgatataacgattgaagttgatagtattgctgaagaatctcaagaaggtctctgtgagagggaatcggcaaatggatttgaaactaatgttgcctctggtacctgtagtataattgtacaagagagagagagcagagagaagggtcagaagaggccaagtgatggaaatagtggattaatggcaaaaaagcaaaagcgtaccccaaagcgaacaagtgctgcagccaaaaatgaaaagaatggaacaggacaaagcagtgatagtgaagatcttcctgtcctagacaattcaagtaaatgtaccccagtaaagcatcttaatgtatctaagccacagaaacttgcacgatctcctgcaagaatatccccgcacatcaaagatggagagaaagataaacacagagaaaaacatccgaattcatcccctaggacatataaatggagctttcagctcaatgaattagataatatgaacagtacagagagaatctcatttctccaagaaaaactacaggaaatcagaaaatattatatgtctttgaagtctgaagttgcaaccatagacaggaggagaaaaagattaaaaaagaaagacagggaagtgtctcatgcgggagcctccatgtcatctgcttcatcagacactggaatgagtccctcatcatcgtctcccccacaaaatgtacttgctgtagaatgtaggtgataaacattttctctaccttcccagcagtttgctgccatggacataaatccccaaaccctgaattacaaccacagaaagcactcaactggtttgacattgctaagtatatcctgtatacttttccaggctggattgtatctattcccctctctcttcttttttcttgttgcaaaaaataagctgattaataagtgaaggttaagcagcctgccatatttgtcataatttttcctctttacttttgtttttcgtttgttgtgatatagaacaaagggcacttagcaaatttgaatttgtataataaagctttcaggtgttacagaaatcgtagacaagcaagtgcacatgataaacatcaaaatattacccagctgaatagttactgctgcactttcactaagatgtatttgaacacttggtgagtagggggtttatgttgtgttttttttcattatcgttttttttatttttgtggaagcacttgctatttagaactgccaaagtatatgttcagcagtgtgcccaggattgaaggtgtaaatgggacaaaataaattgtgaaaggaagtgtagttgactgaaaactacagttgtaataagtcttccactttttataggatttttgagcacacaattatgcaaatattttaatgtttattaatgtttacagtggaattgtgaataagttttcagtggactatcttatcccttgacaaaaatattttgtcttttttctatgtaatttcagagtttttattttgttacaaaaagacaaaaatgaaatatataacaacaatgaagttatttaacaagatttctaaagctgaaatttttgtgtaaaataaggtattatcttgcaacttgttaaatatatttattcagacattggatgttgtatttttatgtattttttaaaatattaataaaatttaaaaaaagaaaattctaggttaattcactctttggatgacaatagctctcagctgtcctttttacaggaggttgcatcctgcagccttgcctgtgttaaagggagtctgtctcagtccatcaaacagtatagaactataaatgggcatctggatcattaaagtatgtccttgtttagaaactttggcagtcctagtatttaaactgttttgaggatcaaatttttggttgcccttaagatactttgtcacagtttttatgtttgctatactgccgaatgaatttatatctcccaaagttgagatgcaacaactaagtaaagcaactatgtatgctttgtctgtgaattgttccacagactgatagattttgtaaataattcttccaaaatcatgtatttaaagcagttttgcatatacattatgtaaaaaggtgattttataaaagcagtttttaaattcatgtttgtacattgaaaggggttttttttttaaacctccttttctgtgtttaatatgctgtagaataataacctagatgctctagactgtatatcaggatctgatttacaagaaaaagtcagagctaaacactagtgatggcatagcattactgaaatcattgtttcttaatttcattttactacattgtgaacttgtgattcagattccattttctcagagaattaaaaacaaaaaaagtactcttgtaaaatgcacttttctgtcttttctttgcaaagcagaagtatctcaatgtaaaataaaaatggagctcagtgggcagtattaataaaggccatgttttaaacataggctttatacttttagttttcatttaagtgattgcttttttcctaagtgcttgtaacttacagttggaaaatcagatttcacaaaaccaagcattttagtatattcagcctttacaataaaatatttctactaattataaaaatgaaaa

SEQ ID NO: 316377 - DNA, 5430 bp, Homo sapiens
aacagcttgttatttggtggattgtggcagtaaatcggggcgagtggggaacccggcgcaggaactgcagccgcggctgggagtggtgctgcccggacgggggcccacggaggtcagaggggaggaggactctggagctgacagcgcgcacttcacccgcagttgttctagcgactgcgaagatagctcgctgagctggaaccccacagatcaccaacaaaaatgaaggcggcagatgagcctgcctacctgacagtgggaaccgatgtcagtgccaagtaccgaggtgccttctgtgaggcaaagattaagactgtgaaaaggctggtgaaagttaaggtactcctgaaacaggataataccacacaattggtacaagatgaccaagtaaagggtcctttaagagttggagctattgttgaaacaaggacatctgatggatcttttcaggaagctattatcagcaagttgacagatgctagttggtataccgtggtgtttgatgatggtgatgagcgaacattgagacgtacctcactttgtctgaaaggagagagacattttgcagagagtgagacacttgaccagcttccattaacaaatccagagcattttggaactccagtaattgcaaagaagacgaacagaggaaggagatcttctcttcctgttactgaagatgaaaaggaagaagaaagcagtgaagaggaagatgaagacaagcgccgtctcaatgatgaattactaggaaaagttgtaagtgtggtgtctgcaacggagaggactgaatggtatcctgctttggtaatatctcccagctgtaatgatgacatcacagtgaaaaaggatcagtgtttagttcgatcatttattgattctaaattttactctatagcaagaaaggacattaaggaagtagacattctcaatctaccggaatctgagctctccactaaaccagggcttcagaaagcaagcatcttcttaaaaactagagttgttcctgataattggaaaatggatataagtgaaatccttgagtcatccagtagtgatgatgaagatggcccagctgaagaaaatgatgaagagaaggaaaaggaggccaaaaagacagaagaagaggtgcctgaggaagaacttgatcctgaagagagggacaacttcctccagcagctttataagtttatggaagacagaggtactccaatcaacaaaccacctgttttgggctataaagatctcaatctcttcaaactcttcagactggtttatcatcagggtggatgtgacaatattgatagtggtgctgtatggaagcaaatttatatggaccttggcattcctattttgaattcagctgcttcctacaatgtaaaaactgcttatagaaagtatctctatggttttgaggagtactgccgttcggcaaatattcagttcagaactgttcatcaccatgaaccaaaagtaaaagaggaaaaaaaagacttagaagaatcaatggaagaggctctcaaattagatcaagaaatgcctttaacagaagtgaagagtgaacctgaggaaaatatcgattcaaacagtgaaagtgaaagagaagagatagaattaaaatctccgaggggacgaaggagaattgctcgagatgtaaattctattaaaaaggaaattgaagaagagaaaacagaagacaaattaaaagataatgatacagaaaataaggatgtagatgatgactatgaaactgcagagaaaaaagaaaatgagctactactggggagaaaaaatacaccaaagcaaaaagagaagaaaattaaaaaacaggaggattctgacaaagactcagatgaagaggaagagaaaagccaagagagggaagaaactgaaagcaaatgtgactctgaaggagaggaagatgaggaagacatggaaccctgcctaacaggaaccaaagtgaaagtaaaatatggacgagggaagactcagaaaatttatgaagccagtattaaaagcactgaaattgatgacggagaagttttatatttggtacattactatggatggaatgtcaggtatgatgagtgggtgaaggctgacaggataatctggcctttggacaaaggtggaccaaagaaaaaacagaagaaaaaagctaaaaataaagaagatagtgaagtggacgaaaagagagatgaggagaggcagaagtcaaaacggggacgacctcctttaaaatcaaccctctcatcaaacatgccgtatggcttatctaagacagcaaacagtgaaggaaaatcagactcttgttcatctgatagtgaaacagaagatgctttagaaaagaatttaataaatgaagaactttctcttaaagatgaactagaaaaaaatgaaaatttgaatgatgataagctagatgaagaaaatccaaagatttctgcacatatattaaaagaaaatgataggactcaaatgcagcctttagaaaccctgaagttagaagttggagagaatgaacaaatagtacagatttttgggaacaaaatggaaaaaacagaagaagttaagaaagaagccgaaaaatctccaaaaggaaagggaagacgaagcaagacaaaagatctttctttagaaattataaagatttcatcatttggccagaatgaagcaggaagtgaacctcatatagaagctcatagtcttgaattgtcttcattagacaataaaaacttttcttctgctacagaagatgaaattgaccaatgtgtgaaagaaaagaagttgaaacggaaaatactaggacaatcatcgccagagaaaaaaataagaattgagaatggaatggaaatgacaaatactgtatctcaagaaaggaccagtgattgtattggatctgagggaatgaaaaacttaaattttgaacagcactttgaaagagaaaatgaaggaatgccatcattgatagcagagtcaaaccaatgcatccaacaactgactagtgaaagatttgatagtccagctgaagaaactgtaaatattccactaaaagaagatgaggatgcaatgcctctgatcgggcctgaaaccttggtttgccatgaagtagatttggatgatttggatgaaaaggataagaccagcattgaggatgtagcagttgaaagctctgagtctaactctcttgtttctattccacctgccctacctcctgtagtccaacataacttttcagtagcttcaccacttactcttagtcaagatgagtctcgaagcgtaaaaagtgagagtgatataacgattgaagttgatagtattgctgaagaatctcaagaaggtctctgtgagagggaatcggcaaatggatttgaaactaatgttgcctctggtacctgtagtataattgtacaagagagagagagcagagagaagggtcagaagaggccaagtgatggaaatagtggattaatggcaaaaaagcaaaagcgtaccccaaagcgaacaagtgctgcagccaaaaatgaaaagaatggaacagatgaattagataatatgaacagtacagagagaatctcatttctccaagaaaaactacaggaaatcagaaaatattatatgtctttgaagtctgaagttgcaaccatagacaggaggagaaaaagattaaaaaagaaagacagggaagtgtctcatgcgggagcctccatgtcatctgcttcatcagacactggaatgagtccctcatcatcgtctcccccacaaaatgtacttgctgtagaatgtaggtgataaacattttctctaccttcccagcagtttgctgccatggacataaatccccaaaccctgaattacaaccacagaaagcactcaactggtttgacattgctaagtatatcctgtatacttttccaggctggattgtatctattcccctctctcttcttttttcttgttgcaaaaaataagctgattaataagtgaaggttaagcagcctgccatatttgtcataatttttcctctttacttttgtttttcgtttgttgtgatatagaacaaagggcacttagcaaatttgaatttgtataataaagctttcaggtgttacagaaatcgtagacaagcaagtgcacatgataaacatcaaaatattacccagctgaatagttactgctgcactttcactaagatgtatttgaacacttggtgagtagggggtttatgttgtgttttttttcattatcgttttttttatttttgtggaagcacttgctatttagaactgccaaagtatatgttcagcagtgtgcccaggattgaaggtgtaaatgggacaaaataaattgtgaaaggaagtgtagttgactgaaaactacagttgtaataagtcttccactttttataggatttttgagcacacaattatgcaaatattttaatgtttattaatgtttacagtggaattgtgaataagttttcagtggactatcttatcccttgacaaaaatattttgtcttttttctatgtaatttcagagtttttattttgttacaaaaagacaaaaatgaaatatataacaacaatgaagttatttaacaagatttctaaagctgaaatttttgtgtaaaataaggtattatcttgcaacttgttaaatatatttattcagacattggatgttgtatttttatgtattttttaaaatattaataaaatttaaaaaaagaaaattctaggttaattcactctttggatgacaatagctctcagctgtcctttttacaggaggttgcatcctgcagccttgcctgtgttaaagggagtctgtctcagtccatcaaacagtatagaactataaatgggcatctggatcattaaagtatgtccttgtttagaaactttggcagtcctagtatttaaactgttttgaggatcaaatttttggttgcccttaagatactttgtcacagtttttatgtttgctatactgccgaatgaatttatatctcccaaagttgagatgcaacaactaagtaaagcaactatgtatgctttgtctgtgaattgttccacagactgatagattttgtaaataattcttccaaaatcatgtatttaaagcagttttgcatatacattatgtaaaaaggtgattttataaaagcagtttttaaattcatgtttgtacattgaaaggggttttttttttaaacctccttttctgtgtttaatatgctgtagaataataacctagatgctctagactgtatatcaggatctgatttacaagaaaaagtcagagctaaacactagtgatggcatagcattactgaaatcattgtttcttaatttcattttactacattgtgaacttgtgattcagattccattttctcagagaattaaaaacaaaaaaagtactcttgta

SEQ ID NO: 316378 - DNA, 5475 bp, Homo sapiens
aacagcttgttatttggtggattgtggcagtaaatcggggcgagtggggaacccggcgcaggaactgcagccgcggctgggagtggtgctgcccggacgggggcccacggaggtcagaggggaggaggactctggagctgacagcgcgcacttcacccgcagttgttctagcgactgcgaagatagctcgctgagctggaaccccacagatcaccaacaaaaatgaaggcggcagatgagcctgcctacctgacagtgggaaccgatgtcagtgccaagtaccgaggtgccttctgtgaggcaaagattaagactgtgaaaaggctggtgaaagttaaggtactcctgaaacaggataataccacacaattggtacaagatgaccaagtaaagggtcctttaagagttggagctattgttgaaacaaggacatctgatggatcttttcaggaagctattatcagcaagttgacagatgctagttggtataccgtggtgtttgatgatggtgatgagcgaacattgagacgtacctcactttgtctgaaaggagagagacattttgcagagagtgagacacttgaccagcttccattaacaaatccagagcattttggaactccagtaattgcaaagaagacgaacagaggaaggagatcttctcttcctgttactgaagatgaaaaggaagaagaaagcagtgaagaggaagatgaagacaagcgccgtctcaatgatgaattactaggaaaagttgtaagtgtggtgtctgcaacggagaggactgaatggtatcctgctttggtaatatctcccagctgtaatgatgacatcacagtgaaaaaggatcagtgtttagttcgatcatttattgattctaaattttactctatagcaagaaaggacattaaggaagtagacattctcaatctaccggaatctgagctctccactaaaccagggcttcagaaagcaagcatcttcttaaaaactagagttgttcctgataattggaaaatggatataagtgaaatccttgagtcatccagtagtgatgatgaagatggcccagctgaagaaaatgatgaagagaaggaaaaggaggccaaaaagacagaagaagaggtgcctgaggaagaacttgatcctgaagagagggacaacttcctccagcagctttataagtttatggaagacagaggtactccaatcaacaaaccacctgttttgggctataaagatctcaatctcttcaaactcttcagactggtttatcatcagggtggatgtgacaatattgatagtggtgctgtatggaagcaaatttatatggaccttggcattcctattttgaattcagctgcttcctacaatgtaaaaactgcttatagaaagtatctctatggttttgaggagtactgccgttcggcaaatattcagttcagaactgttcatcaccatgaaccaaaagtaaaagaggaaaaaaaagacttagaagaatcaatggaagaggctctcaaattagatcaagaaatgcctttaacagaagtgaagagtgaacctgaggaaaatatcgattcaaacagtgaaagtgaaagagaagagatagaattaaaatctccgaggggacgaaggagaattgctcgagatgtaaattctattaaaaaggaaattgaagaagagaaaacagaagacaaattaaaagataatgatacagaaaataaggatgtagatgatgactatgaaactgcagagaaaaaagaaaatgagctactactggggagaaaaaatacaccaaagcaaaaagagaagaaaattaaaaaacaggaggattctgacaaagactcagatgaagaggaagagaaaagccaagagagggaagaaactgaaagcaaatgtgactctgaaggagaggaagatgaggaagacatggaaccctgcctaacaggaaccaaagtgaaagtaaaatatggacgagggaagactcagaaaatttatgaagccagtattaaaagcactgaaattgatgacggagaagttttatatttggtacattactatggatggaatgtcaggtatgatgagtgggtgaaggctgacaggataatctggcctttggacaaaggtggaccaaagaaaaaacagaagaaaaaagctaaaaataaagaagatagtgaagtggacgaaaagagagatgaggagaggcagaagtcaaaacggggacgacctcctttaaaatcaaccctctcatcaaacatgccgtatggcttatctaagacagcaaacagtgaaggaaaatcagactcttgttcatctgatagtgaaacagaagatgctttagaaaagaatttaataaatgaagaactttctcttaaagatgaactagaaaaaaatgaaaatttgaatgatgataagctagatgaagaaaatccaaagatttctgcacatatattaaaagaaaatgataggactcaaatgcagcctttagaaaccctgaagttagaagttggagagaatgaacaaatagtacagatttttgggaacaaaatggaaaaaacagaagaagttaagaaagaagccgaaaaatctccaaaaggaaagggaagacgaagcaagacaaaagatctttctttagaaattataaagatttcatcatttggccagaatgaagcaggaagtgaacctcatatagaagctcatagtcttgaattgtcttcattagacaataaaaacttttcttctgctacagaagatgaaattgaccaatgtgtgaaagaaaagaagttgaaacggaaaatactaggacaatcatcgccagagaaaaaaataagaattgagaatggaatggaaatgacaaatactgtatctcaagaaaggaccagtgattgtattggatctgagggaatgaaaaacttaaattttgaacagcactttgaaagagaaaatgaaggaatgccatcattgatagcagagtcaaaccaatgcatccaacaactgactagtgaaagatttgatagtccagctgaagaaactgtaaatattccactaaaagaagatgaggatgcaatgcctctgatcgggcctgaaaccttggtttgccatgaagtagatttggatgatttggatgaaaaggataagaccagcattgaggatgtagcagttgaaagctctgagtctaactctcttgtttctattccacctgccctacctcctgtagtccaacataacttttcagtagcttcaccacttactcttagtcaagatgagtctcgaagcgtaaaaagtgagagtgatataacgattgaagttgatagtattgctgaagaatctcaagaaggtctctgtgagagggaatcggcaaatggatttgaaactaatgttgcctctggtacctgtagtataattgtacaagagagagagagcagagagaagggtcagaagaggccaagtgatggaaatagtggattaatggcaaaaaagcaaaagcgtaccccaaagcgaacaagtgctgcagccaaaaatgaaaagaatggaacaggacaaagcagtgatagtgaagatcttcctgtcctagacaattcaaatgaattagataatatgaacagtacagagagaatctcatttctccaagaaaaactacaggaaatcagaaaatattatatgtctttgaagtctgaagttgcaaccatagacaggaggagaaaaagattaaaaaagaaagacagggaagtgtctcatgcgggagcctccatgtcatctgcttcatcagacactggaatgagtccctcatcatcgtctcccccacaaaatgtacttgctgtagaatgtaggtgataaacattttctctaccttcccagcagtttgctgccatggacataaatccccaaaccctgaattacaaccacagaaagcactcaactggtttgacattgctaagtatatcctgtatacttttccaggctggattgtatctattcccctctctcttcttttttcttgttgcaaaaaataagctgattaataagtgaaggttaagcagcctgccatatttgtcataatttttcctctttacttttgtttttcgtttgttgtgatatagaacaaagggcacttagcaaatttgaatttgtataataaagctttcaggtgttacagaaatcgtagacaagcaagtgcacatgataaacatcaaaatattacccagctgaatagttactgctgcactttcactaagatgtatttgaacacttggtgagtagggggtttatgttgtgttttttttcattatcgttttttttatttttgtggaagcacttgctatttagaactgccaaagtatatgttcagcagtgtgcccaggattgaaggtgtaaatgggacaaaataaattgtgaaaggaagtgtagttgactgaaaactacagttgtaataagtcttccactttttataggatttttgagcacacaattatgcaaatattttaatgtttattaatgtttacagtggaattgtgaataagttttcagtggactatcttatcccttgacaaaaatattttgtcttttttctatgtaatttcagagtttttattttgttacaaaaagacaaaaatgaaatatataacaacaatgaagttatttaacaagatttctaaagctgaaatttttgtgtaaaataaggtattatcttgcaacttgttaaatatatttattcagacattggatgttgtatttttatgtattttttaaaatattaataaaatttaaaaaaagaaaattctaggttaattcactctttggatgacaatagctctcagctgtcctttttacaggaggttgcatcctgcagccttgcctgtgttaaagggagtctgtctcagtccatcaaacagtatagaactataaatgggcatctggatcattaaagtatgtccttgtttagaaactttggcagtcctagtatttaaactgttttgaggatcaaatttttggttgcccttaagatactttgtcacagtttttatgtttgctatactgccgaatgaatttatatctcccaaagttgagatgcaacaactaagtaaagcaactatgtatgctttgtctgtgaattgttccacagactgatagattttgtaaataattcttccaaaatcatgtatttaaagcagttttgcatatacattatgtaaaaaggtgattttataaaagcagtttttaaattcatgtttgtacattgaaaggggttttttttttaaacctccttttctgtgtttaatatgctgtagaataataacctagatgctctagactgtatatcaggatctgatttacaagaaaaagtcagagctaaacactagtgatggcatagcattactgaaatcattgtttcttaatttcattttactacattgtgaacttgtgattcagattccattttctcagagaattaaaaacaaaaaaagtactcttgta

SEQ ID NO: 316379 - DNA, 4736 bp, Homo sapiens
aggtttgccagatgctttgaaatgggctgtctttcttttcctttcatgtaatgtctgatttttatgtggaagagaatgtaagtagtgctgtataaccctgcggatgctatgccctaagagggaaagcaaatatttgcaagtcagactgaaaaatgtccagaccctgtactgattaagtagaaggggaatctaaccactttgcatttgaaagaaaatgcagcatatagcctgaggaagaacttgatcctgaagagagggacaacttcctccagcagctttataagtttatggaagacagaggtactccaatcaacaaaccacctgttttgggctataaagatctcaatctcttcaaactcttcagactggtttatcatcagggtggatgtgacaatattgatagtggtgctgtatggaagcaaatttatatggaccttggcattcctattttgaattcagctgcttcctacaatgtaaaaactgcttatagaaagtatctctatggttttgaggagtactgccgttcggcaaatattcagttcagaactgttcatcaccatgaaccaaaagtaaaagaggaaaaaaaagacttagaagaatcaatggaagaggctctcaaattagatcaagaaatgcctttaacagaagtgaagagtgaacctgaggaaaatatcgattcaaacagtgaaagtgaaagagaagagatagaattaaaatctccgaggggacgaaggagaattgctcgagatgtaaattctattaaaaaggaaattgaagaagagaaaacagaagacaaattaaaagataatgatacagaaaataaggatgtagatgatgactatgaaactgcagagaaaaaagaaaatgagctactactggggagaaaaaatacaccaaagcaaaaagagaagaaaattaaaaaacaggaggattctgacaaagactcagatgaagaggaagagaaaagccaagagagggaagaaactgaaagcaaatgtgactctgaaggagaggaagatgaggaagacatggaaccctgcctaacaggaaccaaagtgaaagtaaaatatggacgagggaagactcagaaaatttatgaagccagtattaaaagcactgaaattgatgacggagaagttttatatttggtacattactatggatggaatgtcaggtatgatgagtgggtgaaggctgacaggataatctggcctttggacaaaggtggaccaaagaaaaaacagaagaaaaaagctaaaaataaagaagatagtgaagtggacgaaaagagagatgaggagaggcagaagtcaaaacggggacgacctcctttaaaatcaaccctctcatcaaacatgccgtatggcttatctaagacagcaaacagtgaaggaaaatcagactcttgttcatctgatagtgaaacagaagatgctttagaaaagaatttaataaatgaagaactttctcttaaagatgaactagaaaaaaatgaaaatttgaatgatgataagctagatgaagaaaatccaaagatttctgcacatatattaaaagaaaatgataggactcaaatgcagcctttagaaaccctgaagttagaagttggagagaatgaacaaatagtacagatttttgggaacaaaatggaaaaaacagaagaagttaagaaagaagccgaaaaatctccaaaaggaaagggaagacgaagcaagacaaaagatctttctttagaaattataaagatttcatcatttggccagaatgaagcaggaagtgaacctcatatagaagctcatagtcttgaattgtcttcattagacaataaaaacttttcttctgctacagaagatgaaattgaccaatgtgtgaaagaaaagaagttgaaacggaaaatactaggacaatcatcgccagagaaaaaaataagaattgagaatggaatggaaatgacaaatactgtatctcaagaaaggaccagtgattgtattggatctgagggaatgaaaaacttaaattttgaacagcactttgaaagagaaaatgaaggaatgccatcattgatagcagagtcaaaccaatgcatccaacaactgactagtgaaagatttgatagtccagctgaagaaactgtaaatattccactaaaagaagatgaggatgcaatgcctctgatcgggcctgaaaccttggtttgccatgaagtagatttggatgatttggatgaaaaggataagaccagcattgaggatgtagcagttgaaagctctgagtctaactctcttgtttctattccacctgccctacctcctgtagtccaacataacttttcagtagcttcaccacttactcttagtcaagatgagtctcgaagcgtaaaaagtgagagtgatataacgattgaagttgatagtattgctgaagaatctcaagaaggtctctgtgagagggaatcggcaaatggatttgaaactaatgttgcctctggtacctgtagtataattgtacaagagagagagagcagagagaagggtcagaagaggccaagtgatggaaatagtggattaatggcaaaaaagcaaaagcgtaccccaaagcgaacaagtgctgcagccaaaaatgaaaagaatggaacaggacaaagcagtgatagtgaagatcttcctgtcctagacaattcaagtaaatgtaccccagtaaagcatcttaatgtatctaagccacagaaacttgcacgatctcctgcaagaatatccccgcacatcaaagatggagagaaagataaacacagagaaaaacatccgaattcatcccctaggacatataaatggagctttcagctcaatgaattagataatatgaacagtacagagagaatctcatttctccaagaaaaactacaggaaatcagaaaatattatatgtctttgaagtctgaagttgcaaccatagacaggaggagaaaaagattaaaaaagaaagacagggaagtgtctcatgcgggagcctccatgtcatctgcttcatcagacactggaatgagtccctcatcatcgtctcccccacaaaatgtacttgctgtagaatgtaggtgataaacattttctctaccttcccagcagtttgctgccatggacataaatccccaaaccctgaattacaaccacagaaagcactcaactggtttgacattgctaagtatatcctgtatacttttccaggctggattgtatctattcccctctctcttcttttttcttgttgcaaaaaataagctgattaataagtgaaggttaagcagcctgccatatttgtcataatttttcctctttacttttgtttttcgtttgttgtgatatagaacaaagggcacttagcaaatttgaatttgtataataaagctttcaggtgttacagaaatcgtagacaagcaagtgcacatgataaacatcaaaatattacccagctgaatagttactgctgcactttcactaagatgtatttgaacacttggtgagtagggggtttatgttgtgttttttttcattatcgttttttttatttttgtggaagcacttgctatttagaactgccaaagtatatgttcagcagtgtgcccaggattgaaggtgtaaatgggacaaaataaattgtgaaaggaagtgtagttgactgaaaactacagttgtaataagtcttccactttttataggatttttgagcacacaattatgcaaatattttaatgtttattaatgtttacagtggaattgtgaataagttttcagtggactatcttatcccttgacaaaaatattttgtcttttttctatgtaatttcagagtttttattttgttacaaaaagacaaaaatgaaatatataacaacaatgaagttatttaacaagatttctaaagctgaaatttttgtgtaaaataaggtattatcttgcaacttgttaaatatatttattcagacattggatgttgtatttttatgtattttttaaaatattaataaaatttaaaaaaagaaaattctaggttaattcactctttggatgacaatagctctcagctgtcctttttacaggaggttgcatcctgcagccttgcctgtgttaaagggagtctgtctcagtccatcaaacagtatagaactataaatgggcatctggatcattaaagtatgtccttgtttagaaactttggcagtcctagtatttaaactgttttgaggatcaaatttttggttgcccttaagatactttgtcacagtttttatgtttgctatactgccgaatgaatttatatctcccaaagttgagatgcaacaactaagtaaagcaactatgtatgctttgtctgtgaattgttccacagactgatagattttgtaaataattcttccaaaatcatgtatttaaagcagttttgcatatacattatgtaaaaaggtgattttataaaagcagtttttaaattcatgtttgtacattgaaaggggttttttttttaaacctccttttctgtgtttaatatgctgtagaataataacctagatgctctagactgtatatcaggatctgatttacaagaaaaagtcagagctaaacactagtgatggcatagcattactgaaatcattgtttcttaatttcattttactacattgtgaacttgtgattcagattccattttctcagagaattaaaaacaaaaaaagtactcttgta

SEQ ID NO: 316380 - DNA, 3932 bp, Homo sapiens
ttagtaagtaggccacagaaatcttctccttctcctccttcttctcctcctccactgatatgttattaaggtaatacttaggttgtgaataatctacctgttggattcttttagcatattttattctccattaagttattagtagcattatcagtattataacttactgcagggaagaaactgaaagcaaatgtgactctgaaggagaggaagatgaggaagacatggaaccctgcctaacaggaaccaaagtgaaagtaaaatatggacgagggaagactcagaaaatttatgaagccagtattaaaagcactgaaattgatgacggagaagttttatatttggtacattactatggatggaatgtcaggtatgatgagtgggtgaaggctgacaggataatctggcctttggacaaaggtggaccaaagaaaaaacagaagaaaaaagctaaaaataaagaagatagtgaagtggacgaaaagagagatgaggagaggcagaagtcaaaacggggacgacctcctttaaaatcaaccctctcatcaaacatgccgtatggcttatctaagacagcaaacagtgaaggaaaatcagactcttgttcatctgatagtgaaacagaagatgctttagaaaagaatttaataaatgaagaactttctcttaaagatgaactagaaaaaaatgaaaatttgaatgatgataagctagatgaagaaaatccaaagatttctgcacatatattaaaagaaaatgataggactcaaatgcagcctttagaaaccctgaagttagaagttggagagaatgaacaaatagtacagatttttgggaacaaaatggaaaaaacagaagaagttaagaaagaagccgaaaaatctccaaaaggaaagggaagacgaagcaagacaaaagatctttctttagaaattataaagatttcatcatttggccagaatgaagcaggaagtgaacctcatatagaagctcatagtcttgaattgtcttcattagacaataaaaacttttcttctgctacagaagatgaaattgaccaatgtgtgaaagaaaagaagttgaaacggaaaatactaggacaatcatcgccagagaaaaaaataagaattgagaatggaatggaaatgacaaatactgtatctcaagaaaggaccagtgattgtattggatctgagggaatgaaaaacttaaattttgaacagcactttgaaagagaaaatgaaggaatgccatcattgatagcagagtcaaaccaatgcatccaacaactgactagtgaaagatttgatagtccagctgaagaaactgtaaatattccactaaaagaagatgaggatgcaatgcctctgatcgggcctgaaaccttggtttgccatgaagtagatttggatgatttggatgaaaaggataagaccagcattgaggatgtagcagttgaaagctctgagtctaactctcttgtttctattccacctgccctacctcctgtagtccaacataacttttcagtagcttcaccacttactcttagtcaagatgagtctcgaagcgtaaaaagtgagagtgatataacgattgaagttgatagtattgctgaagaatctcaagaaggtctctgtgagagggaatcggcaaatggatttgaaactaatgttgcctctggtacctgtagtataattgtacaagagagagagagcagagagaagggtcagaagaggccaagtgatggaaatagtggattaatggcaaaaaagcaaaagcgtaccccaaagcgaacaagtgctgcagccaaaaatgaaaagaatggaacaggacaaagcagtgatagtgaagatcttcctgtcctagacaattcaagtaaatgtaccccagtaaagcatcttaatgtatctaagccacagaaacttgcacgatctcctgcaagaatatccccgcacatcaaagatggagagaaagataaacacagagaaaaacatccgaattcatcccctaggacatataaatggagctttcagctcaatgaattagataatatgaacagtacagagagaatctcatttctccaagaaaaactacaggaaatcagaaaatattatatgtctttgaagtctgaagttgcaaccatagacaggaggagaaaaagattaaaaaagaaagacagggaagtgtctcatgcgggagcctccatgtcatctgcttcatcagacactggaatgagtccctcatcatcgtctcccccacaaaatgtacttgctgtagaatgtaggtgataaacattttctctaccttcccagcagtttgctgccatggacataaatccccaaaccctgaattacaaccacagaaagcactcaactggtttgacattgctaagtatatcctgtatacttttccaggctggattgtatctattcccctctctcttcttttttcttgttgcaaaaaataagctgattaataagtgaaggttaagcagcctgccatatttgtcataatttttcctctttacttttgtttttcgtttgttgtgatatagaacaaagggcacttagcaaatttgaatttgtataataaagctttcaggtgttacagaaatcgtagacaagcaagtgcacatgataaacatcaaaatattacccagctgaatagttactgctgcactttcactaagatgtatttgaacacttggtgagtagggggtttatgttgtgttttttttcattatcgttttttttatttttgtggaagcacttgctatttagaactgccaaagtatatgttcagcagtgtgcccaggattgaaggtgtaaatgggacaaaataaattgtgaaaggaagtgtagttgactgaaaactacagttgtaataagtcttccactttttataggatttttgagcacacaattatgcaaatattttaatgtttattaatgtttacagtggaattgtgaataagttttcagtggactatcttatcccttgacaaaaatattttgtcttttttctatgtaatttcagagtttttattttgttacaaaaagacaaaaatgaaatatataacaacaatgaagttatttaacaagatttctaaagctgaaatttttgtgtaaaataaggtattatcttgcaacttgttaaatatatttattcagacattggatgttgtatttttatgtattttttaaaatattaataaaatttaaaaaaagaaaattctaggttaattcactctttggatgacaatagctctcagctgtcctttttacaggaggttgcatcctgcagccttgcctgtgttaaagggagtctgtctcagtccatcaaacagtatagaactataaatgggcatctggatcattaaagtatgtccttgtttagaaactttggcagtcctagtatttaaactgttttgaggatcaaatttttggttgcccttaagatactttgtcacagtttttatgtttgctatactgccgaatgaatttatatctcccaaagttgagatgcaacaactaagtaaagcaactatgtatgctttgtctgtgaattgttccacagactgatagattttgtaaataattcttccaaaatcatgtatttaaagcagttttgcatatacattatgtaaaaaggtgattttataaaagcagtttttaaattcatgtttgtacattgaaaggggttttttttttaaacctccttttctgtgtttaatatgctgtagaataataacctagatgctctagactgtatatcaggatctgatttacaagaaaaagtcagagctaaacactagtgatggcatagcattactgaaatcattgtttcttaatttcattttactacattgtgaacttgtgattcagattccattttctcagagaattaaaaacaaaaaaagtactcttgta

SEQ ID NO: 316381 - DNA, 2064 bp, Homo sapiens
tcaggttgaccttgtttctgattgagccaagttccttcatgggatctcccaactagaggtttaagagtttttgtctctttaatctttacattttatgatgtatttttaagtgttgagtagtgcttaactgaccaaagactaactccacttaattgagccaaacaaaatttttgctgacaatttgttactccttcatgtgacatataagaggcctgtgattaaggtgaataatgttaagaattttatttctaatttgctgttagctgggtatctttgtgtaacagtttttggatctaacatagttgttttgattccacagtgtctcatgcgggagcctccatgtcatctgcttcatcagacactggaatgagtccctcatcatcgtctcccccacaaaatgtacttgctgtagaatgtaggtgataaacattttctctaccttcccagcagtttgctgccatggacataaatccccaaaccctgaattacaaccacagaaagcactcaactggtttgacattgctaagtatatcctgtatacttttccaggctggattgtatctattcccctctctcttcttttttcttgttgcaaaaaataagctgattaataagtgaaggttaagcagcctgccatatttgtcataatttttcctctttacttttgtttttcgtttgttgtgatatagaacaaagggcacttagcaaatttgaatttgtataataaagctttcaggtgttacagaaatcgtagacaagcaagtgcacatgataaacatcaaaatattacccagctgaatagttactgctgcactttcactaagatgtatttgaacacttggtgagtagggggtttatgttgtgttttttttcattatcgttttttttatttttgtggaagcacttgctatttagaactgccaaagtatatgttcagcagtgtgcccaggattgaaggtgtaaatgggacaaaataaattgtgaaaggaagtgtagttgactgaaaactacagttgtaataagtcttccactttttataggatttttgagcacacaattatgcaaatattttaatgtttattaatgtttacagtggaattgtgaataagttttcagtggactatcttatcccttgacaaaaatattttgtcttttttctatgtaatttcagagtttttattttgttacaaaaagacaaaaatgaaatatataacaacaatgaagttatttaacaagatttctaaagctgaaatttttgtgtaaaataaggtattatcttgcaacttgttaaatatatttattcagacattggatgttgtatttttatgtattttttaaaatattaataaaatttaaaaaaagaaaattctaggttaattcactctttggatgacaatagctctcagctgtcctttttacaggaggttgcatcctgcagccttgcctgtgttaaagggagtctgtctcagtccatcaaacagtatagaactataaatgggcatctggatcattaaagtatgtccttgtttagaaactttggcagtcctagtatttaaactgttttgaggatcaaatttttggttgcccttaagatactttgtcacagtttttatgtttgctatactgccgaatgaatttatatctcccaaagttgagatgcaacaactaagtaaagcaactatgtatgctttgtctgtgaattgttccacagactgatagattttgtaaataattcttccaaaatcatgtatttaaagcagttttgcatatacattatgtaaaaaggtgattttataaaagcagtttttaaattcatgtttgtacattgaaaggggttttttttttaaacctccttttctgtgtttaatatgctgtagaataataacctagatgctctagactgtatatcaggatctgatttacaagaaaaagtcagagctaaacactagtgatggcatagcattactgaaatcattgtttcttaatttcattttactacattgtgaacttgtgattcagattccattttctcagagaattaaaaacaaaaaaagtactcttgta

SEQ ID NO: 316382 - DNA, 2025 bp, Homo sapiens
caacattctctctttccccttatttcaggtcagaagaggccaagtgatggaaatagtggattaatggcaaaaaagcaaaagcgtaccccaaagcgaacaagtgctgcagccaaaaatgaaaagaatggaacagatgaattagataatatgaacagtacagagagaatctcatttctccaagaaaaactacaggaaatcagaaaatattatatgtctttgaagtctgaagttgcaaccatagacaggaggagaaaaagattaaaaaagaaagacagggaagtgtctcatgcgggagcctccatgtcatctgcttcatcagacactggaatgagtccctcatcatcgtctcccccacaaaatgtacttgctgtagaatgtaggtgataaacattttctctaccttcccagcagtttgctgccatggacataaatccccaaaccctgaattacaaccacagaaagcactcaactggtttgacattgctaagtatatcctgtatacttttccaggctggattgtatctattcccctctctcttcttttttcttgttgcaaaaaataagctgattaataagtgaaggttaagcagcctgccatatttgtcataatttttcctctttacttttgtttttcgtttgttgtgatatagaacaaagggcacttagcaaatttgaatttgtataataaagctttcaggtgttacagaaatcgtagacaagcaagtgcacatgataaacatcaaaatattacccagctgaatagttactgctgcactttcactaagatgtatttgaacacttggtgagtagggggtttatgttgtgttttttttcattatcgttttttttatttttgtggaagcacttgctatttagaactgccaaagtatatgttcagcagtgtgcccaggattgaaggtgtaaatgggacaaaataaattgtgaaaggaagtgtagttgactgaaaactacagttgtaataagtcttccactttttataggatttttgagcacacaattatgcaaatattttaatgtttattaatgtttacagtggaattgtgaataagttttcagtggactatcttatcccttgacaaaaatattttgtcttttttctatgtaatttcagagtttttattttgttacaaaaagacaaaaatgaaatatataacaacaatgaagttatttaacaagatttctaaagctgaaatttttgtgtaaaataaggtattatcttgcaacttgttaaatatatttattcagacattggatgttgtatttttatgtattttttaaaatattaataaaatttaaaaaaagaaaattctaggttaattcactctttggatgacaatagctctcagctgtcctttttacaggaggttgcatcctgcagccttgcctgtgttaaagggagtctgtctcagtccatcaaacagtatagaactataaatgggcatctggatcattaaagtatgtccttgtttagaaactttggcagtcctagtatttaaactgttttgaggatcaaatttttggttgcccttaagatactttgtcacagtttttatgtttgctatactgccgaatgaatttatatctcccaaagttgagatgcaacaactaagtaaagcaactatgtatgctttgtctgtgaattgttccacagactgatagattttgtaaataattcttccaaaatcatgtatttaaagcagttttgcatatacattatgtaaaaaggtgattttataaaagcagtttttaaattcatgtttgtacattgaaaggggttttttttttaaacctccttttctgtgtttaatatgctgtagaataataacctagatgctctagactgtatatcaggatctgatttacaagaaaaagtcagagctaaacactagtgatggcatagcattactgaaatcattgtttcttaatttcattttactacattgtgaacttgtgattcagattccattttctcagagaattaaaaacaaaaaaagtactcttgta

SEQ ID NO: 316383 - DNA, 1805 bp, Homo sapiens
tcgacatgacacgatgagatactgattaacccagaagcatgggtgcacgctgcatgacgggggccttccgtagtcatctgcttcatcaactagagacatggattgtttcgcatcaggtaccgcgactcgaatgtcagctagtcgtggtacatgtcgtgtgatccggagttgtctctagcacttcccagcagtttgctgccatggacataaatccccaaaccctgaattacaaccacagaaagcactcaactggtttgacattgctaagtatatcctgtatacttttccaggctggattgtatctattcccctctctcttcttttttcttgttgcaaaaaataagctgattaataagtgaaggttaagcagcctgccatatttgtcataatttttcctctttacttttgtttttcgtttgttgtgatatagaacaaagggcacttagcaaatttgaatttgtataataaagctttcaggtgttacagaaatcgtagacaagcaagtgcacatgataaacatcaaaatattacccagctgaatagttactgctgcactttcactaagatgtatttgaacacttggtgagtagggggtttatgttgtgttttttttcattatcgttttttttatttttgtggaagcacttgctatttagaactgccaaagtatatgttcagcagtgtgcccaggattgaaggtgtaaatgggacaaaataaattgtgaaaggaagtgtagttgactgaaaactacagttgtaataagtcttccactttttataggatttttgagcacacaattatgcaaatattttaatgtttattaatgtttacagtggaattgtgaataagttttcagtggactatcttatcccttgacaaaaatattttgtcttttttctatgtaatttcagagtttttattttgttacaaaaagacaaaaatgaaatatataacaacaatgaagttatttaacaagatttctaaagctgaaatttttgtgtaaaataaggtattatcttgcaacttgttaaatatatttattcagacattggatgttgtatttttatgtattttttaaaatattaataaaatttaaaaaaagaaaattctaggttaattcactctttggatgacaatagctctcagctgtcctttttacaggaggttgcatcctgcagccttgcctgtgttaaagggagtctgtctcagtccatcaaacagtatagaactataaatgggcatctggatcattaaagtatgtccttgtttagaaactttggcagtcctagtatttaaactgttttgaggatcaaatttttggttgcccttaagatactttgtcacagtttttatgtttgctatactgccgaatgaatttatatctcccaaagttgagatgcaacaactaagtaaagcaactatgtatgctttgtctgtgaattgttccacagactgatagattttgtaaataattcttccaaaatcatgtatttaaagcagttttgcatatacattatgtaaaaaggtgattttataaaagcagtttttaaattcatgtttgtacattgaaaggggttttttttttaaacctccttttctgtgtttaatatgctgtagaataataacctagatgctctagactgtatatcaggatctgatttacaagaaaaagtcagagctaaacactagtgatggcatagcattactgaaatcattgtttcttaatttcattttactacattgtgaacttgtgattcagattccattttctcagagaattaaaaacaaaaaaagtactcttgta

SEQ ID NO: 316384 - DNA, 1470 bp, Homo sapiens
aggtaaaaggtgttttgaatttagtaaaactgttatttaatgcttaaaacttaattgaattgtataattctcaacattaagttgcatagatatgtgttcttaagttgttgaattcttaatgcatcctgtgttcagcaagttttttttaatatatactgtaccatgggtgtgttaagaatagttatactttataataatggaacttcatattattgcaatgcatatttaaagagtacttgttgaaagcataccattcacctaaagttaaaaattctggtttatttaaagctataagaagaatcatttctgggcttgtgatgttaatattgcccccctactggggttatgtgcccaggattgaaggtgtaaatgggacaaaataaattgtgaaaggaagtgtagttgactgaaaactacagttgtaataagtcttccactttttataggatttttgagcacacaattatgcaaatattttaatgtttattaatgtttacagtggaattgtgaataagttttcagtggactatcttatcccttgacaaaaatattttgtcttttttctatgtaatttcagagtttttattttgttacaaaaagacaaaaatgaaatatataacaacaatgaagttatttaacaagatttctaaagctgaaatttttgtgtaaaataaggtattatcttgcaacttgttaaatatatttattcagacattggatgttgtatttttatgtattttttaaaatattaataaaatttaaaaaaagaaaattctaggttaattcactctttggatgacaatagctctcagctgtcctttttacaggaggttgcatcctgcagccttgcctgtgttaaagggagtctgtctcagtccatcaaacagtatagaactataaatgggcatctggatcattaaagtatgtccttgtttagaaactttggcagtcctagtatttaaactgttttgaggatcaaatttttggttgcccttaagatactttgtcacagtttttatgtttgctatactgccgaatgaatttatatctcccaaagttgagatgcaacaactaagtaaagcaactatgtatgctttgtctgtgaattgttccacagactgatagattttgtaaataattcttccaaaatcatgtatttaaagcagttttgcatatacattatgtaaaaaggtgattttataaaagcagtttttaaattcatgtttgtacattgaaaggggttttttttttaaacctccttttctgtgtttaatatgctgtagaataataacctagatgctctagactgtatatcaggatctgatttacaagaaaaagtcagagctaaacactagtgatggcatagcattactgaaatcattgtttcttaatttcattttactacattgtgaacttgtgattcagattccattttctcagagaattaaaaacaaaaaaagtactcttgta

SEQ ID NO: 316385 - DNA, 468 bp, Homo sapiens
tgtgattgaaagttatttcagcgcatctaatctgctttactccatttcttatgttgtcctgatttcctttccaaaatcaggatgcaggtagtgtctgcgattatgatacatattacagagctacatcttttggggtgaacagccttcatatcaaaacttatgatagttatgtttagctatcacaagctcagacgtctcaggacggcattttatgatcagtttttctgtttatgattctatctaaaacaccaagaaaatagtaacacagaaaagagtaacaaaaatttttttaaattactgggctttactttttaaaaatgtgtttaataacatgaattcaagttagatgcaaagactgtaagatttcttaaatgaaatattgtttgtttaggtatctctatggttttgaggagtactgccgttcggcaaatattcagttcagaactgttcatcaccatgaaccaaaag

SEQ ID NO: 316386 - DNA, 748 bp, Homo sapiens
atttatgaagccagtattaaaagcactgaaattgatgacggagaagttttatatttggtacattactatggatggaatgtcaggtaagcaagaaactattttcttactattgaaattttttcgatgattaaatagaacatcaacttaatgttatgaagagtgaaagcaaataatggtacatatttacaaagcacaccttggttctgaattttccaagactttgacattcctgctgttatactagcagtgtcaatgcttctagccagagactaccaggatcacacctgtagttagaacaagttacatttattactcatttatagtgagggagaacacacagcaaggggaaccatagggcatcttagtaatatggtgttaaatgaatcaacagaggctcaaggcaccatctttgggaaaacaataattcataattctgtggagacatattactgactatgagcagggagccaggcctgcaacttccaaccgtgcaagtgtttgtttcattaatcagaaatcaagcctatgtcaagcactgtaataattctaagtcgactaattaataaaaaagaacgttagaacttacatttgatcttccgttagatgattttggggagggtttaagaaaggcagggcatgggggctcttgcatgtaatcccagcactttgggaggtggaggcggaaggactgcttgaggccaggagttcaagaccagacctggcaacatagttagacccccatctctac

SEQ ID NO: 316387 - DNA, 5670 bp, Homo sapiens
  misc_feature (1819)..(1821): n is a, c, g, or t
  misc_feature (1873)..(1874): n is a, c, g, or t
  misc_feature (1922)..(1923): n is a, c, g, or t
aacagcttgttatttggtggattgtggcagtaaatcggggcgagtggggaacccggcgcaggaactgcagccgcggctgggagtggtgctgcccggacgggggcccacggaggtcagaggggaggaggactctggagctgacagcgcgcacttcacccgcagttgttctagcgactgcgaagatagctcgctgagctggaaccccacagatcaccaacaaaaatgaaggcggcagatgagcctgcctacctgacagtgggaaccgatgtcagtgccaagtaccgaggtgccttctgtgaggcaaagattaagactgtgaaaaggctggtgaaagttaaggtactcctgaaacaggataataccacacaattggtacaagatgaccaagtaaagggtcctttaagagttggagctattgttgaaacaaggacatctgatggatcttttcaggaagctattatcagcaagttgacagatgctagttggtataccgtggtgtttgatgatggtgatgagcgaacattgagacgtacctcactttgtctgaaaggagagagacattttgcagagagtgagacacttgaccagcttccattaacaaatccagagcattttggaactccagtaattgcaaagaagacgaacagaggaaggagatcttctcttcctgttactgaagatgaaaaggaagaagaaagcagtgaagaggaagatgaagacaagcgccgtctcaatgatgaattactaggaaaagttgtaagtgtggtgtctgcaacggagaggactgaatggtatcctgctttggtaatatctcccagctgtaatgatgacatcacagtgaaaaaggatcagtgtttagttcgatcatttattgattctaaattttactctatagcaagaaaggacattaaggaagtagacattctcaatctaccggaatctgagctctccactaaaccagggcttcagaaagcaagcatcttcttaaaaactagagttgttcctgataattggaaaatggatataagtgaaatccttgagtcatccagtagtgatgatgaagatggcccagctgaagaaaatgatgaagagaaggaaaaggaggccaaaaagacagaagaagaggtgcctgaggaagaacttgatcctgaagagagggacaacttcctccagcagctttataagtttatggaagacagaggtactccaatcaacaaaccacctgttttgggctataaagatctcaatctcttcaaactcttcagactggtttatcatcagggtggatgtgacaatattgatagtggtgctgtatggaagcaaatttatatggaccttggcattcctattttgaattcagctgcttcctacaatgtaaaaactgcttatagaaagtatctctatggttttgaggagtactgccgttcggcaaatattcagttcagaactgttcatcaccatgaaccaaaagtaaaagaggaaaaaaaagacttagaagaatcaatggaagaggctctcaaattagatcaagaaatgcctttaacagaagtgaagagtgaacctgaggaaaatatcgattcaaacagtgaaagtgaaagagaagagatagaattaaaatctccgaggggacgaaggagaattgctcgagatgtaaattctattaaaaaggaaattgaagaagagaaaacagaagacaaattaaaagataatgatacagaaaataaggatgtagatgatgactatgaaactgcagagaaaaaagaaaatgagctactactggggagaaaaaatacaccaaagcaaaaagagaagaaggggnnnccaaaaacactcaaaaaaaaagagaaagaaaaacccccccgggggggggggnnttttaaaaaccctttttttttttaaaaaaggggagattttttgggggnnttttttggcccccccttccctggggggggaacaaatgtagtatttttaattattggggggggggggaccccccccaaaatttttttttaggcccccctttttaaaaaccccccataattttgtgcggcggggaaatgttttttatttttgggggcccccttctctaagggatgggaattgtcacggtatgatgagtgggtgaaggctgacaggataatctggcctttggacaaaggtggaccaaagaaaaaacagaagaaaaaagctaaaaataaagaagatagtgaagtggacgaaaagagagatgaggagaggcagaagtcaaaacggggacgacctcctttaaaatcaaccctctcatcaaacatgccgtatggcttatctaagacagcaaacagtgaaggaaaatcagactcttgttcatctgatagtgaaacagaagatgctttagaaaagaatttaataaatgaagaactttctcttaaagatgaactagaaaaaaatgaaaatttgaatgatgataagctagatgaagaaaatccaaagatttctgcacatatattaaaagaaaatgataggactcaaatgcagcctttagaaaccctgaagttagaagttggagagaatgaacaaatagtacagatttttgggaacaaaatggaaaaaacagaagaagttaagaaagaagccgaaaaatctccaaaaggaaagggaagacgaagcaagacaaaagatctttctttagaaattataaagatttcatcatttggccagaatgaagcaggaagtgaacctcatatagaagctcatagtcttgaattgtcttcattagacaataaaaacttttcttctgctacagaagatgaaattgaccaatgtgtgaaagaaaagaagttgaaacggaaaatactaggacaatcatcgccagagaaaaaaataagaattgagaatggaatggaaatgacaaatactgtatctcaagaaaggaccagtgattgtattggatctgagggaatgaaaaacttaaattttgaacagcactttgaaagagaaaatgaaggaatgccatcattgatagcagagtcaaaccaatgcatccaacaactgactagtgaaagatttgatagtccagctgaagaaactgtaaatattccactaaaagaagatgaggatgcaatgcctctgatcgggcctgaaaccttggtttgccatgaagtagatttggatgatttggatgaaaaggataagaccagcattgaggatgtagcagttgaaagctctgagtctaactctcttgtttctattccacctgccctacctcctgtagtccaacataacttttcagtagcttcaccacttactcttagtcaagatgagtctcgaagcgtaaaaagtgagagtgatataacgattgaagttgatagtattgctgaagaatctcaagaaggtctctgtgagagggaatcggcaaatggatttgaaactaatgttgcctctggtacctgtagtataattgtacaagagagagagagcagagagaagggtcagaagaggccaagtgatggaaatagtggattaatggcaaaaaagcaaaagcgtaccccaaagcgaacaagtgctgcagccaaaaatgaaaagaatggaacaggacaaagcagtgatagtgaagatcttcctgtcctagacaattcaagtaaatgtaccccagtaaagcatcttaatgtatctaagccacagaaacttgcacgatctcctgcaagaatatccccgcacatcaaagatggagagaaagataaacacagagaaaaacatccgaattcatcccctaggacatataaatggagctttcagctcaatgaattagataatatgaacagtacagagagaatctcatttctccaagaaaaactacaggaaatcagaaaatattatatgtctttgaagtctgaagttgcaaccatagacaggaggagaaaaagattaaaaaagaaagacagggaagtgtctcatgcgggagcctccatgtcatctgcttcatcagacactggaatgagtccctcatcatcgtctcccccacaaaatgtacttgctgtagaatgtaggtgataaacattttctctaccttcccagcagtttgctgccatggacataaatccccaaaccctgaattacaaccacagaaagcactcaactggtttgacattgctaagtatatcctgtatacttttccaggctggattgtatctattcccctctctcttcttttttcttgttgcaaaaaataagctgattaataagtgaaggttaagcagcctgccatatttgtcataatttttcctctttacttttgtttttcgtttgttgtgatatagaacaaagggcacttagcaaatttgaatttgtataataaagctttcaggtgttacagaaatcgtagacaagcaagtgcacatgataaacatcaaaatattacccagctgaatagttactgctgcactttcactaagatgtatttgaacacttggtgagtagggggtttatgttgtgttttttttcattatcgttttttttatttttgtggaagcacttgctatttagaactgccaaagtatatgttcagcagtgtgcccaggattgaaggtgtaaatgggacaaaataaattgtgaaaggaagtgtagttgactgaaaactacagttgtaataagtcttccactttttataggatttttgagcacacaattatgcaaatattttaatgtttattaatgtttacagtggaattgtgaataagttttcagtggactatcttatcccttgacaaaaatattttgtcttttttctatgtaatttcagagtttttattttgttacaaaaagacaaaaatgaaatatataacaacaatgaagttatttaacaagatttctaaagctgaaatttttgtgtaaaataaggtattatcttgcaacttgttaaatatatttattcagacattggatgttgtatttttatgtattttttaaaatattaataaaatttaaaaaaagaaaattctaggttaattcactctttggatgacaatagctctcagctgtcctttttacaggaggttgcatcctgcagccttgcctgtgttaaagggagtctgtctcagtccatcaaacagtatagaactataaatgggcatctggatcattaaagtatgtccttgtttagaaactttggcagtcctagtatttaaactgttttgaggatcaaatttttggttgcccttaagatactttgtcacagtttttatgtttgctatactgccgaatgaatttatatctcccaaagttgagatgcaacaactaagtaaagcaactatgtatgctttgtctgtgaattgttccacagactgatagattttgtaaataattcttccaaaatcatgtatttaaagcagttttgcatatacattatgtaaaaaggtgattttataaaagcagtttttaaattcatgtttgtacattgaaaggggttttttttttaaacctccttttctgtgtttaatatgctgtagaataataacctagatgctctagactgtatatcaggatctgatttacaagaaaaagtcagagctaaacactagtgatggcatagcattactgaaatcattgtttcttaatttcattttactacattgtgaacttgtgattcagattccattttctcagagaattaaaaacaaaaaaagtactcttgta

SEQ ID NO: 316388 - DNA, 3558 bp, Homo sapiens
tagccggtccgagatctccttcactgctctttagagaatcaccttggttgattctcttaggcagacagaataaagctttgaaataaagaagatagtgaagtggacgaaaagagagatgaggagaggcagaagtcaaaacggggacgacctcctttaaaatcaaccctctcatcaaacatgccgtatggcttatctaagacagcaaacagtgaaggaaaatcagactcttgttcatctgatagtgaaacagaagatgctttagaaaagaatttaataaatgaagaactttctcttaaagatgaactagaaaaaaatgaaaatttgaatgatgataagctagatgaagaaaatccaaagatttctgcacatatattaaaagaaaatgataggactcaaatgcagcctttagaaaccctgaagttagaagttggagagaatgaacaaatagtacagatttttgggaacaaaatggaaaaaacagaagaagttaagaaagaagccgaaaaatctccaaaaggaaagggaagacgaagcaagacaaaagatctttctttagaaattataaagatttcatcatttggccagaatgaagcaggaagtgaacctcatatagaagctcatagtcttgaattgtcttcattagacaataaaaacttttcttctgctacagaagatgaaattgaccaatgtgtgaaagaaaagaagttgaaacggaaaatactaggacaatcatcgccagagaaaaaaataagaattgagaatggaatggaaatgacaaatactgtatctcaagaaaggaccagtgattgtattggatctgagggaatgaaaaacttaaattttgaacagcactttgaaagagaaaatgaaggaatgccatcattgatagcagagtcaaaccaatgcatccaacaactgactagtgaaagatttgatagtccagctgaagaaactgtaaatattccactaaaagaagatgaggatgcaatgcctctgatcgggcctgaaaccttggtttgccatgaagtagatttggatgatttggatgaaaaggataagaccagcattgaggatgtagcagttgaaagctctgagtctaactctcttgtttctattccacctgccctacctcctgtagtccaacataacttttcagtagcttcaccacttactcttagtcaagatgagtctcgaagcgtaaaaagtgagagtgatataacgattgaagttgatagtattgctgaagaatctcaagaaggtctctgtgagagggaatcggcaaatggatttgaaactaatgttgcctctggtacctgtagtataattgtacaagagagagagagcagagagaagggtcagaagaggccaagtgatggaaatagtggattaatggcaaaaaagcaaaagcgtaccccaaagcgaacaagtgctgcagccaaaaatgaaaagaatggaacaggacaaagcagtgatagtgaagatcttcctgtcctagacaattcaagtaaatgtaccccagtaaagcatcttaatgtatctaagccacagaaacttgcacgatctcctgcaagaatatccccgcacatcaaagatggagagaaagataaacacagagaaaaacatccgaattcatcccctaggacatataaatggagctttcagctcaatgaattagataatatgaacagtacagagagaatctcatttctccaagaaaaactacaggaaatcagaaaatattatatgtctttgaagtctgaagttgcaaccatagacaggaggagaaaaagattaaaaaagaaagacagggaagtgtctcatgcgggagcctccatgtcatctgcttcatcagacactggaatgagtccctcatcatcgtctcccccacaaaatgtacttgctgtagaatgtaggtgataaacattttctctaccttcccagcagtttgctgccatggacataaatccccaaaccctgaattacaaccacagaaagcactcaactggtttgacattgctaagtatatcctgtatacttttccaggctggattgtatctattcccctctctcttcttttttcttgttgcaaaaaataagctgattaataagtgaaggttaagcagcctgccatatttgtcataatttttcctctttacttttgtttttcgtttgttgtgatatagaacaaagggcacttagcaaatttgaatttgtataataaagctttcaggtgttacagaaatcgtagacaagcaagtgcacatgataaacatcaaaatattacccagctgaatagttactgctgcactttcactaagatgtatttgaacacttggtgagtagggggtttatgttgtgttttttttcattatcgttttttttatttttgtggaagcacttgctatttagaactgccaaagtatatgttcagcagtgtgcccaggattgaaggtgtaaatgggacaaaataaattgtgaaaggaagtgtagttgactgaaaactacagttgtaataagtcttccactttttataggatttttgagcacacaattatgcaaatattttaatgtttattaatgtttacagtggaattgtgaataagttttcagtggactatcttatcccttgacaaaaatattttgtcttttttctatgtaatttcagagtttttattttgttacaaaaagacaaaaatgaaatatataacaacaatgaagttatttaacaagatttctaaagctgaaatttttgtgtaaaataaggtattatcttgcaacttgttaaatatatttattcagacattggatgttgtatttttatgtattttttaaaatattaataaaatttaaaaaaagaaaattctaggttaattcactctttggatgacaatagctctcagctgtcctttttacaggaggttgcatcctgcagccttgcctgtgttaaagggagtctgtctcagtccatcaaacagtatagaactataaatgggcatctggatcattaaagtatgtccttgtttagaaactttggcagtcctagtatttaaactgttttgaggatcaaatttttggttgcccttaagatactttgtcacagtttttatgtttgctatactgccgaatgaatttatatctcccaaagttgagatgcaacaactaagtaaagcaactatgtatgctttgtctgtgaattgttccacagactgatagattttgtaaataattcttccaaaatcatgtatttaaagcagttttgcatatacattatgtaaaaaggtgattttataaaagcagtttttaaattcatgtttgtacattgaaaggggttttttttttaaacctccttttctgtgtttaatatgctgtagaataataacctagatgctctagactgtatatcaggatctgatttacaagaaaaagtcagagctaaacactagtgatggcatagcattactgaaatcattgtttcttaatttcattttactacattgtgaacttgtgattcagattccattttctcagagaattaaaaacaaaaaaagtactcttgta

SEQ ID NO: 316389 - DNA, 2103 bp, Homo sapiens
aacagcttgttatttggtggattgtggcagtaaatcggggcgagtggggaacccggcgcaggaactgcagccgcggctgggagtggtgctgcccggacgggggcccacggaggtcagaggggaggaggactctggagctgacagcgcgcacttcacccgcagttgttctagcgactgcgaagatagctcgctgagctggaaccccacagatcaccaacaaaaatgaaggcggcagatgagcctgcctacctgacagtgggaaccgatgtcagtgccaagtaccgaggtgccttctgtgaggcaaagattaagactgtgaaaaggctggtgaaagttaaggtactcctgaaacaggataataccacacaattggtacaagatgaccaagtaaagggtcctttaagagttggagctattgttgaaacaaggacatctgatggatcttttcaggaagctattatcagcaagttgacagatgctagttggtataccgtggtgtttgatgatggtgatgagcgaacattgagacgtacctcactttgtctgaaaggagagagacattttgcagagagtgagacacttgaccagcttccattaacaaatccagagcattttggaactccagtaattgcaaagaagacgaacagaggaaggagatcttctcttcctgttactgaagatgaaaaggaagaagaaagcagtgaagaggaagatgaagacaagcgccgtctcaatgatgaattactaggaaaagttgtaagtgtggtgtctgcaacggagaggactgaatggtatcctgctttggtaatatctcccagctgtaatgatgacatcacagtgaaaaaggatcagtgtttagttcgatcatttattgattctaaattttactctatagcaagaaaggacattaaggaagtagacattctcaatctaccggaatctgagctctccactaaaccagggcttcagaaagcaagcatcttcttaaaaactagagttgttcctgataattggaaaatggatataagtgaaatccttgagtcatccagtagtgatgatgaagatggcccagctgaagaaaatgatgaagagaaggaaaaggaggccaaaaagacagaagaagaggtgcctgaggaagaacttgatcctgaagagagggacaacttcctccagcagctttataagtttatggaagacagaggtactccaatcaacaaaccacctgttttgggctataaagatctcaatctcttcaaactcttcagactggtttatcatcagggtggatgtgacaatattgatagtggtgctgtatggaagcaaatttatatggaccttggcattcctattttgaattcagctgcttcctacaatgtaaaaactgcttatagaaagtatctctatggttttgaggagtactgccgttcggcaaatattcagttcagaactgttcatcaccatgaaccaaaagtaaaagaggaaaaaaaagacttagaagaatcaatggaagaggctctcaaattagatcaagaaatgcctttaacagaagtgaagagtgaacctgaggaaaatatcgattcaaacagtgaaagtgaaagagaagagatagaattaaaatctccgaggggacgaaggagaattgctcgagatgtaaattctattaaaaaggaaattgaagaagagaaaacagaagacaaattaaaagataatgatacagaaaataaggatgtagatgatgactatgaaactgcagagaaaaaagaaaatgagctactactggggagaaaaaatacaccaaagcaaaaagagaagaaaattaaaaaacaggaggattctgacaaagactcagatgaagaggaagagaaaagccaagagagggaagaaactgaaagcaaatgtgactctgaaggagaggaagatgaggaagacatggaaccctgcctaacaggaaccaaagtgaaagtaaaatatggacgagggaagactcagtatcacactatatacctctgtgacatacctgcacctatcccctaattctattataaaagttggccaaaaagaaaagtaatgcattttcttcccttgacgatatttagtgcattt

SEQ ID NO: 316390 - DNA, 918 bp, Homo sapiens
ccccttctttcaccccaatcgggcataggatctagggccctgtgggtgttaattggacgaggtctctctactctacccagcttgcgctccccagccgcaagtcggccgcgctttgcccgtcagcgcttggagctttctgcgtcgcttcccgctgcgcctgcgcggtcccgcctcgccccacgcgcgggctcgcgcttcggtttccccagacctgctcgcagcaccctgctgtcttcccggtccggcccgctgcccgcggcgccagcaccatgctcttctattcttttttcaagtcccttgtgggcaaggatgtggtcgtggaactaaagaatgacctgagcatctgtggaaccctccattctgtggatcagtatctcaacatcaaactaactgacatcagtgtcacagaccctgagaaataccctcacatgttatcagtgaagaactgcttcattcggggctcagtggtccgatacgtgcagctgccagcagatgaggtcgacacacagttgctacaggatgcggcaaggaaggaagccctgcagcagaaacagtgatggctcctcctcctcttcccctccctctttcattggtgacccataaccccaagtcccagcccagaacccctaacccccaatacttgaaggggttttgtttttttactaatgatggttttgtgggttttttttaagggatgagtggatgagaggagtaatagggaacagctatcctctcttgagaaggggaggataagtaggctgggaaacttcaaagccttcccagtccccagcacctgcctttctcactacttctctggagatggtaggagagtttcctaggtctttccagggcagcatgtgattcatttggggatggaaggaatctgtcccgcatcgggaataaaatttatgatgcaaa

SEQ ID NO: 316391 - DNA, 334 bp, Homo sapiens
tacccctaggctggagttaggtccggagtttttatcttcatctttagtactgtactgtttctcaggttcattgaggaggcactgagaacaaatgggatattttttccatgatgagggaaaaaaccccaaccctgagagagattcagtgaggatagcgggagacggaaaagttagacctcagagcacttctctgccagctcttctattcttttttcaagtcccttgtgggcaaggatgtggtcgtggaactaaagaatgacctgagagtcttgccctgtcgcccaggctggattacaggcatgcgccacaacgcctggctcattttttgtatctt

SEQ ID NO: 316392 - DNA, 843 bp, Homo sapiens
tacccctaggctggagttaggtccggagtttttatcttcatctttagtactgtactgtttctcaggttcattgaggaggcactgagaacaaatgggatattttttccatgatgagggaaaaaaccccaaccctgagagagattcagtgaggatagcgggagacggaaaagttagacctcagagcacttctctgccagctcttctattcttttttcaagtcccttgtgggcaaggatgtggtcgtggaactaaagaatgacctgagcatctgtggaaccctccattctgtggatcagtatctcaacatcaaactaactgacatcagtgtcacagaccctgagaaataccctcacatgttatcagtgaagaactgcttcattcggggctcagtggtccgatacgtgcagctgccagcagatgaggtcgacacacagttgctacaggatgcggcaaggaaggaagccctgcagcagaaacagtgatggctcctcctcctcttcccctccctctttcattggtgacccataaccccaagtcccagcccagaacccctaacccccaatacttgaaggggttttgtttttttactaatgatggttttgtgggttttttttaagggatgagtggatgagaggagtaatagggaacagctatcctctcttgagaaggggaggataagtaggctgggaaacttcaaagccttcccagtccccagcacctgcctttctcactacttctctggagatggtaggagagtttcctaggtctttccagggcagcatgtgattcatttggggatggaaggaatctgtcccgcatcgggaataaaatttatgatgcaaa

SEQ ID NO: 316393 - DNA, 790 bp, Homo sapiens
tacccctaggctggagttaggtccggagtttttatcttcatctttagtactgtactgtttctcaggttcattgaggaggcactgagaacaaatgggatattttttccatgatgagggaaaaaaccccaaccctgagagagattcagtgaggatagcgggagacggtcccttgtgggcaaggatgtggtcgtggaactaaagaatgacctgagcatctgtggaaccctccattctgtggatcagtatctcaacatcaaactaactgacatcagtgtcacagaccctgagaaataccctcacatgttatcagtgaagaactgcttcattcggggctcagtggtccgatacgtgcagctgccagcagatgaggtcgacacacagttgctacaggatgcggcaaggaaggaagccctgcagcagaaacagtgatggctcctcctcctcttcccctccctctttcattggtgacccataaccccaagtcccagcccagaacccctaacccccaatacttgaaggggttttgtttttttactaatgatggttttgtgggttttttttaagggatgagtggatgagaggagtaatagggaacagctatcctctcttgagaaggggaggataagtaggctgggaaacttcaaagccttcccagtccccagcacctgcctttctcactacttctctggagatggtaggagagtttcctaggtctttccagggcagcatgtgattcatttggggatggaaggaatctgtcccgcatcgggaataaaatttatgatgcaaa

SEQ ID NO: 316394 - DNA, 850 bp, Homo sapiens
ccccttctttcaccccaatcgggcataggatctagggccctgtgggtgttaattggacgaggtctctctactctacccagcttgcgctccccagccgcaagtcggccgcgctttgcccgtcagcgcttggagctttctgcgtcgcttcccgctgcgcctgcgcggtcccgcctcgccccacgcgcgggctcgcgcttcggtttccccagacctgctcgcagcaccctgctgtcttcccggtccggcccgctgcccgcggcgccagcaccatgcatctgtggaaccctccattctgtggatcagtatctcaacatcaaactaactgacatcagtgtcacagaccctgagaaataccctcacatgttatcagtgaagaactgcttcattcggggctcagtggtccgatacgtgcagctgccagcagatgaggtcgacacacagttgctacaggatgcggcaaggaaggaagccctgcagcagaaacagtgatggctcctcctcctcttcccctccctctttcattggtgacccataaccccaagtcccagcccagaacccctaacccccaatacttgaaggggttttgtttttttactaatgatggttttgtgggttttttttaagggatgagtggatgagaggagtaatagggaacagctatcctctcttgagaaggggaggataagtaggctgggaaacttcaaagccttcccagtccccagcacctgcctttctcactacttctctggagatggtaggagagtttcctaggtctttccagggcagcatgtgattcatttggggatggaaggaatctgtcccgcatcgggaataaaatttatgatgcaaa

SEQ ID NO: 316395 - DNA, 897 bp, Homo sapiens
ccccttctttcaccccaatcgggcataggatctagggccctgtgggtgttaattggacgaggtctctctactctacccagcttgcgctccccagccgcaagtcggccgcgctttgcccgtcagcgcttggagctttctgcgtcgcttcccgctgcgcctgcgcggtcccgcctcgccccacgcgcgggctcgcgcttcggtttccccagacctgctcgcagcaccctgctgtcttcccggtccggcccgctgcccgcggcgccagcaccatgtcccttgtgggcaaggatgtggtcgtggaactaaagaatgacctgagcatctgtggaaccctccattctgtggatcagtatctcaacatcaaactaactgacatcagtgtcacagaccctgagaaataccctcacatgttatcagtgaagaactgcttcattcggggctcagtggtccgatacgtgcagctgccagcagatgaggtcgacacacagttgctacaggatgcggcaaggaaggaagccctgcagcagaaacagtgatggctcctcctcctcttcccctccctctttcattggtgacccataaccccaagtcccagcccagaacccctaacccccaatacttgaaggggttttgtttttttactaatgatggttttgtgggttttttttaagggatgagtggatgagaggagtaatagggaacagctatcctctcttgagaaggggaggataagtaggctgggaaacttcaaagccttcccagtccccagcacctgcctttctcactacttctctggagatggtaggagagtttcctaggtctttccagggcagcatgtgattcatttggggatggaaggaatctgtcccgcatcgggaataaaatttatgatgcaaa

SEQ ID NO: 316396 - DNA, 3569 bp, Homo sapiens
acaaagggaggaggaagaagggagcggggtcggagccgtcggggccaaaggagacggggccaggaacaggcagtctcggcccaactgcggacgctccctccaccccctgcgcaaaaagacccaaccggagttgaggcgctgcccctgaaggccccaccttacacttggcgggggccggagccaggctcccaggactgctccagaaccgagggaagctcgggtccctccaagctagccatggtgaggcgccggaggccccggggccccacccccccggcctgaccacactgccctgggtgccctcctccagaagcccgagatgcggggggccgggagacaacactcctggctccccagagaggcgtgggtctggggctgagggccagggcccggatgcccaggttccgggactagggccttggcagccagcgggggtggggaccacgggcacccagagaaggtcctccacacatcccagcgccggctcccggccatggagcccttgaagagcctcttcctcaagagccctctagggtcatggaatggcagtggcagcgggggtggtgggggcggtggaggaggccggcctgaggggtctccaaaggcagcgggttatgccaacccggtgtggacagccctgttcgactacgagcccagtgggcaggatgagctggccctgaggaagggtgaccgtgtggaggtgctgtcccgggacgcagccatctcaggagacgagggctggtgggcgggccaggtgggtggccaggtgggcatcttcccgtccaactatgtgtctcggggtggcggcccgcccccctgcgaggtggccagcttccaggagctgcggctggaggaggtgatcggcattggaggctttggcaaggtgtacaggggcagctggcgaggtgagctggtggctgtgaaggcagctcgccaggaccccgatgaggacatcagtgtgacagccgagagcgttcgccaggaggcccggctcttcgccatgctggcacaccccaacatcattgccctcaaggctgtgtgcctggaggagcccaacctgtgcctggtgatggagtatgcagccggtgggcccctcagccgagctctggccgggcggcgcgtgcctccccatgtgctggtcaactgggctgtgcagattgcccgtgggatgcactacctgcactgcgaggccctggtgcccgtcatccaccgtgatctcaagtccaacaacattttgctgctgcagcccattgagagtgacgacatggagcacaagaccctgaagatcaccgactttggcctggcccgagagtggcacaaaaccacacaaatgagtgccgcgggcacctacgcctggatggctcctgaggttatcaaggcctccaccttctctaagggcagtgacgtctggagttttggggtgctgctgtgggaactgctgaccggggaggtgccataccgtggcattgactgccttgctgtggcctatggcgtagctgttaacaagctcacactgcccatcccatccacctgccccgagcccttcgcacagcttatggccgactgctgggcgcaggacccccaccgcaggcccgacttcgcctccatcctgcagcagttggaggcgctggaggcacaggtcctacgggaaatgccgcgggactccttccattccatgcaggaaggctggaagcgcgagatccagggtctcttcgacgagctgcgagccaaggaaaaggaactactgagccgcgaggaggagctgacgcgagcggcgcgcgagcagcggtcacaggcggagcagctgcggcggcgcgagcacctgctggcccagtgggagctagaggtgttcgagcgcgagctgacgctgctgctgcagcaggtggaccgcgagcgaccgcacgtgcgccgccgccgcgggacattcaagcgcagcaagctccgggcgcgcgacggcggcgagcgtatcagcatgccactcgacttcaagcaccgcatcaccgtgcaggcctcacccggccttgaccggaggagaaacgtcttcgaggtcgggcctggggattcgcccacctttccccggttccgagccatccagttggagcctgcagagccaggccaggcatggggccgccagtccccccgacgtctggaggactcaagcaatggagagcggcgagcatgctgggcttggggtcccagttcccccaagcctggggaagcccagaatgggaggagaaggtcccgcatggacgaagccacatggtacctggattcagatgactcatcccccttaggatctccttccacacccccagcactcaatggtaaccccccgcggcctagcctggagcccgaggagcccaagaggcctgtccccgcagagcgcggtagcagctctgggacgcccaagctgatccagcgggcgctgctgcgcggcaccgccctgctcgcctcgctgggccttggccgcgacctgcagccgccgggaggcccaggacgcgagcgcggggagtccccgacaacaccccccacgccaacgcccgcgccctgcccgaccgagccgcccccttccccgctcatctgcttctcgctcaagacgcccgactccccgcccactcctgcacccctgttgctggacctgggtatccctgtgggccagcggtcagccaagagcccccgacgtgaggaggagccccgcggaggcactgtctcacccccaccggggacatcacgctctgctcctggcaccccaggcaccccacgttcaccacccctgggcctcatcagccgacctcggccctcgccccttcgcagccgcattgatccctggagctttgtgtcagctgggccacggccttctcccctgccatcaccacagcctgcaccccgccgagcaccctggaccttgttcccggactcagaccccttctgggactccccacctgccaaccccttccaggggggcccccaggactgcagggcacagaccaaagacatgggtgcccaggccccgtgggtgccggaagcggggccttgagtgggccaggccactcccccgagctccagctgccttaggaggagtcacagcatacactggaacaggagctgggtcagcctctgcagctgcctcagtttccccagggaccccacccccctttgggggtcaggaacactacactgcacaggaagccttcacactggaagggggacctgcgcccccacatctgaaacctgtaggtccccccagctcacctgccctactggggcccaacactgtacccagctggttgggaggaccagagcctgtctcagggaattgcctgctggggtgatgcagggaggaggggaggtgcagggaagaggggccggcctcagctgtcaccagcacttttgaccaagtcctgctactgcggcccctgccctagggcttagagcatggacctcctgccctgggggtcatctggggccagggctctctggatgccttcctgctgccccagccagggttggagtcttagcctcgggatccagtgaagccagaagccaaataaactcaaaagctgtctccc

SEQ ID NO: 316397 - DNA, 697 bp, Homo sapiens
  misc_feature (683)..(683): n is a, c, g, or t
  misc_feature (697)..(697): n is a, c, g, or t
acaaagggaggaggaagaagggagcggggtcggagccgtcggggccaaaggagacggggccaggaacaggcagtctcggcccaactgcggacgctccctccaccccctgcgcaaaaagacccaaccggagttgaggcgctgcccctgaaggccccaccttacacttggcgggggccggagccaggctcccaggactgctccagaaccgagggaagctcgggtccctccaagctagccatggtgaggcgccggaggccccggggccccacccccccggcctgaccacactgccctgggtgccctcctccagaagcccgagatgcggggggccgggagacaacactcctggctccccagagaggcgtgggtctggggctgagggccagggcccggatgcccaggttccgggactagggccttggcagccagcgggggtggggaccacgggcacccagagaaggtcctccacacatcccagcgccggctcccggccatggagcccttgaagagcctcttcctcaagagccctctagggtcatggaatggcagtggcagcgggggtggtgggggcggtggaggaggccggcctgaggggtctccaaaggcagcgggttatgccaacccggtgtggacagccctgttcgactacgagcccagtgggccagggaattgaagccttgggnccccccctttttgn

SEQ ID NO: 316398 - DNA, 3599 bp, Homo sapiens
acaaagggaggaggaagaagggagcggggtcggagccgtcggggccaaaggagacggggccaggaacaggcagtctcggcccaactgcggacgctccctccaccccctgcgcaaaaagacccaaccggagttgaggcgctgcccctgaaggccccaccttacacttggcgggggccggagccaggctcccaggactgctccagaaccgagggaagctcgggtccctccaagctagccatggtgaggcgccggaggccccggggccccacccccccggcctgaccacactgccctgggtgccctcctccagaagcccgagatgcggggggccgggagacaacactcctggctccccagagaggcgtgggtctggggctgagggccagggcccggatgcccaggttccgggactagggccttggcagccagcgggggtggggaccacgggcacccagagaaggtcctccacacatcccagcgccggctcccggccatggagcccttgaagagcctcttcctcaagagccctctagggtcatggaatggcagtggcagcgggggtggtgggggcggtggaggaggccggcctgaggggtctccaaaggcagcgggttatgccaacccggtgtggacagccctgttcgactacgagcccagtgggcaggatgagctggccctgaggaagggtgaccgtgtggaggtgctgtcccgggacgcagccatctcaggagacgagggctggtgggcgggccaggtgggtggccaggtgggcatcttcccgtccaactatgtgtctcggggtggcggcccgcccccctgcgaggtggccagcttccaggagctgcggctggaggaggtgatcggcattggaggctttggcaaggtgtacaggggcagctggcgaggtgagctggtggctgtgaaggcagctcgccaggaccccgatgaggacatcagtgtgacagccgagagcgttcgccaggaggcccggctcttcgccatgctggcacaccccaacatcattgccctcaaggctgtgtgcctggaggagcccaacctgtgcctggtgatggagtatgcagccggtgggcccctcagccgagctctggccgggcggcgcgtgcctccccatgtgctggtcaactgggctgtgcagattgcccgtgggatgcactacctgcactgcgaggccctggtgcccgtcatccaccgtgatctcaagtccaacaacattttgctgctgcagcccattgagagtgacgacatggagcacaagaccctgaagatcaccgactttggcctggcccgagagtggcacaaaaccacacaaatgagtgccgcgggcacctacgcctggatggctcctgaggttatcaaggcctccaccttctctaagggcagtgacgtctggagttttggggtgctgctgtgggaactgctgaccggggaggtgccataccgtggcattgactgccttgctgtggcctatggcgtagctgttaacaagctcacactgcccatcccatccacctgccccgagcccttcgcacagcttatggccgactgctgggcgcaggacccccaccgcaggcccgacttcgcctccatcctgcagcagttggaggcgctggaggcacaggtcctacgggaaatgccgcgggactccttccattccatgcaggaaggctggaagcgcgagatccagggtctcttcgacgagctgcgagccaaggaaaaggaactactgagccgcgaggaggagctgacgcgagcggcgcgcgagcagcggtcacaggcggagcagctgcggcggcgcgagcacctgctggcccagtgggagctagaggtgttcgagcgcgagctgacgctgctgctgcagcaggtggaccgcgagcgaccgcacgtgcgccgccgccgcgggacattcaagcgcagcaagctccgggcgcgcgacggcggcgagcgtatcagcatgccactcgacttcaagcaccgcatcaccgtgcaggcctcacccggccttgaccggaggagaaacgtcttcgaggtcgggcctggggattcgcccacctttccccggttccgagccatccagttggagcctgcagagccaggccaggcatggggccgccagtccccccgacgtctggaggactcaagcaatggagagcggcgagcatgctgggcttggggtcccagttcccccaagcctggggaagcccagaatgggaggagaaggtcccgcatggacgaagccacatggtacctggattcagatgactcatcccccttaggatctccttccacacccccagcactcaatggtaaccccccgcggcctagcctggagcccgaggagcccaagaggcctgtccccgcagagcgcggtagcagctctgggacgcccaagctgatccagcgggcgctgctgcgcggcaccgccctgctcgcctcgctgggccttggccgcgacctgcagccgccgggaggcccaggacgcgagcgcggggagtccccgacaacaccccccacgccaacgcccgcgccctgcccgaccgagccgcccccttccccgctcatctgcttctcgctcaagacgcccgactccccgcccactcctgcacccctgttgctggacctgggtatccctgtgggccagcggtcagccaagagcccccgacgtgaggaggagccccgcggaggcactgtctcacccccaccggggacatcacgctctgctcctggcaccccaggcaccccacgttcaccacccctgggcctcatcagccgacctcggccctcgccccttcgcagccgcattgatccctggagctttgtgtcagctgggccacggccttctcccctgccatcaccacagcctgcaccccgccgagcaccctggaccttgttcccggactcagaccccttctgggactccccacctgccaaccccttccaggggggcccccaggactgcagggcacagaccaaagacatgggtgcccaggccccgtgggtgccggaagcggggccttgagtgggccaggccactcccccgagctccagctgccttaggaggagtcacagcatacactggaacaggagctgggtcagcctctgcagctgcctcagtttccccagggaccccacccccctttgggggtcaggaacactacactgcacaggaagccttcacactggaagggggacctgcgcccccacatctgaaacctgtaggtccccccagctcacctgccctactggggcccaacactgtacccagctggttgggaggaccagagcctgtctcagggaattgcctgctggggtgatgcagggaggaggggaggtgcagggaagaggggccggcctcagctgtcaccagcacttttgaccaagtcctgctactgcggcccctgccctagggcttagagcatggacctcctgccctgggggtcatctggggccagggctctctggatgccttcctgctgccccagccagggttggagtcttagcctcgggatccagtgaagccagaagccaaataaactcaaaagctgtctcccaaaaaaaaaaacccccaaaaagggcggccg

SEQ ID NO: 316399 - DNA, 3539 bp, Homo sapiens
acaaagggaggaggaagaagggagcggggtcggagccgtcggggccaaaggagacggggccaggaacaggcagtctcggcccaactgcggacgctccctccaccccctgcgcaaaaagacccaaccggagttgaggcgctgcccctgaaggccccaccttacacttggcgggggccggagccaggctcccaggactgctccagaaccgagggaagctcgggtccctccaagctagccatggtgagggcctgaccacactgccctgggtgccctcctccagaagcccgagatgcggggggccgggagacaacactcctggctccccagagaggcgtgggtctggggctgagggccagggcccggatgcccaggttccgggactagggccttggcagccagcgggggtggggaccacgggcacccagagaaggtcctccacacatcccagcgccggctcccggccatggagcccttgaagagcctcttcctcaagagccctctagggtcatggaatggcagtggcagcgggggtggtgggggcggtggaggaggccggcctgaggggtctccaaaggcagcgggttatgccaacccggtgtggacagccctgttcgactacgagcccagtgggcaggatgagctggccctgaggaagggtgaccgtgtggaggtgctgtcccgggacgcagccatctcaggagacgagggctggtgggcgggccaggtgggtggccaggtgggcatcttcccgtccaactatgtgtctcggggtggcggcccgcccccctgcgaggtggccagcttccaggagctgcggctggaggaggtgatcggcattggaggctttggcaaggtgtacaggggcagctggcgaggtgagctggtggctgtgaaggcagctcgccaggaccccgatgaggacatcagtgtgacagccgagagcgttcgccaggaggcccggctcttcgccatgctggcacaccccaacatcattgccctcaaggctgtgtgcctggaggagcccaacctgtgcctggtgatggagtatgcagccggtgggcccctcagccgagctctggccgggcggcgcgtgcctccccatgtgctggtcaactgggctgtgcagattgcccgtgggatgcactacctgcactgcgaggccctggtgcccgtcatccaccgtgatctcaagtccaacaacattttgctgctgcagcccattgagagtgacgacatggagcacaagaccctgaagatcaccgactttggcctggcccgagagtggcacaaaaccacacaaatgagtgccgcgggcacctacgcctggatggctcctgaggttatcaaggcctccaccttctctaagggcagtgacgtctggagttttggggtgctgctgtgggaactgctgaccggggaggtgccataccgtggcattgactgccttgctgtggcctatggcgtagctgttaacaagctcacactgcccatcccatccacctgccccgagcccttcgcacagcttatggccgactgctgggcgcaggacccccaccgcaggcccgacttcgcctccatcctgcagcagttggaggcgctggaggcacaggtcctacgggaaatgccgcgggactccttccattccatgcaggaaggctggaagcgcgagatccagggtctcttcgacgagctgcgagccaaggaaaaggaactactgagccgcgaggaggagctgacgcgagcggcgcgcgagcagcggtcacaggcggagcagctgcggcggcgcgagcacctgctggcccagtgggagctagaggtgttcgagcgcgagctgacgctgctgctgcagcaggtggaccgcgagcgaccgcacgtgcgccgccgccgcgggacattcaagcgcagcaagctccgggcgcgcgacggcggcgagcgtatcagcatgccactcgacttcaagcaccgcatcaccgtgcaggcctcacccggccttgaccggaggagaaacgtcttcgaggtcgggcctggggattcgcccacctttccccggttccgagccatccagttggagcctgcagagccaggccaggcatggggccgccagtccccccgacgtctggaggactcaagcaatggagagcggcgagcatgctgggcttggggtcccagttcccccaagcctggggaagcccagaatgggaggagaaggtcccgcatggacgaagccacatggtacctggattcagatgactcatcccccttaggatctccttccacacccccagcactcaatggtaaccccccgcggcctagcctggagcccgaggagcccaagaggcctgtccccgcagagcgcggtagcagctctgggacgcccaagctgatccagcgggcgctgctgcgcggcaccgccctgctcgcctcgctgggccttggccgcgacctgcagccgccgggaggcccaggacgcgagcgcggggagtccccgacaacaccccccacgccaacgcccgcgccctgcccgaccgagccgcccccttccccgctcatctgcttctcgctcaagacgcccgactccccgcccactcctgcacccctgttgctggacctgggtatccctgtgggccagcggtcagccaagagcccccgacgtgaggaggagccccgcggaggcactgtctcacccccaccggggacatcacgctctgctcctggcaccccaggcaccccacgttcaccacccctgggcctcatcagccgacctcggccctcgccccttcgcagccgcattgatccctggagctttgtgtcagctgggccacggccttctcccctgccatcaccacagcctgcaccccgccgagcaccctggaccttgttcccggactcagaccccttctgggactccccacctgccaaccccttccaggggggcccccaggactgcagggcacagaccaaagacatgggtgcccaggccccgtgggtgccggaagcggggccttgagtgggccaggccactcccccgagctccagctgccttaggaggagtcacagcatacactggaacaggagctgggtcagcctctgcagctgcctcagtttccccagggaccccacccccctttgggggtcaggaacactacactgcacaggaagccttcacactggaagggggacctgcgcccccacatctgaaacctgtaggtccccccagctcacctgccctactggggcccaacactgtacccagctggttgggaggaccagagcctgtctcagggaattgcctgctggggtgatgcagggaggaggggaggtgcagggaagaggggccggcctcagctgtcaccagcacttttgaccaagtcctgctactgcggcccctgccctagggcttagagcatggacctcctgccctgggggtcatctggggccagggctctctggatgccttcctgctgccccagccagggttggagtcttagcctcgggatccagtgaagccagaagccaaataaactcaaaagctgtctccc

SEQ ID NO: 316400 - DNA, 4340 bp, Homo sapiens
acaaagggaggaggaagaagggagcggggtcggagccgtcggggccaaaggagacggggccaggaacaggcagtctcggcccaactgcggacgctccctccaccccctgcgcaaaaagacccaaccggagttgaggcgctgcccctgaaggccccaccttacacttggcgggggccggagccaggctcccaggactgctccagaaccgagggaagctcgggtccctccaagctagccatggtgaggcgccggaggccccggggccccacccccccggcctgaccacactgccctgggtgccctcctccagaagcccgagatgcggggggccgggagacaacactcctggctccccagagaggcgtgggtctggggctgagggccagggcccggatgcccaggttccgggactagggccttggcagccagcgggggtggggaccacgggcacccagagaaggtcctccacacatcccagcgccggctcccggccatggagcccttgaagagcctcttcctcaagagccctctagggtcatggaatggcagtggcagcgggggtggtgggggcggtggaggaggccggcctgaggggtctccaaaggcagcgggttatgccaacccggtgtggacagccctgttcgactacgagcccagtgggcaggatgagctggccctgaggaagggtgaccgtgtggaggtgctgtcccgggacgcagccatctcaggagacgagggctggtgggcgggccaggtgggtggccaggtgggcatcttcccgtccaactatgtgtctcggggtggcggcccgcccccctgcgaggtggccagcttccaggagctgcggctggaggaggtgatcggcattggaggctttggcaaggtgtacaggggcagctggcgaggtgagctggtggctgtgaaggcagctcgccaggaccccgatgaggacatcagtgtgacagccgagagcgttcgccaggaggcccggctcttcgccatgctggcacaccccaacatcattgccctcaaggctgtgtgcctggaggagcccaacctgtgcctggtgatggagtatgcagccggtgggcccctcagccgagctctggccgggcggcgcgtgcctccccatgtgctggtcaactgggctgtgcagattgcccgtgggatgcactacctgcactgcgaggccctggtgcccgtcatccaccgtgatctcaagtccaacaacattttgctgctgcagcccattgagagtgacgacatggagcacaagaccctgaagatcaccgactttggcctggcccgagagtggcacaaaaccacacaaatgagtgccgcgggcacctacgcctggatggctcctgaggttatcaaggcctccaccttctctaagggcagtgacgtctggagttttggggtgctgctgtgggaactgctgaccggggaggtgccataccgtggcattgactgccttgctgtggcctatggcgtagctgttaacaagctcacactgcccatcccatccacctgccccgagcccttcgcacagcttatggccgactgctgggcgcaggacccccaccgcaggcccgacttcgcctccatcctgcagcagttggaggcgctggaggcacaggtcctacgggaaatgccgcgggactccttccattccatgcaggaaggctggaagcgcgagatccagggtctcttcgacgagctgcgagccaaggaaaaggaactactgagccgcgaggaggagctgacgcgagcggcgcgcgagcagcggtcacaggcggagcagctgcggcggcgcgagcacctgctggcccagtgggagctagaggtgttcgagcgcgagctgacgctgctgctgcagcaggtggaccgcgagcgaccgcacgtgcgccgccgccgcgggacattcaagcgcagcaagctccgggcgcgcgacggcggcgagcgtatcagcatgccactcgacttcaagcaccgcatcaccgtgcaggcctcacccggccttgaccggaggagaaacgtcttcgaggtcgggcctggggattcgcccacctttccccggttccgagccatccagttggagcctgcagagccaggccaggcatggggccgccagtccccccgacgtctggaggactcaagcaatggagagcggcgagcatgctgggcttggggtcccagttcccccaagcctggggaagcccagaatgggaggagaaggtcccgcatggacgaagccacatggtacctggattcagatgactcatcccccttaggatctccttccacacccccagcactcaatggtaaccccccgcggcctagcctggagcccgaggagcccaagaggcctgtccccgcagagcgcggtagcagctctgggacgcccaagctgatccagcgggcgctgctgcgcggcaccgccctgctcgcctcgctgggccttggccgcgacctgcagccgccgggaggcccaggacgcgagcgcggggagtccccgacaacaccccccacgccaacgcccgcgccctgcccgaccgagccgcccccttccccgctcatctgcttctcgctcaagacgcccgactccccgcccactcctgcacccctgttgctggacctgggtatccctgtgggccagcggtcagccaagagcccccgacgtgaggaggagccccgcggaggcactgtctcacccccaccggggacatcacgctctgctcctggcaccccaggcaccccacgttcaccacccctgggcctcatcagccgacctcggccctcgccccttcgcagccgcattgatccctggagctttgtgtcagctgggccacggccttctcccctgccatcaccacagcctgcaccccgccgagcaccctggaccttgttcccggactcagaccccttctgggactccccacctgccaaccccttccaggggggcccccaggactgcagggcacagaccaaagacatgggtgcccaggccccgtgggtgccggaagcggggccttgagtgggccaggccactcccccgagctccagctgccttaggaggagtcacagcatacactggaacaggagctgggtcagcctctgcagctgcctcagtttccccagggaccccacccccctttgggggtcaggaacactacactgcacaggaagccttcacactggaagggggacctgcgcccccacatctgaaacctgtaggtccccccagctcacctgccctactggggcccaacactgtacccagctggttgggaggaccagagcctgtctcagggaattgcctgctggggtgatgcagggaggaggggaggtgcagggaagaggggccggcctcagctgtcaccagcacttttgaccaagtcctgctactgcggcccctgccctagggcttagagcatggacctcctgccctgggggtcatctggggccagggctctctggatgccttcctgctgccccagccagggttggagtcttagcctcgggatccagtgaagccagaagccaaataaactcaaaagctgtctcccaaaaaaaaaaaaaaaaaaaaaaaaaaaaaaaaaaaaaaaaaaaaaaaaaaaaaaaaagagggggggggcgccgccctaagaatccccccgcggggggcgcccccatccccggcgcccccccttttgtgtgtgacagggggggcccccaaagggggggcgcaagcaaacaaaacacccagagacgggaccgcggccccgcgcgcctaacaaacacacagacccgagacgcggggaaaacagcgcgccacgcccggggccccttcggggaaaagagcccccaccaccagcgggcggggggggccaccaatggtggcgcaccaaccccacctcacgccagatcgatatataccgccccctgccggagacaactataacaaaccctccagcggcgatcaccgtgcggcgcacccccccgccgcgccaataacttgccgtggccgccgcaaaacatggcggccccaccccgcggcactgtcgtctcccggccacacttatccagccggccgcggcggcaagtaaagaacaccccgccgcccccgcccgccgccccgagcagaccgcgacgcccccccgccgaccaccgcccccgcccgcgcagcaggggcgcaggcccctacgcccgcccactcaccctcgacgccacccgaccacaccgccgcccgcacgctccgctggatccagccccgccaccaccacacccccccgacacgcccgcccccgcccgccgccccgcccacacacccacacgcccaccccccgcacccacccccc

SEQ ID NO: 316401 - DNA, 1775 bp, Homo sapiens
gactcagacgagtagctttccttatccagacccaggggctcaagaaagcagtgaggctggtcacagtctcacagccatcgtgccgctccctatgtggcctgggagctggccttgggcccctgcaggttggggtcctggctctacttcatcacaaacctgaaccctgctccccccaacccaaatcccagacttcaagcaccgcatcaccgtgcaggcctcacccggccttgaccggaggagaaacgtcttcgaggtcgggcctggggattcgcccacctttccccggttccgagccatccagttggagcctgcagagccaggccaggcatggggccgccagtccccccgacgtctggaggactcaagcaatggagagcggcgagcatgctgggcttggggtcccagttcccccaagcctggggaagcccagaatgggaggagaaggtcccgcatggacgaagccacatggtacctggattcagatgactcatcccccttaggatctccttccacacccccagcactcaatggtaaccccccgcggcctagcctggagcccgaggagcccaagaggcctgtccccgcagagcgcggtagcagctctgggacgcccaagctgatccagcgggcgctgctgcgcggcaccgccctgctcgcctcgctgggccttggccgcgacctgcagccgccgggaggcccaggacgcgagcgcggggagtccccgacaacaccccccacgccaacgcccgcgccctgcccgaccgagccgcccccttccccgctcatctgcttctcgctcaagacgcccgactccccgcccactcctgcacccctgttgctggacctgggtatccctgtgggccagcggtcagccaagagcccccgacgtgaggaggagccccgcggaggcactgtctcacccccaccggggacatcacgctctgctcctggcaccccaggcaccccacgttcaccacccctgggcctcatcagccgacctcggccctcgccccttcgcagccgcattgatccctggagctttgtgtcagctgggccacggccttctcccctgccatcaccacagcctgcaccccgccgagcaccctggaccttgttcccggactcagaccccttctgggactccccacctgccaaccccttccaggggggcccccaggactgcagggcacagaccaaagacatgggtgcccaggccccgtgggtgccggaagcggggccttgagtgggccaggccactcccccgagctccagctgccttaggaggagtcacagcatacactggaacaggagctgggtcagcctctgcagctgcctcagtttccccagggaccccacccccctttgggggtcaggaacactacactgcacaggaagccttcacactggaagggggacctgcgcccccacatctgaaacctgtaggtccccccagctcacctgccctactggggcccaacactgtacccagctggttgggaggaccagagcctgtctcagggaattgcctgctggggtgatgcagggaggaggggaggtgcagggaagaggggccggcctcagctgtcaccagcacttttgaccaagtcctgctactgcggcccctgccctagggcttagagcatggacctcctgccctgggggtcatctggggccagggctctctggatgccttcctgctgccccagccagggttggagtcttagcctcgggatccagtgaagccagaagccaaataaactcaaaagctgtctccc

SEQ ID NO: 316402 - DNA, 2595 bp, Homo sapiens
acaaagggaggaggaagaagggagcggggtcggagccgtcggggccaaaggagacggggccaggaacaggcagtctcggcccaactgcggacgctccctccaccccctgcgcaaaaagacccaaccggagttgaggcgctgcccctgaaggccccaccttacacttggcgggggccggagccaggctcccaggactgctccagaaccgagggaagctcgggtccctccaagctagccatggtgaggcgccggaggccccggggccccacccccccggcctgaccacactgccctgggtgccctcctccagaagcccgagatgcggggggccgggagacaacactcctggctccccagagaggcgtgggtctggggctgagggccagggcccggatgcccaggttccgggactagggccttggcagccagcgggggtggggaccacgggcacccagagaaggtcctccacacatcccagcgccggctcccggccatggagcccttgaagagcctcttcctcaagagccctctagggtcatggaatggcagtggcagcgggggtggtgggggcggtggaggaggccggcctgaggggtctccaaaggcagcgggttatgccaacccggtgtggacagccctgttcgactacgagcccagtgggcaggatgagctggccctgaggaagggtgaccgtgtggaggtgctgtcccgggacgcagccatctcaggagacgagggctggtgggcgggccaggtgggtggccaggtgggcatcttcccgtccaactatgtgtctcggggtggcggcccgcccccctgcgaggtggccagcttccaggagctgcggctggaggaggtgatcggcattggaggctttggcaaggtgtacaggggcagctggcgaggtgagctggtggctgtgaaggcagctcgccaggaccccgatgaggacatcagtgtgacagccgagagcgttcgccaggaggcccggctcttcgccatgctggcacaccccaacatcattgccctcaaggctgtgtgcctggaggagcccaacctgtgcctggtgatggagtatgcagccggtgggcccctcagccgagctctggccgggcggcgcgtgcctccccatgtgctggtcaactgggctgtgcagattgcccgtgggatgcactacctgcactgcgaggccctggtgcccgtcatccaccgtgatctcaagtccaacaacattttgctgctgcagcccattgagagtgacgacatggagcacaagaccctgaagatcaccgactttggcctggcccgagagtggcacaaaaccacacaaatgagtgccgcgggcacctacgcctggatggctcctgaggttatcaaggcctccaccttctctaagggcagtgacgtctggagttttggggtgctgctgtgggaactgctgaccggggaggtgccataccgtggcattgactgccttgctgtggcctatggcgtagctgttaacaagctcacactgcccatcccatccacctgccccgagcccttcgcacagcttatggccgactgctgggcgcaggacccccaccgcaggcccgacttcgcctccatcctgcagcagttggaggcgctggaggcacaggtcctacgggaaatgccgcgggactccttccattccatgcaggaaggctggaagcgcgagatccagggtctcttcgacgagctgcgagccaaggaaaaggaactactgagccgcgaggaggagctgacgcgagcggcgcgcgagcagcggtcacaggcggagcagctgcggcggcgcgagcacctgctggcccagtgggagctagaggtgttcgagcgcgagctgacgctgctgctgcagcaggtggaccgcgagcgaccgcacgtgcgccgccgccgcgggacattcaagcgcagcaagctccgggcgcgcgacggcggcgagcgtatcagcatgccactcgacccaggggctcaagaaagcagtgaggctggtcacagtctcacagccatcgtgccgctccctatgtggcctgggagctggccttgggcccctgcaggttggggtcctggctctacttcatcacaaacctgaaccctgctccccccaacccaaatcccagacttcaagcaccgcatcaccgtgcaggcctcacccggccttgaccggaggagaaacgtcttcgaggtcgggcctggggattcgcccacctttccccggttccgagccatccagttggagcctgcagagccaggccaggcatggggccgccagtccccccgacgtctggaggactcaagcaatggagagcggcgagcatgctgggcttggggtcccagttcccccaagcctggggaagcccagaatgggaggagaaggtcccgcatggacgaagccacatggtacctggattcagatgactcatcccccttaggatctccttccacacccccagcactcaatggtgagtggccttcctcccccggcaggatctggctgagctccttccgtgggcaccttggggaggccacaataggctagtaggcaaagcaggagtcctgccctggttgctctca

SEQ ID NO: 316403 - DNA, 491 bp, Homo sapiens
agtctcacagccatcgtgccgctccctatgtggcctgggagctggccttgggcccctgcaggttggggtcctggctctacttcatcacaaacctgaaccctgctccccccaacccaaatcccagacttcaagcaccgcatcaccgtgcaggcctcacccggccttgaccggaggagaaacgtcttcgaggtcgggcctggggattcgcccacctttccccggttccgagccatccagtgtaagaaacttcacctctcatgcccctctccgccccccagctccttattctctgtcagaccttattcttggaggcggcaactcactatcccctcttcctccccgcccccaggctccctgccttaggtctagcctgttacctctgaactccccaagcagcattaattttacttatttttttttagtcaaataattgtatgacactatgtactactaattttctaaatgctttgctcatattaatttcttgcaat

SEQ ID NO: 316404 - DNA, 3045 bp, Homo sapiens
gcatcaagaccatcagacatttaggagaaacagcggtgtctgcggctcccacccttcggggggcccgtggggggggcggtgtcaggggcatggacgccaccccccaggggtctctgctgccggctactctcctctccacgtgctcccctccaggacccccgacgccgcctaggcgcccagcgacgcgcggcaggtggcagcagctcgggcccccgccgcactccaggcgcccgcagcgctcgccctgacgcggccgccatggcgcaggagaacgcggccttctcgcccgggcaggaggagccgccgcggcgccgcggccgccagcgctacgtggagaaggatggccggtgcaacgtgcagcagggcaacgtgcgcgagacataccgctacctgacggacctgttcaccacgctggtggacctgcagtggcgcctcagcctgttgttcttcgtcctggcctacgcgctcacctggctcttcttcggcgccatctggtggctgatcgcctacggccgcggcgacctggagcacctggaggacaccgcgtggacgccgtgcgtcaacaacctcaacggcttcgtggccgccttcctcttctccatcgagaccgagaccaccatcggctacgggcaccgcgtcatcaccgaccagtgccccgagggcatcgtgctgctgctgctgcaggccatcctgggctccatggtgaacgccttcatggtgggctgcatgttcgtcaagatctcgcagcccaacaagcgcgcagccacgctcgtcttctcctcgcacgccgtggtgtcgctgcgcgacgggcgcctctgcctcatgttccgcgtgggcgacttgcgctcctcacacatagtggaggcctccatccgcgccaagctcatccgctcgcgccagacgctggagggcgagttcatcccgctgcaccagaccgacctcagcgtgggcttcgacacgggagacgaccgcctcttcctcgtctcgccgctggttatcagccacgagatcgacgccgccagccccttctgggaggcgtcgcgccgtgccctcgagagggacgacttcgagatcgtcgttatcctcgagggcatggtggaagccacgggaatgacatgccaagctcggagctcctacctggtagacgaggtgctgtggggccaccgcttcacgtcagtgctgactctggaggacggcttctacgaagtggactatgccagctttcacgagacttttgaggtgcccacaccttcgtgcagtgctcgagagctggcagaggctgccgcccgccttgatgcccatctctactggtccatccccagccggctggatgagaaggtggaggaggagggggtgggggagggggcgggtggggaagctggggctgacaaggagcagaatggctgcctgccacccccagagagtgagtccaaggtgtgaccagcttcctccagacccctgtggcagaccgggggccagacacagatacatggggaactgcatatcggaggtggtggaggaggaggaggaggaggaaggcaaagcccctggaaatgtgctaaagttggaaagtccccgtcccccagaacctcaagtctagaaaccagtatggaagggaggggtcctgatttcagggaaatggagggtggggccgggtgaaaatgccagtctgtgtttgaccttcacatttgttcatgagtggatggatggacagaatgatggacttttgggggttggatgggaagatggtagcagataaagacagctgacagatacatagatggaccagtagacaattggtccactcagggctgccactaacctgtagaacacccctgtgcaaattttaaaaaggaacccttttcctccagacagatacagccccaaaccagggtgcatggcttggggagcagagtataggatggattgcagtccccagtcacctcttctgccagcctccccacatatggcacaactgtctaatgacacggtaggccaagctgaagtgaaggagaaaggagccggaccaagatgggcacatgaggagggtgccctcctagctccaccctcaccaggatgaaggcatgcaaggggctcagcaaggtgtgaatgaccttagtccgcaagttcagggaagcaggcagagcggggaggtgcctgagctggggcctggagaggggcctgggaaaggaaaaccagggatagctattttcttacagtggagtgagatcttacaggtatcaggcacaggcaggaagagagagagagaggttctggggaggaagggccaggagagagatctagaaagtgggttcactagagctgggaaacagggagcccctaggaaagcagtgtgtccttggggcacagtcattcacatcactgattgggtgccatgtggagtggacattcaaaaacctggttcctgtcctcaaaataaggggtacctgggaaaacagaggaatctacctgtggtgactgaacgagggataattcaaactgacaacctgtgcagtcccgtggagggtaggggagtgtgggtgatcagaaggctggggccagtgtaaggcatagggaatatgtaagtcaggagttagaaatctccagtgtgcgttggaatcacctggagggcttggtaaaacacagatttttgggctccactccaagggtttctgacccaagaggtggggaccaaaaccatgcattcctaagaagtccccaggtcatgctgctgttgctggactgaggaccacactttgagaacctgtgctctaagtgaatacttggaagtcgtttcaggacatggggcatagaaactgaggagtagctgagaggaagatgaagagaagctgagaagaagctgaggatcctcacaggagcagacagagaaatgtgaagggtggggttttatgtgtgggaaagggacccgaagcccaggctgaagagtttaactttgggcccagaaactcaaccatcaatggaaacagggcagtgacaagtggagggggtgtctggaagctgagcaggcccgacagagagatgaag

SEQ ID NO: 316405 - DNA, 376 bp, Homo sapiens
aaaaaaggtgaaaggatagaaagtagcaggtatgtacagtgaacaaatctgaagaactaatgtacagcagagggactatagttaataaaaatgtattgtatgcagtattcaggatttttgctaaacgtgtggattatctctgctcttgcagcagggcttgggtagctatgggaaatgatgggtatattaatatgtttcactataatcatcattttactatctagattatgtacctcataatgttgtataccttaaaataaaatttgttttaaaaatacacatatagtagttcagttttatattggaatctgatttatttattgaaaaggcttcacttagatgctgtacaggtttttttttttcttcttctttataa

SEQ ID NO: 316406 - DNA, 389 bp, Homo sapiens
cagcattgcttaatgtgacctcaggactgatcatcatatgctttttgcctgtgtaggtgttctaagcgttgtataatcacttaagaatggacttcattaaatagacaaaatatgagagccattacactatttttggtattaagtctttgaaatccagactgttttacacttgcaacacatacacttggggctaatcacatttcaggtgctcagtagcaacatgtgactaacagctaccaaatgaacagtgcagttctagtgcactgtttttaaaaaaattagatttttttttaaaattagatttctctagctgaatagttgtagtttcagataaacagccaaaaatgttctgtctctccacagcttcatctcaattgtgaagaaattgc

SEQ ID NO: 316407 - DNA, 477 bp, Homo sapiens
gaagcaatcagcaaaactcagaatatggaaaattctacagggcagatgactaacttaaagagattgtaaaaccttcagtaagcaaatacagggtgtagaccacgtccggaatcttaaatgagcaaaccaatagtaaaaatcatgaatgaaataactagggaaatgtgaacattggacatttgatatcaaggaattattgttagtttcttaggcatgaggatggtattacatttatatctatttgttaaaagatactttattttttagagattcctatttaagtcatttctgatgaactaacagcatgtcagggatttgcatctaaacagtggctgggagagagggaagcatacagaggcagctacaccccaagactcatcataagctgggaactgttgaagcagatgatgagtacatgggggttcattttactcccccatgctctcagtatatgttttaaaatttcccaaagttagg

SEQ ID NO: 316408 - DNA, 2343 bp, Homo sapiens
gcgcttcggagacgccggcccttccgctcggagaggtactccctgcctctaactggtggcgcgttggcggaggccgacgaaagcctcgggtggggcgtgagcgccgcggggcattctggacctgctttgccttaggctgtgcctaattcgaaaccaaagcgcgggacggatgaaagtacgggtcgcgagaggttgttcgcgccttgagagttaagcgaagtgtggtggcttccaaggaatacaaacataaaggccttcgaccgttgcaaatagactaaagtgaaaacaaatctgaatgaagatgaagttatttcagaccatttgcaggcagctcaggagttcaaagttttctgtggaatcagctgcccttgtggctttctctacttcctcttactcatgtggccggaagaaaaaagtgaacccatatgaagaagtggaccaagaaaaatactctaatttagttcagtctgtcttgtcatccagaggcgtcgcccagaccccgggatcggtggaggaagatgctttgctctgtggacccgtgagcaagcataagctgccaaaccaaggtgaggacagacgagtgccacaaaactggtttcctatcttcaatccagagagaagtgataaaccaaatgcaagtgatccttcagttcctttgaaaatccccttgcaaaggaatgtgataccaagtgtgacccgagtccttcagcagaccatgacaaaacaacaggttttcttgttggagaggtggaaacagcggatgattctggaactgggagaagatggctttaaagaatacacttcaaacgtctttttacaagggaaacggttccacgaagccttggaaagcatactttcaccccaggaaaccttaaaagagagagatgaaaatctcctcaagtctggttacattgaaagtgtccagcatattctgaaagatgtcagtggagtgcgagctcttgaaagtgctgttcaacatgaaaccttaaactatataggtctgctggactgtgtggctgagtatcagggcaagctctgtgtgattgattggaagacatcagagaaaccaaagccttttattcaaagtacatttgacaacccactgcaagttgtggcatacatgggtgccatgaaccatgataccaactacagctttcaggttcaatgtggcttaattgtggtggcctacaaagatggatcacctgcccacccacatttcatggatgcagagctctgttcccagtactggaccaagtggcttcttcgactagaagaatatacggaaaagaaaaagaaccagaatattcagaaaccagaatattcagaatagggagcaagttgctatttgggaacattcagcaccttctcacagtttgggaacatatattgctgtttactccagtgtaaaaatgaggtgccactggatctgagtgctacacgaacacaagtagaagtattaatttgttgaaatgtgttgttaccaaaaagactgaaaagccccaaagtctagatataaagacctagacttcggcacgcgaaatcccagctatgctacctcttatttacctgaaaggaggacacgcaggatgggcagtcatgctggtgactcttgtactcccttgagggacattgggggggggggggcgtggtcccaggcaggatgcccagtctttgagctgagattggaaggcagtgaggctgagggtgccaagatttccccagggttcacccagaggggaaggggctacatgcccccagctgtgtgcagggaggacacatcagcccactaccgctgccaacaccaatgcctaaaacttgtttcatacattggggttttctatatatttcagttgggaaaagcttacatttaaccttttgaaaaaataaatacgtgattagcctcaactaaacattgctgactataaagacagtatattcaccatgtcgctggcaatatgtcattgcgtaacaccaaataaccccccagaagtagccagaggccagtttgaacatcacaattctaagtgttttagtaactatttctggcgtgagtcaacagatcatgtagatagagtcaattattgtttgtggagtttttcagctataggggaggggaactattaaaatccatttgtttctattcaataggtaataaaaattagttgtccctgggtttgggaaacttaaatgcccattacagccctggggaagggttttctgtcttatggagtgagtcttagcatttaagttatacagttgctgccttaaaatagtagcctgctacaatgacttctttgggtagccattttcataagaaataaaatacaagatatgagtaatgaa

SEQ ID NO: 316409 - DNA, 1121 bp, Homo sapiens
  misc_feature (1013)..(1013): n is a, c, g, or t
  misc_feature (1016)..(1016): n is a, c, g, or t
gcgcttcggagacgccggcccttccgctcggagaggtactccctgcctctaactggtggcgcgttggcggaggccgacgaaagcctcgggtggggcgtgagcgccgcggggcattctggacctgctttgccttaggctgtgcctaattcgaaaccaaagcgcgggacggatgaaagtacgggtcgcgagaggttgttcgcgccttgagagttaagcgaagtgtggtggcttccaaggtaccgacacttgccgtaggctgggcttttatttaagtcgtcttttctctaatccagactcctgccacaggggccaccgccgtcctggccccgccaggggtccgcacccacggcggagcgggaggcgactttttgcggtcacagtaatgggacctcagcgccgccaccagctctgaccggcgagcgacgggaccctccaacccgatttccacgtctgtgcaacgggttcattctagacccacggtagagggtgtgaggaccaaatgagaagtatccacacagaatacttagcagagagcctggtgtctaggaattagtcgtcgtctgtcacctaggactgtgtggccgccatgggacgggctccatctttgtgtttttccgtgtctcgcacacgcctcccttcctgggcgtcacattcctgcagattagaaactgggacgtcttgcctcaagctgtctactaattcgcatttagtatgtgtcggtccttcgggtattgagtcttgatttatttataaattttttttggaggcagggtctcgctctgtcgactttcttaagaaagggctctgtccaaacatgtcgaaaaagttcacaattttgatgtgcaatatcattctgatgcagctttcgctttgatggttgttttctctccaataggaatacaaacataaaggccttcgaccgttgcaaatagactaaagtgaaaacaaatctgaatgaagatgaagttatttcagaccatttgcaggcagctcaggagttcaaagttctgggnganccgccctgtgggtattaatcctaacagtgtgggcgagaaaggcctctgaacggcgcaaacacattttgcggctgtctccacggccaaccgagggggaaaatcttc

SEQ ID NO: 316410 - DNA, 378 bp, Homo sapiens
tgttagctttgtttgtgtttcccccctccccttttccctgattttcttttcagacgtctttttacaagggaaacggttccacgaagccttggaaagcatactttcaccccaggaaaccttaaaagagagagatgaaaatctcctcaagtctggttacattgaaagtgtccagcatattctgaaagatgtcagtggagtgcgagctcttgaaagtgctgttcaacatgaaaccttaaactatataggtctgctggactgtgtggctgagtatcagctgaggcaggagaatcacttgaccccaggaggcagaggttgcagtgagccaatatcgcccactacactccagcctggccgacagagggagactccatccaaaaa

SEQ ID NO: 316411 - DNA, 2782 bp, Homo sapiens
gcgcttcggagacgccggcccttccgctcggagaggtactccctgcctctaactggtggcgcgttggcggaggccgacgaaagcctcgggtggggcgtgagcgccgcggggcattctggacctgctttgccttaggctgtgcctaattcgaaaccaaagcgcgggacggatgaaagtacgggtcgcgagaggttgttcgcgccttgagagttaagcgaagtgtggtggcttccaaggtaccgacacttgccgtaggctgggcttttatttaagtcgtcttttctctaatccagactcctgccacaggggccaccgccgtcctggccccgccaggggtccgcacccacggcggagcgggaggcgactttttgcggtcacagtaatgggacctcagcgccgccaccagctctgaccggcgagcgacgggaccctccaacccgatttccacgtctgtgcaacgggttcattctagacccacggtagagggtgtgaggaccaaatgagaagtatccacacagaatacttagcagagagcctggtgtctaggaattagtcgtcgtctgtcacctaggactgtgtggccgccatgggacgggctccatctttgtgtttttccgtgtctcgcacacgcctcccttcctgggcgtcacattcctgcagattagaaactgggacgtcttgcctcaagctgtctactaattcgcatttagtatgtgtcggtccttcgggtattgagtcttgatttatttataaattttttttggaggcagggtctcgctctgtcgactttcttaagaaagggctctgtccaaacatgtcgaaaaagttcacaattttgatgtgcaatatcattctgatgcagctttcgctttgatggttgttttctctccaataggaatacaaacataaaggccttcgaccgttgcaaatagactaaagtgaaaacaaatctgaatgaagatgaagttatttcagaccatttgcaggcagctcaggagttcaaagttttctgtggaatcagctgcccttgtggctttctctacttcctcttactcatgtggccggaagaaaaaagtgaacccatatgaagaagtggaccaagaaaaatactctaatttagttcagtctgtcttgtcatccagaggcgtcgcccagaccccgggatcggtggaggaagatgctttgctctgtggacccgtgagcaagcataagctgccaaaccaaggtgaggacagacgagtgccacaaaactggtttcctatcttcaatccagagagaagtgataaaccaaatgcaagtgatccttcagttcctttgaaaatccccttgcaaaggaatgtgataccaagtgtgacccgagtccttcagcagaccatgacaaaacaacaggttttcttgttggagaggtggaaacagcggatgattctggaactgggagaagatggctttaaagaatacacttcaagggcaagctctgtgtgattgattggaagacatcagagaaaccaaagccttttattcaaagtacatttgacaacccactgcaagttgtggcatacatgggtgccatgaaccatgataccaactacagctttcaggttcaatgtggcttaattgtggtggcctacaaagatggatcacctgcccacccacatttcatggatgcagagctctgttcccagtactggaccaagtggcttcttcgactagaagaatatacggaaaagaaaaagaaccagaatattcagaaaccagaatattcagaatagggagcaagttgctatttgggaacattcagcaccttctcacagtttgggaacatatattgctgtttactccagtgtaaaaatgaggtgccactggatctgagtgctacacgaacacaagtagaagtattaatttgttgaaatgtgttgttaccaaaaagactgaaaagccccaaagtctagatataaagacctagacttcggcacgcgaaatcccagctatgctacctcttatttacctgaaaggaggacacgcaggatgggcagtcatgctggtgactcttgtactcccttgagggacattgggggggggggggcgtggtcccaggcaggatgcccagtctttgagctgagattggaaggcagtgaggctgagggtgccaagatttccccagggttcacccagaggggaaggggctacatgcccccagctgtgtgcagggaggacacatcagcccactaccgctgccaacaccaatgcctaaaacttgtttcatacattggggttttctatatatttcagttgggaaaagcttacatttaaccttttgaaaaaataaatacgtgattagcctcaactaaacattgctgactataaagacagtatattcaccatgtcgctggcaatatgtcattgcgtaacaccaaataaccccccagaagtagccagaggccagtttgaacatcacaattctaagtgttttagtaactatttctggcgtgagtcaacagatcatgtagatagagtcaattattgtttgtggagtttttcagctataggggaggggaactattaaaatccatttgtttctattcaataggtaataaaaattagttgtccctgggtttgggaaacttaaatgcccattacagccctggggaagggttttctgtcttatggagtgagtcttagcatttaagttatacagttgctgccttaaaatagtagcctgctacaatgacttctttgggtagccattttcataagaaataaaatacaagatatgagtaatgaa

SEQ ID NO: 316412 - DNA, 2103 bp, Homo sapiens
gcgcttcggagacgccggcccttccgctcggagaggtactccctgcctctaactggtggcgcgttggcggaggccgacgaaagcctcgggtggggcgtgagcgccgcggggcattctggacctgctttgccttaggctgtgcctaattcgaaaccaaagcgcgggacggatgaaagtacgggtcgcgagaggttgttcgcgccttgagagttaagcgaagtgtggtggcttccaaggaatacaaacataaaggccttcgaccgttgcaaatagactaaagtgaaaacaaatctgaatgaagatgaagttatttcagaccatttgcaggcagctcaggagttcaaagttttctgtggaatcagctgcccttgtggctttctctacttcctcttactcatgtggccggaagaaaaaagtgaacccatatgaagaagtggaccaagaaaaatactctaatttagttcagtctgtcttgtcatccagaggcgtcgcccagaccccgggatcggtggaggaagatgctttgctctgtggacccgtgagcaagcataagctgccaaaccaagacgtctttttacaagggaaacggttccacgaagccttggaaagcatactttcaccccaggaaaccttaaaagagagagatgaaaatctcctcaagtctggttacattgaaagtgtccagcatattctgaaagatgtcagtggagtgcgagctcttgaaagtgctgttcaacatgaaaccttaaactatataggtctgctggactgtgtggctgagtatcagggcaagctctgtgtgattgattggaagacatcagagaaaccaaagccttttattcaaagtacatttgacaacccactgcaagttgtggcatacatgggtgccatgaaccatgataccaactacagctttcaggttcaatgtggcttaattgtggtggcctacaaagatggatcacctgcccacccacatttcatggatgcagagctctgttcccagtactggaccaagtggcttcttcgactagaagaatatacggaaaagaaaaagaaccagaatattcagaaaccagaatattcagaatagggagcaagttgctatttgggaacattcagcaccttctcacagtttgggaacatatattgctgtttactccagtgtaaaaatgaggtgccactggatctgagtgctacacgaacacaagtagaagtattaatttgttgaaatgtgttgttaccaaaaagactgaaaagccccaaagtctagatataaagacctagacttcggcacgcgaaatcccagctatgctacctcttatttacctgaaaggaggacacgcaggatgggcagtcatgctggtgactcttgtactcccttgagggacattgggggggggggggcgtggtcccaggcaggatgcccagtctttgagctgagattggaaggcagtgaggctgagggtgccaagatttccccagggttcacccagaggggaaggggctacatgcccccagctgtgtgcagggaggacacatcagcccactaccgctgccaacaccaatgcctaaaacttgtttcatacattggggttttctatatatttcagttgggaaaagcttacatttaaccttttgaaaaaataaatacgtgattagcctcaactaaacattgctgactataaagacagtatattcaccatgtcgctggcaatatgtcattgcgtaacaccaaataaccccccagaagtagccagaggccagtttgaacatcacaattctaagtgttttagtaactatttctggcgtgagtcaacagatcatgtagatagagtcaattattgtttgtggagtttttcagctataggggaggggaactattaaaatccatttgtttctattcaataggtaataaaaattagttgtccctgggtttgggaaacttaaatgcccattacagccctggggaagggttttctgtcttatggagtgagtcttagcatttaagttatacagttgctgccttaaaatagtagcctgctacaatgacttctttgggtagccattttcataagaaataaaatacaagatatgagtaatgaa

SEQ ID NO: 316413 - DNA, 3479 bp, Homo sapiens
gcgcttcggagacgccggcccttccgctcggagaggtactccctgcctctaactggtggcgcgttggcggaggccgacgaaagcctcgggtggggcgtgagcgccgcggggcattctggacctgctttgccttaggctgtgcctaattcgaaaccaaagcgcgggacggatgaaagtacgggtcgcgagaggttgttcgcgccttgagagttaagcgaagtgtggtggcttccaaggtaccgacacttgccgtaggctgggcttttatttaagtcgtcttttctctaatccagactcctgccacaggggccaccgccgtcctggccccgccaggggtccgcacccacggcggagcgggaggcgactttttgcggtcacagtaatgggacctcagcgccgccaccagctctgaccggcgagcgacgggaccctccaacccgatttccacgtctgtgcaacgggttcattctagacccacggtagagggtgtgaggaccaaatgagaagtatccacacagaatacttagcagagagcctggtgtctaggaattagtcgtcgtctgtcacctaggactgtgtggccgccatgggacgggctccatctttgtgtttttccgtgtctcgcacacgcctcccttcctgggcgtcacattcctgcagattagaaactgggacgtcttgcctcaagctgtctactaattcgcatttagtatgtgtcggtccttcgggtattgagtcttgatttatttataaattttttttggaggcagggtctcgctctgtcgactttcttaagaaagggctctgtccaaacatgtcgaaaaagttcacaattttgatgtgcaatatcattctgatgcagctttcgctttgatggttgttttctctccaataggaatacaaacataaaggccttcgaccgttgcaaatagactaaagtgaaaacaaatctgaatgaagatgaagttatttcagaccatttgcaggcagctcaggagttcaaagttttctgtggaatcagctgcccttgtggctttctctacttcctcttactcatgtggccggaagaaaaaagtgaacccatatgaagaagtggaccaagaaaaatactctaatttagttcagtctgtcttgtcatccagaggcgtcgcccagaccccgggatcggtggaggaagatgctttgctctgtggacccgtgagcaagcataagctgccaaaccaaggtgaggacagacgagtgccacaaaactggtttcctatcttcaatccagagagaagtgataaaccaaatgcaagtgatccttcagttcctttgaaaatccccttgcaaaggaatgtgataccaagtgtgacccgagtccttcagcagaccatgacaaaacaacaggttttcttgttggagaggtggaaacagcggatgattctggaactgggagaagatggctttaaagaatacacttcaaacgtctttttacaagggaaacggttccacgaagccttggaaagcatactttcaccccaggaaaccttaaaagagagagatgaaaatctcctcaagtctggttacattgaaagtgtccagcatattctgaaagatgtcagtggagtgcgagctcttgaaagtgctgttcaacatgaaaccttaaactatataggtctgctggactgtgtggctgagtatcagggcaagctctgtgtgattgattggaagacatcagagaaaccaaagccttttattcaaagtacatttgacaacccactgcaagttgtggcatacatgggtgccatgaaccatgataccaactacagctttcaggttcaatgtggcttaattgtggtggcctacaaagatggatcacctgcccacccacatttcatggatgcagagctctgttcccagtactggaccaagtggcttcttcgactagaagaatatacggaaaagaaaaagaaccagaatattcagaaaccagaatattcagaatagggagcaagttgctatttgggaacattcagcaccttctcacagtttgggaacatatattgctgtttactccagtgtaaaaatgaggtgccactggatctgagtgctacacgaacacaagtagaagtattaatttgttgaaatgtgttgttaccaaaaagactgaaaagccccaaagtctagatataaagacctagacttcggcacgcgaaatcccagctatgctacctcttatttacctgaaaggaggacacgcaggatgggcagtcatgctggtgactcttgtactcccttgagggacattgggggggggggggcgtggtcccaggcaggatgcccagtctttgagctgagattggaaggcagtgaggctgagggtgccaagatttccccagggttcacccagaggggaaggggctacatgcccccagctgtgtgcagggaggacacatcagcccactaccgctgccaacaccaatgcctaaaacttgtttcatacattggggttttctatatatttcagttgggaaaagcttacatttaaccttttgaaaaaataaatacgtgattagcctcaactaaacattgctgactataaagacagtatattcaccatgtcgctggcaatatgtcattgcgtaacaccaaataaccccccagaagtagccagaggccagtttgaacatcacaattctaagtgttttagtaactatttctggcgtgagtcaacagatcatgtagatagagtcaattattgtttgtggagtttttcagctataggggaggggaactattaaaatccatttgtttctattcaataggtaataaaaattagttgtccctgggtttgggaaacttaaatgcccattacagccctggggaagggttttctgtcttatggagtgagtcttagcatttaagttatacagttgctgccttaaaatagtagcctgctacaatgacttctttgggtagccattttcataagaaataaaatacaagatatgagtaatgaaaaaaaaaaaaaaaaaaaaaaaaaaaaaaaaaaaaaaaaaaaaaaaaaaaaaaaaaaaaaaaaaaaaaaaaaaagggggggggggggaaaaaacagggggggaaaacattaaaaaaggggcccaaaggattaacgaaaagggggggtaaatggcggtgggacaaacccggacacgtgggcagttgtggggagaggaccccacctgtggggcggggcaagcaggaaaacatccaccaccaagaaataaaagaactccgggcactacaaaacacaggtggtggtggatgcaaaccaccacattagctggcgcgcgaatgcctgcgtttctttgctactgcaacgggcctagctacatcatccggggaaccaggctgaggagaagaacggcgacagggaagcgtagcaacgaagcacacaacggaggaggcgtgcggacagaaactaataggcgaatgacaggaacacataactgttcacc

SEQ ID NO: 316414 - DNA, 3387 bp, Homo sapiens
  misc_feature (3158)..(3158): n is a, c, g, or t
gcgcttcggagacgccggcccttccgctcggagaggtactccctgcctctaactggtggcgcgttggcggaggccgacgaaagcctcgggtggggcgtgagcgccgcggggcattctggacctgctttgccttaggctgtgcctaattcgaaaccaaagcgcgggacggatgaaagtacgggtcgcgagaggttgttcgcgccttgagagttaagcgaagtgtggtggcttccaaggtaccgacacttgccgtaggctgggcttttatttaagtcgtcttttctctaatccagactcctgccacaggggccaccgccgtcctggccccgccaggggtccgcacccacggcggagcgggaggcgactttttgcggtcacagtaatgggacctcagcgccgccaccagctctgaccggcgagcgacgggaccctccaacccgatttccacgtctgtgcaacgggttcattctagacccacggtagagggtgtgaggaccaaatgagaagtatccacacagaatacttagcagagagcctggtgtctaggaattagtcgtcgtctgtcacctaggactgtgtggccgccatgggacgggctccatctttgtgtttttccgtgtctcgcacacgcctcccttcctgggcgtcacattcctgcagattagaaactgggacgtcttgcctcaagctgtctactaattcgcatttagtatgtgtcggtccttcgggtattgagtcttgatttatttataaattttttttggaggcagggtctcgctctgtcgactttcttaagaaagggctctgtccaaacatgtcgaaaaagttcacaattttgatgtgcaatatcattctgatgcagctttcgctttgatggttgttttctctccaataggaatacaaacataaaggccttcgaccgttgcaaatagactaaagtgaaaacaaatctgaatgaagatgaagttatttcagaccatttgcaggcagctcaggagttcaaagttttctgtggaatcagctgcccttgtggctttctctacttcctcttactcatgtggccggaagaaaaaagtgaacccatatgaagaagtggaccaagaaaaatactctaatttagttcagtctgtcttgtcatccagaggcgtcgcccagaccccgggatcggtggaggaagatgctttgctctgtggacccgtgagcaagcataagctgccaaaccaaggtgaggacagacgagtgccacaaaactggtttcctatcttcaatccagagagaagtgataaaccaaatgcaagtgatccttcagttcctttgaaaatccccttgcaaaggaatgtgataccaagtgtgacccgagtccttcagcagaccatgacaaaacaacaggttttcttgttggagaggtggaaacagcggatgattctggaactgggagaagatggctttaaagaatacacttcaaacgtctttttacaagggaaacggttccacgaagccttggaaagcatactttcaccccaggaaaccttaaaagagagagatgaaaatctcctcaagtctggttacattgaaagtgtccagcatattctgaaagatgtcagtggagtgcgagctcttgaaagtgctgttcaacatgaaaccttaaactatataggtctgctggactgtgtggctgagtatcagggcaagctctgtgtgattgattggaagacatcagagaaaccaaagccttttattcaaagtacatttgacaacccactgcaagttgtggcatacatgggtgccatgaaccatgataccaactacagctttcaggttcaatgtggcttaattgtggtggcctacaaagatggatcacctgcccacccacatttcatggatgcagagctctgttcccagtactggaccaagtggcttcttcgactagaagaatatacggaaaagaaaaagaaccagaatattcagaaaccagaatattcagaatagggagcaagttgctatttgggaacattcagcaccttctcacagtttgggaacatatattgctgtttactccagtgtaaaaatgaggtgccactggatctgagtgctacacgaacacaagtagaagtattaatttgttgaaatgtgttgttaccaaaaagactgaaaagccccaaagtctagatataaagacctagacttcggcacgcgaaatcccagctatgctacctcttatttacctgaaaggaggacacgcaggatgggcagtcatgctggtgactcttgtactcccttgagggacattgggggggggggggcgtggtcccaggcaggatgcccagtctttgagctgagattggaaggcagtgaggctgagggtgccaagatttccccagggttcacccagaggggaaggggctacatgcccccagctgtgtgcagggaggacacatcagcccactaccgctgccaacaccaatgcctaaaacttgtttcatacattggggttttctatatatttcagttgggaaaagcttacatttaaccttttgaaaaaataaatacgtgattagcctcaactaaacattgctgactataaagacagtatattcaccatgtcgctggcaatatgtcattgcgtaacaccaaataaccccccagaagtagccagaggccagtttgaacatcacaattctaagtgttttagtaactatttctggcgtgagtcaacagatcatgtagatagagtcaattattgtttgtggagtttttcagctataggggaggggaactattaaaatccatttgtttctattcaataggtaataaaaattagttgtccctgggtttgggaaacttaaatgcccattacagccctggggaagggttttctgtcttatggagtgagtcttagcatttaagttatacagttgctgccttaaaatagtagcctgctacaatgacttctttgggtagccattttcataagaaataaaatacaagatatgagtaatgaaaaaaaaaaaaaaaaaaaaaaaaaaaaaaaaaaaaatttggggggggctggggccctgagaaaaagagtttctcaaaaacaaaatccggttggggcgcgcgggggcgcccaagtagggtaacggcagaacacatggcgcccataaagcgttggttcnaccaaaggaagaacccggggtcaaatggacaaaagtggcctgggggatatttcccaccataataaaaaaaagagcgccgcgggggggacacaccgaaggcgttcgggaaacacaattcccaaagaggggatttcgcggagaggtcactatagacggggaatcattctaacacgagaggagttccaacagggaaacctcaaaaatcaaatatagagccccgactcgggga

SEQ ID NO: 316415 - DNA, 1050 bp, Homo sapiens
ccgactctagaggaccccgctattccatcggcactcgctattcatcggcacctcgctattcatcggcaccttctcacagtttgggaacatatattgctgtttactccagtgtaaaaatgaggtgccactggatctgagtgctacacgaacacaagtagaagtattaatttgttgaaatgtgttgttaccaaaaagactgaaaagccccaaagtctagatataaagacctagacttcggcacgcgaaatcccagctatgctacctcttatttacctgaaaggaggacacgcaggatgggcagtcatgctggtgactcttgtactcccttgagggacattgggggggggggggcgtggtcccaggcaggatgcccagtctttgagctgagattggaaggcagtgaggctgagggtgccaagatttccccagggttcacccagaggggaaggggctacatgcccccagctgtgtgcagggaggacacatcagcccactaccgctgccaacaccaatgcctaaaacttgtttcatacattggggttttctatatatttcagttgggaaaagcttacatttaaccttttgaaaaaataaatacgtgattagcctcaactaaacattgctgactataaagacagtatattcaccatgtcgctggcaatatgtcattgcgtaacaccaaataaccccccagaagtagccagaggccagtttgaacatcacaattctaagtgttttagtaactatttctggcgtgagtcaacagatcatgtagatagagtcaattattgtttgtggagtttttcagctataggggaggggaactattaaaatccatttgtttctattcaataggtaataaaaattagttgtccctgggtttgggaaacttaaatgcccattacagccctggggaagggttttctgtcttatggagtgagtcttagcatttaagttatacagttgctgccttaaaatagtagcctgctacaatgacttctttgggtagccattttcataagaaataaaatacaagatatgagtaatgaa

SEQ ID NO: 316416 - DNA, 1864 bp, Homo sapiens
gcgcttcggagacgccggcccttccgctcggagaggtactccctgcctctaactggtggcgcgttggcggaggccgacgaaagcctcgggtggggcgtgagcgccgcggggcattctggacctgctttgccttaggctgtgcctaattcgaaaccaaagcgcgggacggatgaaagtacgggtcgcgagaggttgttcgcgccttgagagttaagcgaagtgtggtggcttccaaggtaccgacacttgccgtaggctgggcttttatttaagtcgtcttttctctaatccagactcctgccacaggggccaccgccgtcctggccccgccaggggtccgcacccacggcggagcgggaggcgactttttgcggtcacagtaatgggacctcagcgccgccaccagctctgaccggcgagcgacgggaccctccaacccgatttccacgtctgtgcaacgggttcattctagacccacggtagagggtgtgaggaccaaatgagaagtatccacacagaatacttagcagagagcctggtgtctaggaattagtcgtcgtctgtcacctaggactgtgtggccgccatgggacgggctccatctttgtgtttttccgtgtctcgcacacgcctcccttcctgggcgtcacattcctgcagattagaaactgggacgtcttgcctcaagctgtctactaattcgcatttagtatgtgtcggtccttcgggtattgagtcttgatttatttataaattttttttggaggcagggtctcgctctgtcgactttcttaagaaagggctctgtccaaacatgtcgaaaaagttcacaattttgatgtgcaatatcattctgatgcagctttcgctttgatggttgttttctctccaataggaatacaaacataaaggccttcgaccgttgcaaatagactaaagtgaaaacaaatctgaatgaagatgaagttatttcagaccatttgcaggcagctcaggagttcaaagttttctgtggaatcagctgcccttgtggctttctctacttcctcttactcatgtggccggaagaaaaaagtgaacccatatgaagaagtggaccaagaaaaatactctaatttagttcagtctgtcttgtcatccagaggcgtcgcccagaccccgggatcggtggaggaagatgctttgctctgtggacccgtgagcaagcataagctgccaaaccaaggtgaggacagacgagtgccacaaaactggtttcctatcttcaatccagagagaagtgataaaccaaatgcaagtgatccttcagttcctttgaaaatccccttgcaaaggaatgtgataccaagtgtgacccgagtccttcagcagaccatgacaaaacaacaggttttcttgttggagaggtggaaacagcggatgattctggaactgggagaagatggctttaaagaatacacttcaagtaattatctcaattctgattctatatgtttgctatgttttctataatagagagcaacggtgtcaaaagaatgaggtttggttttgtttttttaacttactagcaaggaactcccttcagatagtaattaacattaaatagcactttatgtgtattaactcacttgatcctcatggtagtcctgtggagtatagatactgttatccacattttacagatgaaactaaaatagatcaaatatttgactaaataatacataaaattcacttgttttataagctaccaacaatattagaattgcttgttttccttgattattgaaaaaagtcacctggtaacagaattctagttgtttgctagataattctgtttagaatccagtaaatacccactgtccta

SEQ ID NO: 316417 - DNA, 3002 bp, Homo sapiens
gcgcttcggagacgccggcccttccgctcggagaggtactccctgcctctaactggtggcgcgttggcggaggccgacgaaagcctcgggtggggcgtgagcgccgcggggcattctggacctgctttgccttaggctgtgcctaattcgaaaccaaagcgcgggacggatgaaagtacgggtcgcgagaggttgttcgcgccttgagagttaagcgaagtgtggtggcttccaaggtaccgacacttgccgtaggctgggcttttatttaagtcgtcttttctctaatccagactcctgccacaggggccaccgccgtcctggccccgccaggggtccgcacccacggcggagcgggaggcgactttttgcggtcacagtaatgggacctcagcgccgccaccagctctgaccggcgagcgacgggaccctccaacccgatttccacgtctgtgcaacgggttcattctagacccacggtagagggtgtgaggaccaaatgagaagtatccacacagaatacttagcagagagcctggtgtctaggaattagtcgtcgtctgtcacctaggactgtgtggccgccatgggacgggctccatctttgtgtttttccgtgtctcgcacacgcctcccttcctgggcgtcacattcctgcagattagaaactgggacgtcttgcctcaagctgtctactaattcgcatttagtatgtgtcggtccttcgggtattgagtcttgatttatttataaattttttttggaggcagggtctcgctctgtcgactttcttaagaaagggctctgtccaaacatgtcgaaaaagttcacaattttgatgtgcaatatcattctgatgcagctttcgctttgatggttgttttctctccaataggaatacaaacataaaggccttcgaccgttgcaaatagactaaagtgaaaacaaatctgaatgaagatgaagttatttcagaccatttgcaggcagctcaggagttcaaagttttctgtggaatcagctgcccttgtggctttctctacttcctcttactcatgtggccggaagaaaaaagtgaacccatatgaagaagtggaccaagaaaaatactctaatttagttcagtctgtcttgtcatccagaggcgtcgcccagaccccgggatcggtggaggaagatgctttgctctgtggacccgtgagcaagcataagctgccaaaccaaggtgaggacagacgagtgccacaaaactggtttcctatcttcaatccagagagaagtgataaaccaaatgcaagtgatccttcagttcctttgaaaatccccttgcaaaggaatgtgataccaagtgtgacccgagtccttcagcagaccatgacaaaacaacaggttttcttgttggagaggtggaaacagcggatgattctggaactgggagaagatggctttaaagaatacacttcaaacgtctttttacaagggaaacggttccacgaagccttggaaagcatactttcaccccaggaaaccttaaaagagagagatgaaaatctcctcaagtctggttacattgaaagtgtccagcatattctgaaagatgtcagtggagtgcgagctcttgaaagtgctgttcaacatgaaaccttaaactatataggtctgctggactgtgtggctgagtatcagggcaagctctgtgtgattgattggaagacatcagagaaaccaaagccttttattcaaagtacatttgacaacccactgcaagttgtggcatacatgggtgccatgaaccatgataccaactacagctttcaggttcaatgtggcttaattgtggtggcctacaaagatggatcacctgcccacccacatttcatggatgcagagctctgttcccagtactggaccaagtggcttcttcgactagaagaatatacggaaaagaaaaagaaccagaatattcagaaaccagaatattcagaatagggagcaagttgctatttgggaacattcagcaccttctcacagtttgggaacatatattgctgtttactccagtgtaaaaatgaggtgccactggatctgagtgctacacgaacacaagtagaagtattaatttgttgaaatgtgttgttaccaaaaagactgaaaagccccaaagtctagatataaagacctagacttcggcacgcgaaatcccagctatgctacctcttatttacctgaaaggaggacacgcaggatgggcagtcatgctggtgactcttgtactcccttgagggacattgggggggggggggcgtggtcccaggcaggatgcccagtctttgagctgagattggaaggcagtgaggctgagggtgccaagatttccccagggttcacccagaggggaaggggctacatgcccccagctgtgtgcagggaggacacatcagcccactaccgctgccaacaccaatgcctaaaacttgtttcatacattggggttttctatatatttcagttgggaaaagcttacatttaaccttttgaaaaaataaatacgtgattagcctcaactaaacattgctgactataaagacagtatattcaccatgtcgctggcaatatgtcattgcgtaacaccaaataaccccccagaagtagccagaggccagtttgaacatcacaattctaagtgttttagtaactatttctggcgtgagtcaacagatcatgtagatagagtcaattattgtttgtggagtttttcagctataggggaggggaactattaaaatccatttgtttctattcaataggtaataaaaattagttgtccctgggtttgggaaacttaaatgcccattacagccctggggaagggttttctgtcttatggagtgagtcttagcatttaagttatacagttgctgccttaaaatagtagcctgctacaatgacttctttgggtagccattttcataagaaataaaatacaagatatgagtaatgaa

SEQ ID NO: 316418 - DNA, 2816 bp, Homo sapiens
gcgcttcggagacgccggcccttccgctcggagaggtactccctgcctctaactggtggcgcgttggcggaggccgacgaaagcctcgggtggggcgtgagcgccgcggggcattctggacctgctttgccttaggctgtgcctaattcgaaaccaaagcgcgggacggatgaaagtacgggtcgcgagaggttgttcgcgccttgagagttaagcgaagtgtggtggcttccaaggtaccgacacttgccgtaggctgggcttttatttaagtcgtcttttctctaatccagactcctgccacaggggccaccgccgtcctggccccgccaggggtccgcacccacggcggagcgggaggcgactttttgcggtcacagtaatgggacctcagcgccgccaccagctctgaccggcgagcgacgggaccctccaacccgatttccacgtctgtgcaacgggttcattctagacccacggtagagggtgtgaggaccaaatgagaagtatccacacagaatacttagcagagagcctggtgtctaggaattagtcgtcgtctgtcacctaggactgtgtggccgccatgggacgggctccatctttgtgtttttccgtgtctcgcacacgcctcccttcctgggcgtcacattcctgcagattagaaactgggacgtcttgcctcaagctgtctactaattcgcatttagaatacaaacataaaggccttcgaccgttgcaaatagactaaagtgaaaacaaatctgaatgaagatgaagttatttcagaccatttgcaggcagctcaggagttcaaagttttctgtggaatcagctgcccttgtggctttctctacttcctcttactcatgtggccggaagaaaaaagtgaacccatatgaagaagtggaccaagaaaaatactctaatttagttcagtctgtcttgtcatccagaggcgtcgcccagaccccgggatcggtggaggaagatgctttgctctgtggacccgtgagcaagcataagctgccaaaccaaggtgaggacagacgagtgccacaaaactggtttcctatcttcaatccagagagaagtgataaaccaaatgcaagtgatccttcagttcctttgaaaatccccttgcaaaggaatgtgataccaagtgtgacccgagtccttcagcagaccatgacaaaacaacaggttttcttgttggagaggtggaaacagcggatgattctggaactgggagaagatggctttaaagaatacacttcaaacgtctttttacaagggaaacggttccacgaagccttggaaagcatactttcaccccaggaaaccttaaaagagagagatgaaaatctcctcaagtctggttacattgaaagtgtccagcatattctgaaagatgtcagtggagtgcgagctcttgaaagtgctgttcaacatgaaaccttaaactatataggtctgctggactgtgtggctgagtatcagggcaagctctgtgtgattgattggaagacatcagagaaaccaaagccttttattcaaagtacatttgacaacccactgcaagttgtggcatacatgggtgccatgaaccatgataccaactacagctttcaggttcaatgtggcttaattgtggtggcctacaaagatggatcacctgcccacccacatttcatggatgcagagctctgttcccagtactggaccaagtggcttcttcgactagaagaatatacggaaaagaaaaagaaccagaatattcagaaaccagaatattcagaatagggagcaagttgctatttgggaacattcagcaccttctcacagtttgggaacatatattgctgtttactccagtgtaaaaatgaggtgccactggatctgagtgctacacgaacacaagtagaagtattaatttgttgaaatgtgttgttaccaaaaagactgaaaagccccaaagtctagatataaagacctagacttcggcacgcgaaatcccagctatgctacctcttatttacctgaaaggaggacacgcaggatgggcagtcatgctggtgactcttgtactcccttgagggacattgggggggggggggcgtggtcccaggcaggatgcccagtctttgagctgagattggaaggcagtgaggctgagggtgccaagatttccccagggttcacccagaggggaaggggctacatgcccccagctgtgtgcagggaggacacatcagcccactaccgctgccaacaccaatgcctaaaacttgtttcatacattggggttttctatatatttcagttgggaaaagcttacatttaaccttttgaaaaaataaatacgtgattagcctcaactaaacattgctgactataaagacagtatattcaccatgtcgctggcaatatgtcattgcgtaacaccaaataaccccccagaagtagccagaggccagtttgaacatcacaattctaagtgttttagtaactatttctggcgtgagtcaacagatcatgtagatagagtcaattattgtttgtggagtttttcagctataggggaggggaactattaaaatccatttgtttctattcaataggtaataaaaattagttgtccctgggtttgggaaacttaaatgcccattacagccctggggaagggttttctgtcttatggagtgagtcttagcatttaagttatacagttgctgccttaaaatagtagcctgctacaatgacttctttgggtagccattttcataagaaataaaatacaagatatgagtaatgaa

SEQ ID NO: 316419 - DNA, 2309 bp, Homo sapiens
gcgcttcggagacgccggcccttccgctcggagaggtactccctgcctctaactggtggcgcgttggcggaggccgacgaaagcctcgggtggggcgtgagcgccgcggggcattctggacctgctttgccttaggctgtgcctaattcgaaaccaaagcgcgggacggatgaaagtacgggtcgcgagaggttgttcgcgccttgagagttaagcgaagtgtggtggcttccaaggaatacaaacataaaggccttcgaccgttgcaaatagactaaagtgaaaacaaatctgaatgaagatgaagttatttcagaccatttgcaggcagctcaggagttcaaagttttctgtggaatcagctgcccttgtggctttctctacttcctcttactcatgtggccggaagaaaaatactctaatttagttcagtctgtcttgtcatccagaggcgtcgcccagaccccgggatcggtggaggaagatgctttgctctgtggacccgtgagcaagcataagctgccaaaccaaggtgaggacagacgagtgccacaaaactggtttcctatcttcaatccagagagaagtgataaaccaaatgcaagtgatccttcagttcctttgaaaatccccttgcaaaggaatgtgataccaagtgtgacccgagtccttcagcagaccatgacaaaacaacaggttttcttgttggagaggtggaaacagcggatgattctggaactgggagaagatggctttaaagaatacacttcaaacgtctttttacaagggaaacggttccacgaagccttggaaagcatactttcaccccaggaaaccttaaaagagagagatgaaaatctcctcaagtctggttacattgaaagtgtccagcatattctgaaagatgtcagtggagtgcgagctcttgaaagtgctgttcaacatgaaaccttaaactatataggtctgctggactgtgtggctgagtatcagggcaagctctgtgtgattgattggaagacatcagagaaaccaaagccttttattcaaagtacatttgacaacccactgcaagttgtggcatacatgggtgccatgaaccatgataccaactacagctttcaggttcaatgtggcttaattgtggtggcctacaaagatggatcacctgcccacccacatttcatggatgcagagctctgttcccagtactggaccaagtggcttcttcgactagaagaatatacggaaaagaaaaagaaccagaatattcagaaaccagaatattcagaatagggagcaagttgctatttgggaacattcagcaccttctcacagtttgggaacatatattgctgtttactccagtgtaaaaatgaggtgccactggatctgagtgctacacgaacacaagtagaagtattaatttgttgaaatgtgttgttaccaaaaagactgaaaagccccaaagtctagatataaagacctagacttcggcacgcgaaatcccagctatgctacctcttatttacctgaaaggaggacacgcaggatgggcagtcatgctggtgactcttgtactcccttgagggacattgggggggggggggcgtggtcccaggcaggatgcccagtctttgagctgagattggaaggcagtgaggctgagggtgccaagatttccccagggttcacccagaggggaaggggctacatgcccccagctgtgtgcagggaggacacatcagcccactaccgctgccaacaccaatgcctaaaacttgtttcatacattggggttttctatatatttcagttgggaaaagcttacatttaaccttttgaaaaaataaatacgtgattagcctcaactaaacattgctgactataaagacagtatattcaccatgtcgctggcaatatgtcattgcgtaacaccaaataaccccccagaagtagccagaggccagtttgaacatcacaattctaagtgttttagtaactatttctggcgtgagtcaacagatcatgtagatagagtcaattattgtttgtggagtttttcagctataggggaggggaactattaaaatccatttgtttctattcaataggtaataaaaattagttgtccctgggtttgggaaacttaaatgcccattacagccctggggaagggttttctgtcttatggagtgagtcttagcatttaagttatacagttgctgccttaaaatagtagcctgctacaatgacttctttgggtagccattttcataagaaataaaatacaagatatgagtaatgaa

SEQ ID NO: 316420 - DNA, 3742 bp, Homo sapiens
gcgcttcggagacgccggcccttccgctcggagaggtactccctgcctctaactggtggcgcgttggcggaggccgacgaaagcctcgggtggggcgtgagcgccgcggggcattctggacctgctttgccttaggctgtgcctaattcgaaaccaaagcgcgggacggatgaaagtacgggtcgcgagaggttgttcgcgccttgagagttaagcgaagtgtggtggcttccaaggtaccgacacttgccgtaggctgggcttttatttaagtcgtcttttctctaatccagactcctgccacaggggccaccgccgtcctggccccgccaggggtccgcacccacggcggagcgggaggcgactttttgcggtcacagtaatgggacctcagcgccgccaccagctctgaccggcgagcgacgggaccctccaacccgatttccacgtctgtgcaacgggttcattctagacccacggtagagggtgtgaggaccaaatgagaagtatccacacagaatacttagcagagagcctggtgtctaggaattagtcgtcgtctgtcacctaggactgtgtggccgccatgggacgggctccatctttgtgtttttccgtgtctcgcacacgcctcccttcctgggcgtcacattcctgcagattagaaactgggacgtcttgcctcaagctgtctactaattcgcatttagtatgtgtcggtccttcgggtattgagtcttgatttatttataaattttttttggaggcagggtctcgctctgtcgactttcttaagaaagggctctgtccaaacatgtcgaaaaagttcacaattttgatgtgcaatatcattctgatgcagctttcgctttgatggttgttttctctccaataggaatacaaacataaaggccttcgaccgttgcaaatagactaaagtgaaaacaaatctgaatgaagatgaagttatttcagaccatttgcaggcagctcaggagttcaaagttttctgtggaatcagctgcccttgtggctttctctacttcctcttactcatgtggccggaagaaaaaagtgaacccatatgaagaagtggaccaagaaaaatactctaatttagttcagtctgtcttgtcatccagaggcgtcgcccagaccccgggatcggtggaggaagatgctttgctctgtggacccgtgagcaagcataagctgccaaaccaaggtgaggacagacgagtgccacaaaactggtttcctatcttcaatccagagagaagtgataaaccaaatgcaagtgatccttcagttcctttgaaaatccccttgcaaaggaatgtgataccaagtgtgacccgagtccttcagcagaccatgacaaaacaacaggttttcttgttggagaggtggaaacagcggatgattctggaactgggagaagatggctttaaagaatacacttcaaacgtctttttacaagggaaacggttccacgaagccttggaaagcatactttcaccccaggaaaccttaaaagagagagatgaaaatctcctcaagtctggttacattgaaagtgtccagcatattctgaaagatgtcagtggagtgcgagctcttgaaagtgctgttcaacatgaaaccttaaactatataggtctgctggactgtgtggctgagtatcagggcaagctctgtgtgattgattggaagacatcagagaaaccaaagccttttattcaaagtacatttgacaacccactgcaagttgtggcatacatgggtgccatgaaccatgataccaactacagctttcaggttcaatgtggcttaattgtggtggcctacaaagatggatcacctgcccacccacatttcatggatgcagagctctgttcccagtactggaccaagtggcttcttcgactagaagaatatacggaaaagaaaaagaaccagaatattcagaaaccagaatattcagaatagggagcaagttgctatttgggaacattcagcaccttctcacagtttgggaacatatattgctgtttactccagtgtaaaaatgaggtgccactggatctgagtgctacacgaacacaagtagaagtattaatttgttgaaatgtgttgttaccaaaaagactgaaaagccccaaagtctagatataaagacctagacttcggcacgcgaaatcccagctatgctacctcttatttacctgaaaggaggacacgcaggatgggcagtcatgctggtgactcttgtactcccttgagggacattgggggggggggggcgtggtcccaggcaggatgcccagtctttgagctgagattggaaggcagtgaggctgagggtgccaagatttccccagggttcacccagaggggaaggggctacatgcccccagctgtgtgcagggaggacacatcagcccactaccgctgccaacaccaatgcctaaaacttgtttcatacattggggttttctatatatttcagttgggaaaagcttacatttaaccttttgaaaaaataaatacgtgattagcctcaactaaacattgctgactataaagacagtatattcaccatgtcgctggcaatatgtcattgcgtaacaccaaataaccccccagaagtagccagaggccagtttgaacatcacaattctaagtgttttagtaactatttctggcgtgagtcaacagatcatgtagatagagtcaattattgtttgtggagtttttcagctataggggaggggaactattaaaatccatttgtttctattcaataggtaataaaaattagttgtccctgggtttgggaaacttaaatgcccattacagccctggggaagggttttctgtcttatggagtgagtcttagcatttaagttatacagttgctgccttaaaatagtagcctgctacaatgacttctttgggtagccattttcataagaaataaaatacaagatatgagtaatgaaaaaaaaaaaaaaaaaaaaaaaaaaaaaaaaaaaaaaaaaaaaaaaaaaaaaaaaacaaaaaaaaaaaaaaaaaaaaaaaaaaacaaaaaaaaaaaaaacaaacacaaaaaaaaaaaagcacccaaaaaaacaaaacccggcccccccgcccccaaaaccggtgggggacacccggccttgacgaaaacaaacactcagcgcggagccgcagccggccacacacgaggggcgatacaaccatccgggttgtgctaagggccgtcctacaaacaaaataaacccgcccggccgcggcgacagcaactactaaatcatcgcacacagcccatctcaccaccgtactcgctcgacattgcccgacgaaggcactgcattctcaacctcaccacgctgccaggccacgactcgacacacaacgacacgtgttggggatgggtgttcttgtaggtctgggtagtcgtggcgggtggacggcacaggtgttgtcgtcggcgctagtgagggttgagcgggtgtttcgggtgtggggcaggtgtgagtgtagttgagtgtcgaggggtaggcgcttcgggagggtgcgtgacttgtgagttagcgcgagtgtgtgagaaggtgttgtgtagtgctgcggtagagtaatgtgaggctaacaggtcggacggcggagtagtggcacacacacggaagtgaagagaaggcgtgacgatcagttgaatcagttgaagtgaaacgtacgaggt

SEQ ID NO: 316421 - DNA, 1935 bp, Homo sapiens
agcggagctcattgttggcagctgccgggcggtcctgccgagctgtgagggcaacggaggggaaataaaagggaacggctccgaatctgccccagcggccgctgcgagacctcggcgccgacatcgcgacagcgaagcgctttgcacgccaggaaggtcccctctatgtgctgctgagccggtcctggacgcgacgagcccgccctcggtcttcggagcagaaatcgcaaaaacggaaggactggaaatggcagaccatatgatggccatgaaccacgggcgcttccccgacggcaccaatgggctgcaccatcaccctgcccaccgcatgggcatggggcagttcccgagcccccatcaccaccagcagcagcagccccagcacgccttcaacgccctaatgggcgagcacatacactacggcgcgggcaacatgaatgccacgagcggcatcaggcatgcgatggggccggggactgtgaacggagggcaccccccgagcgcgctggcccccgcggccaggtttaacaactcccagttcatgggtcccccggtggccagccagggaggctccctgccggccagcatgcagctgcagaagctcaacaaccagtatttcaaccatcacccctacccccacaaccactacatgccggatttgcaccctgctgcaggccaccagatgaacgggacaaaccagcacttccgagattgcaaccccaagcacagcggcggcagcagcacccccggcggctcgggcggcagcagcacccccggcggctctggcagcagctcgggcggcggcgcgggcagcagcaacagcggcggcggcagcggcagcggcaacatgcccgcctccgtggcccacgtccccgctgcaatgctgccgcccaatgtcatagacactgatttcatcgacgaggaagttcttatgtccttggtgatagaaatgggtttggaccgcatcaaggagctgcccgaactctggctggggcaaaacgagtttgattttatgacggacttcgtgtgcaaacagcagcccagcagagtgagctgttgactcgatcgaaaccccggcgaaagaaatcaaacccccaacttcttcggcgtgaattaaaagaaacattcccttagacacagtatctcacttttcagatcttgaaaggtttgagaacttggaaacaaagtaaactataaacttgtacaaattggttttaaaaaaaattgctgccacttttttttcctgtttttgtttcgtttttgtagccttgacattcacccacctcccttatgtagttgaaatatctagctaacttggtctttttcgttgtttgtttttactcctttccctcactttctccagtgctcaactgttagatattaatcttggcaaactgcttaatcttgtggattttgtagatggtttcaaatgactgaactgcattcagatttacgagtgaaaggaaaaattgcattagttggttgcatgaacttcgaagggcagatattactgcacaaactgccatctcgcttcatttttttaactatgcatttgagtacagactaatttttaaaatatgctaaactggaagattaaacagatgtgggccaaactgttctggatcaggaaagtcatactgttcactttcaagttggctgtcccccccgccgccccccccacccccatatgtacagatgataatagggtgtggaatgtcgtcagtggcaaacatttcacagatttttattttgtttctgtcttcaacatttttgacactgtgctaatagttatattcagtacatgaaaagatactactgtgttgaaagctttttaggaaattttgacagtatttttgtacaaaacatttttttgaaaaaatacttgttaatttattctattttaatttgccaatgtcaataaaaagttaagaaata

SEQ ID NO: 316422 - DNA, 846 bp, Homo sapiens
agcggagctcattgttggcagctgccgggcggtcctgccgagctgtgagggcaacggaggggaaataaaagggaacggctccgaatctgccccagcggccgctgcgagacctcggcgccgacatcgcgacagcgaagcgctttgcacgccaggaaggtcccctctatgtgctgctgagccggtcctggacgcgacgagcccgccctcggtcttcggagcagaaatcgcaaaaacggaaggactggaaatggcagaccatatgatggccatgaaccacgggcgcttccccgacggcaccaatgggctgcaccatcaccctgcccaccgcatgggcatggggcagttcccgagcccccatcaccaccagcagcagcagccccagcacgccttcaacgccctaatgggcgagcacatacactacggcgcgggcaacatgaatgccacgagcggcatcaggcatgcgatggggccggggactgtgaacggagggcaccccccgagcgcgctggcccccgcggccaggtttaacaactcccagttcatgggtcccccggtggccagccagggaggctccctgccggccagcatgcagctgcagaagctcaacaaccagtatttcaaccatcacccctacccccacaaagagtaagtgcgggattgagcccgttgcgggcccagataacgggagaacaacgttcgaatgaacccaccaaaggaggagaacccagggctgtggggacccggttccgataaccttgtgagggagaacaaactgaggcgaggcacacagaacactcgacaagcacaggagtagagaaatcacaccagttgctagtggcgcgcatt

SEQ ID NO: 316423 - DNA, 2378 bp, Homo sapiens
agcggagctcattgttggcagctgccgggcggtcctgccgagctgtgagggcaacggaggggaaataaaagggaacggctccgaatctgccccagcggccgctgcgagacctcggcgccgacatcgcgacagcgaagcgctttgcacgccaggaaggtcccctctatgtgctgctgagccggtcctggacgcgacgagcccgccctcggtcttcggagcagaaatcgcaaaaacggaaggactggaaatggcagaccatatgatggccatgaaccacgggcgcttccccgacggcaccaatgggctgcaccatcaccctgcccaccgcatgggcatggggcagttcccgagcccccatcaccaccagcagcagcagccccagcacgccttcaacgccctaatgggcgagcacatacactacggcgcgggcaacatgaatgccacgagcggcatcaggcatgcgatggggccggggactgtgaacggagggcaccccccgagcgcgctggcccccgcggccaggtttaacaactcccagttcatgggtcccccggtggccagccagggaggctccctgccggccagcatgcagctgcagaagctcaacaaccagtatttcaaccatcacccctacccccacaaccactacatgccggatttgcaccctgctgcaggccaccagatgaacgggacaaaccagcacttccgagattgcaaccccaagcacagcggcggcagcagcacccccggcggctcgggcggcagcagcacccccggcggctctggcagcagctcgggcggcggcgcgggcagcagcaacagcggcggcggcagcggcagcggcaacatgcccgcctccgtggcccacgtccccgctgcaatgctgccgcccaatgtcatagacactgatttcatcgacgaggaagttcttatgtccttggtgatagaaatgggtttggaccgcatcaaggagctgcccgaactctggctggggcaaaacgagtttgattttatgacggacttcgtgtgcaaacagcagcccagcagagtgagctgttgactcgatcgaaaccccggcgaaagaaatcaaacccccaacttcttcggcgtgaattaaaagaaacattcccttagacacagtatctcacttttcagatcttgaaaggtttgagaacttggaaacaaagtaaactataaacttgtacaaattggttttaaaaaaaattgctgccacttttttttcctgtttttgtttcgtttttgtagccttgacattcacccacctcccttatgtagttgaaatatctagctaacttggtctttttcgttgtttgtttttactcctttccctcactttctccagtgctcaactgttagatattaatcttggcaaactgcttaatcttgtggattttgtagatggtttcaaatgactgaactgcattcagatttacgagtgaaaggaaaaattgcattagttggttgcatgaacttcgaagggcagatattactgcacaaactgccatctcgcttcatttttttaactatgcatttgagtacagactaatttttaaaatatgctaaactggaagattaaacagatgtgggccaaactgttctggatcaggaaagtcatactgttcactttcaagttggctgtcccccccgccgccccccccacccccatatgtacagatgataatagggtgtggaatgtcgtcagtggcaaacatttcacagatttttattttgtttctgtcttcaacatttttgacactgtgctaatagttatattcagtacatgaaaagatactactgtgttgaaagctttttaggaaattttgacagtatttttgtacaaaacatttttttgaaaaaatacttgttaatttattctattttaatttgccaatgtcaataaaaagttaagaaataacttgttttctagaagtcatttgggggtggttgttccctttggtggcttttttccccccgtctttgagttgaacactattgatgagagtaagcattccaaaggataaattacaggacactaaaacaggtcatgatgagcttaagcggagagcaggatttaacataattggcataatgcttcattgttatcattgtaacatgcctcttggtgtgctttaatcaaaagctgcaaagttgtcactgcttttttttttttcttaattgccatcatatcaagtgtactccagagttagaaaggtttgcaatactcaacattatctttttcaatgggcaggaggcaaaaaaaatcaagtgtttctgtttatacctgattcaactacttaaatagaggtagattggaataatacactgattgattgatgggtggcattaaatataaatct

SEQ ID NO: 316424 - DNA, 1778 bp, Homo sapiens
caaagggggtgtgggctcgggtccccccgcccgatcgcaggggaaggggctgtttgtgcagcgtccggctgtgttatgagtggactggaaatggcagaccatatgatggccatgaaccacgggcgcttccccgacggcaccaatgggctgcaccatcaccctgcccaccgcatgggcatggggcagttcccgagcccccatcaccaccagcagcagcagccccagcacgccttcaacgccctaatgggcgagcacatacactacggcgcgggcaacatgaatgccacgagcggcatcaggcatgcgatggggccggggactgtgaacggagggcaccccccgagcgcgctggcccccgcggccaggtttaacaactcccagttcatgggtcccccggtggccagccagggaggctccctgccggccagcatgcagctgcagaagctcaacaaccagtatttcaaccatcacccctacccccacaaccactacatgccggatttgcaccctgctgcaggccaccagatgaacgggacaaaccagcacttccgagattgcaaccccaagcacagcggcggcagcagcacccccggcggctcgggcggcagcagcacccccggcggctctggcagcagctcgggcggcggcgcgggcagcagcaacagcggcggcggcagcggcagcggcaacatgcccgcctccgtggcccacgtccccgctgcaatgctgccgcccaatgtcatagacactgatttcatcgacgaggaagttcttatgtccttggtgatagaaatgggtttggaccgcatcaaggagctgcccgaactctggctggggcaaaacgagtttgattttatgacggacttcgtgtgcaaacagcagcccagcagagtgagctgttgactcgatcgaaaccccggcgaaagaaatcaaacccccaacttcttcggcgtgaattaaaagaaacattcccttagacacagtatctcacttttcagatcttgaaaggtttgagaacttggaaacaaagtaaactataaacttgtacaaattggttttaaaaaaaattgctgccacttttttttcctgtttttgtttcgtttttgtagccttgacattcacccacctcccttatgtagttgaaatatctagctaacttggtctttttcgttgtttgtttttactcctttccctcactttctccagtgctcaactgttagatattaatcttggcaaactgcttaatcttgtggattttgtagatggtttcaaatgactgaactgcattcagatttacgagtgaaaggaaaaattgcattagttggttgcatgaacttcgaagggcagatattactgcacaaactgccatctcgcttcatttttttaactatgcatttgagtacagactaatttttaaaatatgctaaactggaagattaaacagatgtgggccaaactgttctggatcaggaaagtcatactgttcactttcaagttggctgtcccccccgccgccccccccacccccatatgtacagatgataatagggtgtggaatgtcgtcagtggcaaacatttcacagatttttattttgtttctgtcttcaacatttttgacactgtgctaatagttatattcagtacatgaaaagatactactgtgttgaaagctttttaggaaattttgacagtatttttgtacaaaacatttttttgaaaaaatacttgttaatttattctattttaatttgccaatgtcaataaaaagttaagaaata

SEQ ID NO: 316425 - DNA, 1919 bp, Homo sapiens
agcggagctcattgttggcagctgccgggcggtcctgccgagctgtgagggcaacggaggggaaataaaagggaacggctccgaatctgccccagcggccgctgcgagacctcggcgccgacatcgcgacagcgaagcgctttgcacgccaggaaggtcccctctatgtgctgctgagccggtcctggacgcgacgagcccgccctcggtcttcggagcagaaatcgcaaaaacggaaggactggaaatggcagaccatatgatggccatgaaccacgggcgcttccccgacggcaccaatgggctgcaccatcaccctgcccaccgcatgggcatggggcagttcccgagcccccatcaccaccagcagcagcagccccagcacgccttcaacgccctaatgggcgagcacatacactacggcgcgggcaacatgaatgccacgagcggcatcaggcatgcgatggggccggggactgtgaacggagggcaccccccgagcgcgctggcccccgcggccaggtttaacaactcccagttcatgggtcccccggtggccagccagggaggctccctgccggccagcatgcagctgcagaagctcaacaaccagtatttcaaccatcacccctacccccacaaccactacatgccggatttgcaccctgctgcaggccaccagatgaacgggacaaaccagcacttccgagattgcaaccccaagcacagcggcggcagcagcacccccggcggctcgggcggcagcagcacccccggcggctctggcagcagctcgggcggcggcgcgggcagcagcaacagcggcggcggcagcggcagcggcaacatgcccgcctccgtggcccacgtccccgctgcaatgctgccgcccaatgtcatagacactgatttcatcgacgaggaagttcttatgtccttggtgatagaaatgggtttggaccgcatcaaggagctgcccgaactctggctggggcaaaacgagtttgattttatgacggacttcgtgtgcaaacagcagcccagcagagtgagctgttgactcgatcgaaaccccggcgaaagaaatcaaacccccaacttcttcggcgtgaattaaaagaaacattcccttagacacagtatctcacttttcagatcttgaaaggtttgagaacttggaaacaaagtaaactataaacttgtacaaattggttttaaaaaaaattgctgccacttttttttcctgtttttgtttcgtttttgtagccttgacattcacccacctcccttatgtagttgaaatatctagctaacttggtctttttcgttgtttgtttttactcctttccctcactttctccagtgctcaactgttagatattaatcttggcaaactgcttaatcttgtggattttgtagatggtttcaaatgactgaactgcattcagatttacgagtgaaaggaaaaattgcattagttggttgcatgaacttcgaagggcagatattactgcacaaactgccatctcgcttcatttttttaactatgcatttgagtacagactaatttttaaaatatgctaaactggaagattaaacagattggatcaggaaagtcatactgttcactttcaagttggctgtcccccccgccgccccccccacccccatatgtacagatgataatagggtgtggaatgtcgtcagtggcaaacatttcacagatttttattttgtttctgtcttcaacatttttgacactgtgctaatagttatattcagtacatgaaaagatactactgtgttgaaagctttttaggaaattttgacagtatttttgtacaaaacatttttttgaaaaaatacttgttaatttattctattttaatttgccaatgtcaataaaaagttaagaaata

SEQ ID NO: 316426 - DNA, 911 bp, Homo sapiens
atccagctcggacccactttcagagtgagctgttgactcgatcgaaaccccggcgaaagaaatcaaacccccaacttcttcggcgtgaattaaaagaaacattcccttagacacagtatctcacttttcagatcttgaaaggtttgagaacttggaaacaaagtaaactataaacttgtacaaattggttttaaaaaaaattgctgccacttttttttcctgtttttgtttcgtttttgtagccttgacattcacccacctcccttatgtagttgaaatatctagctaacttggtctttttcgttgtttgtttttactcctttccctcactttctccagtgctcaactgttagatattaatcttggcaaactgcttaatcttgtggattttgtagatggtttcaaatgactgaactgcattcagatttacgagtgaaaggaaaaattgcattagttggttgcatgaacttcgaagggcagatattactgcacaaactgccatctcgcttcatttttttaactatgcatttgagtacagactaatttttaaaatatgctaaactggaagattaaacagatgtgggccaaactgttctggatcaggaaagtcatactgttcactttcaagttggctgtcccccccgccgccccccccacccccatatgtacagatgataatagggtgtggaatgtcgtcagtggcaaacatttcacagatttttattttgtttctgtcttcaacatttttgacactgtgctaatagttatattcagtacatgaaaagatactactgtgttgaaagctttttaggaaattttgacagtatttttgtacaaaacatttttttgaaaaaatacttgttaatttattctattttaatttgccaatgtcaataaaaagttaagaaata

SEQ ID NO: 316427 - DNA, 1542 bp, Homo sapiens
agcggagctcattgttggcagctgccgggcggtcctgccgagctgtgagggcaacggaggggaaataaaagggaacggctccgaatctgccccagcggccgctgcgagacctcggcgccgacatcgcgacagcgaagcgctttgcacgccaggaaggtcccctctatgtgctgctgagccggtcctggacgcgacgagcccgccctcggtcttcggagcagaaatcgcaaaaacggaaggactggaaatggcagaccatatgatggccatgaaccacgggcgcttccccgacggcaccaatgggctgcaccatcaccctgcccaccgcatgggcatggggcagttcccgagcccccatcaccaccagcagcagcagccccagcacgccttcaacgccctaatgggcgagcacatacactacggcgcgggcaacatgaatgccacgagcggcatcaggcatgcgatggggccggggactgtgaacggagggcaccccccgagcgcgctggcccccgcggccaggtttaacaactcccagttcatgggtcccccggtggccagccagggaggctccctgccggccagcatgcagctgcagaagctcaacaaccagtatttcaaccatcacccctacccccacaaccactacatgccggatttgcaccctgctgcaggccaccagatgaacgggacaaaccagcacttccgagattgcaaccccaagcacagcggcggcagcagcacccccggcggctcgggcggcagcagcacccccggcggctctggcagcagctcgggcggcggcgcgggcagcagcaacagcggcggcggcagcggcagcggcaacatgcccgcctccgtggcccacgtccccgctgcaatgctgccgcccaatgtcatagacactgatttcatcgacgaggaagttcttatgtccttggtgatagaaatgggtttggaccgcatcaaggagctgcccgaactctggctggggcaaaacgagtttgattttatgacggacttcgtgtgcaaacagcagcccagcagagtgagctgttgactcgatcgaaaccccggcgaaagaaatcaaacccccaacttcttcggcgtgaattaaaagaaacattcccttagacacagtatctcacttttcagatcttgaaaggtttgagaacttggaaacaaagtaaactataaacttgtacaaattggttttaaaaaaaattgctgccacttttttttcctgtttttgtttcgtttttgtagccttgacattcacccacctcccttatgtagttgaaatatctagctaacttggtctttttcgttgtttgtttttactcctttccctcactttctccagtgctcaactgttagatattaatcttggcaaactgcttaatcttgtggattttgtagatggtttcaaatgactgaactgcattcagatttacgagtgaaaggaaaaattgcagtaatatctgcccttcaaagttcatgcaaccaactaatgtcgacgcggccgcgaatttagtagtagta

SEQ ID NO: 316428 - DNA, 744 bp, Homo sapiens
agagagagagagagagagagagagagagagagagagagagagagagagagagagagagagagagagagagagtagccttgacattcacccacctcccttatgtagttgaaatatctagctaacttggtctttttcgttgtttgtttttactcctttccctcactttctccagtgctcaactgttagatattaatcttggcaaactgcttaatcttgtggattttgtagatggtttcaaatgactgaactgcattcagatttacgagtgaaaggaaaaattgcattagttggttgcatgaacttcgaagggcagatattactgcacaaactgccatctcgcttcatttttttaactatgcatttgagtacagactaatttttaaaatatgctaaactggaagattaaacagatgtgggccaaactgttctggatcaggaaagtcatactgttcactttcaagttggctgtcccccccgccgccccccccacccccatatgtacagatgataatagggtgtggaatgtcgtcagtggcaaacatttcacagatttttattttgtttctgtcttcaacatttttgacactgtgctaatagttatattcagtacatgaaaagatactactgtgttgaaagctttttaggaaattttgacagtatttttgtacaaaacatttttttgaaaaaatacttgttaatttattctattttaatttgccaatgtcaataaaaagttaagaaata

SEQ ID NO: 316429 - DNA, 1764 bp, Homo sapiens
agcggagctcattgttggcagctgccgggcggtcctgccgagctgtgagggcaacggaggggaaataaaagggaacggctccgaatctgccccagcggccgctgcgagacctcggcgccgacatcgcgacagcgaagcgctttgcacgccaggaaggtcccctctatgtgctgctgagccggtcctggacgcgacgagcccgccctcggtcttcggagcagaaatcgcaaaaacggaaggactggaaatggcagaccatatgatggccatgaaccacgggcgcttccccgacggcaccaatgggctgcaccatcaccctgcccaccgcatgggcatggggcagttcccgagcccccatcaccaccagcagcagcagccccagcacgccttcaacgccctaatgggcgagcacatacactacggcgcgggcaacatgaatgccacgagcggcatcaggcatgcgatggggccggggactgtgaacggagggcaccccccgagcgcgctggcccccgcggccaggtttaacaactcccagttcatgggtcccccggtggccagccagggaggctccctgccggccagcatgcagctgcagaagctcaacaaccagtatttcaaccatcacccctacccccacaaccactacatgccggatttgcaccctgctgcaggccaccagatgaacgggacaaaccagcacttccgagattgcaaccccaatgtcatagacactgatttcatcgacgaggaagttcttatgtccttggtgatagaaatgggtttggaccgcatcaaggagctgcccgaactctggctggggcaaaacgagtttgattttatgacggacttcgtgtgcaaacagcagcccagcagagtgagctgttgactcgatcgaaaccccggcgaaagaaatcaaacccccaacttcttcggcgtgaattaaaagaaacattcccttagacacagtatctcacttttcagatcttgaaaggtttgagaacttggaaacaaagtaaactataaacttgtacaaattggttttaaaaaaaattgctgccacttttttttcctgtttttgtttcgtttttgtagccttgacattcacccacctcccttatgtagttgaaatatctagctaacttggtctttttcgttgtttgtttttactcctttccctcactttctccagtgctcaactgttagatattaatcttggcaaactgcttaatcttgtggattttgtagatggtttcaaatgactgaactgcattcagatttacgagtgaaaggaaaaattgcattagttggttgcatgaacttcgaagggcagatattactgcacaaactgccatctcgcttcatttttttaactatgcatttgagtacagactaatttttaaaatatgctaaactggaagattaaacagatgtgggccaaactgttctggatcaggaaagtcatactgttcactttcaagttggctgtcccccccgccgccccccccacccccatatgtacagatgataatagggtgtggaatgtcgtcagtggcaaacatttcacagatttttattttgtttctgtcttcaacatttttgacactgtgctaatagttatattcagtacatgaaaagatactactgtgttgaaagctttttaggaaattttgacagtatttttgtacaaaacatttttttgaaaaaatacttgttaatttattctattttaatttgccaatgtcaataaaaagttaagaaata

SEQ ID NO: 316430 - DNA, 1957 bp, Homo sapiens
caaagggggtgtgggctcgggtccccccgcccgatcgcaggggaaggggctgtttgtgcagcgtccggctgtgttatgagtggtagctcttccgtggtggctagcccgggtgcacaggctgttagtgggatcttgggggtggtggttcgcagccgacgtgcgcccgggaatcctggggggcagaggcgagcaaaagtggggtgcgctgtggtgggcgacacgtgtggcgcgggtctcattatctgcccttttcacttccaggactggaaatggcagaccatatgatggccatgaaccacgggcgcttccccgacggcaccaatgggctgcaccatcaccctgcccaccgcatgggcatggggcagttcccgagcccccatcaccaccagcagcagcagccccagcacgccttcaacgccctaatgggcgagcacatacactacggcgcgggcaacatgaatgccacgagcggcatcaggcatgcgatggggccggggactgtgaacggagggcaccccccgagcgcgctggcccccgcggccaggtttaacaactcccagttcatgggtcccccggtggccagccagggaggctccctgccggccagcatgcagctgcagaagctcaacaaccagtatttcaaccatcacccctacccccacaaccactacatgccggatttgcaccctgctgcaggccaccagatgaacgggacaaaccagcacttccgagattgcaaccccaagcacagcggcggcagcagcacccccggcggctcgggcggcagcagcacccccggcggctctggcagcagctcgggcggcggcgcgggcagcagcaacagcggcggcggcagcggcagcggcaacatgcccgcctccgtggcccacgtccccgctgcaatgctgccgcccaatgtcatagacactgatttcatcgacgaggaagttcttatgtccttggtgatagaaatgggtttggaccgcatcaaggagctgcccgaactctggctggggcaaaacgagtttgattttatgacggacttcgtgtgcaaacagcagcccagcagagtgagctgttgactcgatcgaaaccccggcgaaagaaatcaaacccccaacttcttcggcgtgaattaaaagaaacattcccttagacacagtatctcacttttcagatcttgaaaggtttgagaacttggaaacaaagtaaactataaacttgtacaaattggttttaaaaaaaattgctgccacttttttttcctgtttttgtttcgtttttgtagccttgacattcacccacctcccttatgtagttgaaatatctagctaacttggtctttttcgttgtttgtttttactcctttccctcactttctccagtgctcaactgttagatattaatcttggcaaactgcttaatcttgtggattttgtagatggtttcaaatgactgaactgcattcagatttacgagtgaaaggaaaaattgcattagttggttgcatgaacttcgaagggcagatattactgcacaaactgccatctcgcttcatttttttaactatgcatttgagtacagactaatttttaaaatatgctaaactggaagattaaacagatgtgggccaaactgttctggatcaggaaagtcatactgttcactttcaagttggctgtcccccccgccgccccccccacccccatatgtacagatgataatagggtgtggaatgtcgtcagtggcaaacatttcacagatttttattttgtttctgtcttcaacatttttgacactgtgctaatagttatattcagtacatgaaaagatactactgtgttgaaagctttttaggaaattttgacagtatttttgtacaaaacatttttttgaaaaaatacttgttaatttattctattttaatttgccaatgtcaataaaaagttaagaaata

SEQ ID NO: 316431 - DNA, 1891 bp, Homo sapiens
agcggagctcattgttggcagctgccgggcggtcctgccgagctgtgagggcaacggaggggaaataaaagggaacggctccgaatctgccccagcggccgctgcgagacctcggcgccgacatcgcgacagcgaagcgctttgcacgccaggaaggtcccctctatgtgctgctgagccggtcctggacgcgacgagcccgccctcggtcttcggagcagaaatcgcaaaaacggaagttccccgacggcaccaatgggctgcaccatcaccctgcccaccgcatgggcatggggcagttcccgagcccccatcaccaccagcagcagcagccccagcacgccttcaacgccctaatgggcgagcacatacactacggcgcgggcaacatgaatgccacgagcggcatcaggcatgcgatggggccggggactgtgaacggagggcaccccccgagcgcgctggcccccgcggccaggtttaacaactcccagttcatgggtcccccggtggccagccagggaggctccctgccggccagcatgcagctgcagaagctcaacaaccagtatttcaaccatcacccctacccccacaaccactacatgccggatttgcaccctgctgcaggccaccagatgaacgggacaaaccagcacttccgagattgcaaccccaagcacagcggcggcagcagcacccccggcggctcgggcggcagcagcacccccggcggctctggcagcagctcgggcggcggcgcgggcagcagcaacagcggcggcggcagcggcagcggcaacatgcccgcctccgtggcccacgtccccgctgcaatgctgccgcccaatgtcatagacactgatttcatcgacgaggaagttcttatgtccttggtgatagaaatgggtttggaccgcatcaaggagctgcccgaactctggctggggcaaaacgagtttgattttatgacggacttcgtgtgcaaacagcagcccagcagagtgagctgttgactcgatcgaaaccccggcgaaagaaatcaaacccccaacttcttcggcgtgaattaaaagaaacattcccttagacacagtatctcacttttcagatcttgaaaggtttgagaacttggaaacaaagtaaactataaacttgtacaaattggttttaaaaaaaattgctgccacttttttttcctgtttttgtttcgtttttgtagccttgacattcacccacctcccttatgtagttgaaatatctagctaacttggtctttttcgttgtttgtttttactcctttccctcactttctccagtgctcaactgttagatattaatcttggcaaactgcttaatcttgtggattttgtagatggtttcaaatgactgaactgcattcagatttacgagtgaaaggaaaaattgcattagttggttgcatgaacttcgaagggcagatattactgcacaaactgccatctcgcttcatttttttaactatgcatttgagtacagactaatttttaaaatatgctaaactggaagattaaacagatgtgggccaaactgttctggatcaggaaagtcatactgttcactttcaagttggctgtcccccccgccgccccccccacccccatatgtacagatgataatagggtgtggaatgtcgtcagtggcaaacatttcacagatttttattttgtttctgtcttcaacatttttgacactgtgctaatagttatattcagtacatgaaaagatactactgtgttgaaagctttttaggaaattttgacagtatttttgtacaaaacatttttttgaaaaaatacttgttaatttattctattttaatttgccaatgtcaataaaaagttaagaaata

SEQ ID NO: 316432 - DNA, 450 bp, Homo sapiens
agccaacttatcccaccttctgcctgttttgttctagccacactggcagctgttagatggtgtccacccacattgagggtgggtctgccactcacagtccacggactcaaattttaatctcctctggcaacaccctcacagacacacccaggaacaagtttaccagctatctaggcatccttcaatctgatcaggttgatatattaacatcacaagtccttgtcaacttgaaccccttgtcaacttgaacccatacacatctcctgaaatcatatttaatctccaaataaaggaaataataaggtcataattacacctaacgtaatacagctatccttcatacaaccagaagcacactaatccttaacctaaatgctattacataaagttaacaacatttaaatgctgatataaaatcaataaatcttatgtcacatgataatggaaaaa

SEQ ID NO: 316433 - DNA, 397 bp, Homo sapiens
  misc_feature (68)..(68): n is a, c, g, or t
  misc_feature (116)..(116): n is a, c, g, or t
tcagctcagacatcctgtctggtcatttgttgttgcgcagcctctgcttatcacaggggaataaggantactcatccctaactgcttattgacttctatcccgtgttagagctgtntggaagtctctgagttataacggcctaatagtttgatattggtccttgaagcagttcaatctctgaattggctcagcagttctgttttacagctgcaactctctgggccagtaaaaaaaagacagatttctaatttttccctttgaaactactttattttactaatttaaactattttgtactgatgtagccctgaggtagttcatgaaaatgctgtgcactcattccatggaataaatgttggaaagctgatcttttctgatataaaatgttgaatgata

SEQ ID NO: 316434 - DNA, 752 bp, Homo sapiens
ccaaaggccagtggaaggagctcaggcttggcggcatctggtttgcttgtctgggcctactcctttgcatgatataacaaatggcagggaaagacattcccggtcaggcatctctggtgtttgatgttgcattattggacctccataaccccaaggacagcatttccattgagaacaaggtagtacctgaaaactgtgagcggataagtcaaagtggggactttctcaggtatcattacaatggcacgcttctggatggcaccctctttgattccagctactctcggaaccgcacgtttgacacgtacattgggcagggctacgtgattcctgggatggatgaaggtctacttggtgtttgcattggagaaaagcgaaggattgtggtcccgcctcacctggggtatggagaggaaggaagaggacggagtctcactctgttgcccaggctagagtacagtggtgcaatcctaactcactgtagccttgacctcctggcctcaagcaatcctcctgcctcaacctcccgagtatctgggactacaagtgctcaccaccacgcccagctaatttttttgtagagacatttggctgtgttgcctaggctggtctcaaacccctggcctcaagtgatcctcccacctcagcctcccagagttgagattataggcatgagccaccaccatacctaacctgagttggtttttttatatgtaaaatgctgatgataataaaatatgtccttgactcta

SEQ ID NO: 316435 - DNA, 650 bp, Homo sapiens
ttctcttccgactttgggccaaagccttgtccggagatcacagtgtctcgctcggggacacgccctctctaggcccagacttggtccccactggagttcccagcccccctccccgctgcggcacgcacattcccaatgccgggcggggcagggcgcagcaggcccgccctcggcgcgcggccaggctgggctcctcccctggagctgcggccgggagggcgggcggccggggagacggggtggcggctgcagcccgggtagggccaggagacccggtccacgtttgcaaacgcagccgaacgcccaggccgacccgtgccgcccgagcgccgcgctgcgtccgcgccactcttctcgccgccccgatggcgttccggggctggaggcccccgccgccaccgctgctcctgctgctgctctgggtgaccgggcaggcagcgcccgtggcgggcctgggctccgacgcggagctgcagatcgagcggcgcttcgtgcccgacgagtgcccgcgcaccgtgcgcagcggcgacttcgtgcgctaccactacgtggggacgttccccgacggccagaagttcgactccaggtaccgcgcccttggcgcccggcgcggcctcagcggatgcgcgtccctctctccggacaggcct

SEQ ID NO: 316436 - DNA, 2674 bp, Homo sapiens
ccaaaggccagtggaaggagctcaggcttggcggcatctggtttgcttgtctgggcctactcctttgcatgatataacaaatggcagggaaagacattcccggtcaggcatctctggtgtttgatgttgcattattggacctccataaccccaaggacagcatttccattgagaacaaggtagtacctgaaaactgtgagcggataagtcaaagtggggactttctcaggtatcattacaatggcacgcttctggatggcaccctctttgattccagctactctcggaaccgcacgtttgacacgtacattgggcagggctacgtgattcctgggatggatgaaggtctacttggtgtttgcattggagaaaagcgaaggattgtggtcccgcctcacctggggtatggagaggaaggaagagggaatatccccggctcggctgtgctggtgtttgacatccatgtgatcgacttccacaacccttcggactccatcagcatcacctcccactacaaaccccctgactgctcagtgctgagtaagaagggagattacctcaaatatcactacaatgcctcacttctggatgggaccctgctggactccacgtggaatttaggcaaaacttacaatattgttctgggatctgggcaagttgtgttggggatggacatgggtctcagagagatgtgcgttggcgagaaacggacagtgatcattccgcctcacctgggctatggggaagctggcgtggatggagaagtgcccggcagtgccgtattagtgtttgacattgagctgctggagctggtggctggccttcctgaggggtacatgttcatatggaatggtgaggtgtcacccaacctctttgaagaaattgacaaggatggcaacggagaagtcctcctggaagagttctcagagtacattcacgcccaggtggcatctggcaaagggaaactcgctcctggctttgatgctgagctgattgtgaagaatatgttcaccaaccaggaccggaatggagatgggaaggtcacagccgaggaatttaaactcaaagaccaggaagccaaacacgatgaactctaaacctggcatgaaccagatggtgccagggagtacgtgacaccaagccacctgtgtggcaagacgtgcagtgagggtgcaagggtctctcagaagttgcatcattagccagtagtaggtgggtcacatagtacctggtgtacacatcggggtgggttgatatatggggtgagaagtttgggctgatcgccagtgatagtaaacaaaatctgtgcagagggccttagcatgggatgtgtccagtattgaaaaggctgcactgccaaccatgatttgtgagccttctgggaaattttgttattaaaggaatatatagtgtcagacggaagttataatcatcttggaggaaccataagaaaaggtgtccagggtatctatataaagagggttaaatttttttttaacttgctggttaaaacattttagaaatattctagagatgggcaggagagtcaaagggcttgcttgccccagcagagttcccagcagacagccatggctcttcccagcagcctgtgcaaattctgatgatggccccacccccgcacacgcacacgcacatcatgcttttccagctcatcacaccccgccccactatgggcctaccattaatagtgtataacttggaggttaaaagagccttttggacagaaaactgggccaggaaaaggcatctcagaccacaaatagagaatttgattcctcatttgccacataagtcatctgcttagcttttcctttcctttttttttttttttttttttctggaggcagagtctccctttgtcgccaggctggagtgcagtggtgccatctcggctcactgcagcactgtctcggctcactgcagcctccgcctcccgtattcaagcgattctcctgtctcagcctcctgagtagctgggactacaggtgtgcaccaccacgcccggctaatttttgtatttttagtagagacggggtttcactgtgttggccaggatggtctcaatctcgacctcgtgatccgcccaccttggcctcccaaagtgttgggattacaggcgtgactcaccatgcccagccacttagttttttcttattcccacctttctatcccatagaacactcttttttatcttccctgaaccatattgatgagataaatagggctgggggctgggccccgctggtcactcaacagagtatttcccttggccgagatggaagttttgtcccaatagatgagctgctgagtatcaacaaggtgacatttttctgctgcccatttgtgtcctggagacggtggtaccctgaaggcagaggccagctgccgcaagacagcaatgacagtccacctgccgacctgattcctgcatcatggaataaccacatggctaccttctatcctctgttcccaaatggtggtggcacttatcctgaagtcgtcaatgatttccctttgaaactactttattttactaatttaaactattttgtactgatgtagccctgaggtagttcatgaaaatgctgtgcactcattccatggaataaatgttggaaagctgatcttttctgatataaaatgttgaatgata

SEQ ID NO: 316437 - DNA, 3806 bp, Homo sapiens
ttctcttccgactttgggccaaagccttgtccggagatcacagtgtctcgctcggggacacgccctctctaggcccagacttggtccccactggagttcccagcccccctccccgctgcggcacgcacattcccaatgccgggcggggcagggcgcagcaggcccgccctcggcgcgcggccaggctgggctcctcccctggagctgcggccgggagggcgggcggccggggagacggggtggcggctgcagcccgggtagggccaggagacccggtccacgtttgcaaacgcagccgaacgcccaggccgacccgtgccgcccgagcgccgcgctgcgtccgcgccactcttctcgccgccccgatggcgttccggggctggaggcccccgccgccaccgctgctcctgctgctgctctgggtgaccgggcaggcagcgcccgtggcgggcctgggctccgacgcggagctgcagatcgagcggcgcttcgtgcccgacgagtgcccgcgcaccgtgcgcagcggcgacttcgtgcgctaccactacgtggggacgttccccgacggccagaagttcgactccagctatgacagagactccactttcaatgtgtttgtgggaaaaggacagctgatcacagggatggaccaggctcttgttgggatgtgcgtaaacgagagacgtttcgtgaagattcccccaaagcttgcctacggaaatgaaggagtttctggtgtgatcccccccaattcagtgcttcattttgatgtacttctgatggatatttggaattctgaagaccaggttcagattcacacctatttcaagcccccgagttgccctcggaccatccaggtgtctgattttgtgaggtaccactacaacgggacgttcctggacggaactctgtttgattcgagtcacaatcgcatgaaaacatatgacacgtatgtgggaattggctggctgattcctggaatggataaagggctgctggggatgtgtgtgggtgagaagcgcatcatcaccattcctccttttctggcctatggagaggatggagatgggaaagacattcccggtcaggcatctctggtgtttgatgttgcattattggacctccataaccccaaggacagcatttccattgagaacaaggtagtacctgaaaactgtgagcggataagtcaaagtggggactttctcaggtatcattacaatggcacgcttctggatggcaccctctttgattccagctactctcggaaccgcacgtttgacacgtacattgggcagggctacgtgattcctgggatggatgaaggtctacttggtgtttgcattggagaaaagcgaaggattgtggtcccgcctcacctggggtatggagaggaaggaagagggaatatccccggctcggctgtgctggtgtttgacatccatgtgatcgacttccacaacccttcggactccatcagcatcacctcccactacaaaccccctgactgctcagtgctgagtaagaagggagattacctcaaatatcactacaatgcctcacttctggatgggaccctgctggactccacgtggaatttaggcaaaacttacaatattgttctgggatctgggcaagttgtgttggggatggacatgggtctcagagagatgtgcgttggcgagaaacggacagtgatcattccgcctcacctgggctatggggaagctggcgtggatggagaagtgcccggcagtgccgtattagtgtttgacattgagctgctggagctggtggctggccttcctgaggggtacatgttcatatggaatggtgaggtgtcacccaacctctttgaagaaattgacaaggatggcaacggagaagtcctcctggaagagttctcagagtacattcacgcccaggtggcatctggcaaagggaaactcgctcctggctttgatgctgagctgattgtgaagaatatgttcaccaaccaggaccggaatggagatgggaaggtcacagccgaggaatttaaactcaaagaccaggaagccaaacacgatgaactctaaacctggcatgaaccagatggtgccagggagtacgtgacaccaagccacctgtgtggcaagacgtgcagtgagggtgcaagggtctctcagaagttgcatcattagccagtagtaggtgggtcacatagtacctggtgtacacatcggggtgggttgatatatggggtgagaagtttgggctgatcgccagtgatagtaaacaaaatctgtgcagagggccttagcatgggatgtgtccagtattgaaaaggctgcactgccaaccatgatttgtgagccttctgggaaattttgttattaaaggaatatatagtgtcagacggaagttataatcatcttggaggaaccataagaaaaggtgtccagggtatctatataaagagggttaaatttttttttaacttgctggttaaaacattttagaaatattctagagatgggcaggagagtcaaagggcttgcttgccccagcagagttcccagcagacagccatggctcttcccagcagcctgtgcaaattctgatgatggccccacccccgcacacgcacacgcacatcatgcttttccagctcatcacaccccgccccactatgggcctaccattaatagtgtataacttggaggttaaaagagccttttggacagaaaactgggccaggaaaaggcatctcagaccacaaatagagaatttgattcctcatttgccacataagtcatctgcttagcttttcctttcctttttttttttttttttttttctggaggcagagtctccctttgtcgccaggctggagtgcagtggtgccatctcggctcactgcagcactgtctcggctcactgcagcctccgcctcccgtattcaagcgattctcctgtctcagcctcctgagtagctgggactacaggtgtgcaccaccacgcccggctaatttttgtatttttagtagagacggggtttcactgtgttggccaggatggtctcaatctcgacctcgtgatccgcccaccttggcctcccaaagtgttgggattacaggcgtgactcaccatgcccagccacttagttttttcttattcccacctttctatcccatagaacactcttttttatcttccctgaaccatattgatgagataaatagggctgggggctgggccccgctggtcactcaacagagtatttcccttggccgagatggaagttttgtcccaatagatgagctgctgagtatcaacaaggtgacatttttctgctgcccatttgtgtcctggagacggtggtaccctgaaggcagaggccagctgccgcaagacagcaatgacagtccacctgccgacctgattcctgcatcatggaataaccacatggctaccttctatcctctgttcccaaatggtggtggcacttatcctgaagtcgtcaatgatttccctttgaaactactttattttactaatttaaactattttgtactgatgtagccctgaggtagttcatgaaaatgctgtgcactcattccatggaataaatgttggaaagctgatcttttctgatataaaatgttgaatgataaaaaaaaaacacaaacaaaaaaacaaaaacaaccacaacacaaccacaaacaacaaccaaaacaacaaaccaaaaaacaaacaccaaaccacacccacaacacccatcccccccccccccccccccccccaccccaccgccaccccacccc

SEQ ID NO: 316438 - DNA, 3676 bp, Homo sapiens
ttctcttccgactttgggccaaagccttgtccggagatcacagtgtctcgctcggggacacgccctctctaggcccagacttggtccccactggagttcccagcccccctccccgctgcggcacgcacattcccaatgccgggcggggcagggcgcagcaggcccgccctcggcgcgcggccaggctgggctcctcccctggagctgcggccgggagggcgggcggccggggagacggggtggcggctgcagcccgggtagggccaggagacccggtccacgtttgcaaacgcagccgaacgcccaggccgacccgtgccgcccgagcgccgcgctgcgtccgcgccactcttctcgccgccccgatggcgttccggggctggaggcccccgccgccaccgctgctcctgctgctgctctgggtgaccgggcaggcagcgcccgtggcgggcctgggctccgacgcggagctgcagatcgagcggcgcttcgtgcccgacgagtgcccgcgcaccgtgcgcagcggcgacttcgtgcgctaccactacgtggggacgttccccgacggccagaagttcgactccagctatgacagagactccactttcaatgtgtttgtgggaaaaggacagctgatcacagggatggaccaggctcttgttgggatgtgcgtaaacgagagacgtttcgtgaagattcccccaaagcttgcctacggaaatgaaggagtttctggtgtgatcccccccaattcagtgcttcattttgatgtacttctgatggatatttggaattctgaagaccaggttcagattcacacctatttcaagcccccgagttgccctcggaccatccaggtgtctgattttgtgaggtaccactacaacgggacgttcctggacggaactctgtttgattcgagtcacaatcgcatgaaaacatatgacacgtatgtgggaattggctggctgattcctggaatggataaagggctgctggggatgtgtgtgggtgagaagcgcatcatcaccattcctccttttctggcctatggagaggatggagatgggaaagacattcccggtcaggcatctctggtgtttgatgttgcattattggacctccataaccccaaggacagcatttccattgagaacaaggtagtacctgaaaactgtgagcggataagtcaaagtggggactttctcaggtatcattacaatggcacgcttctggatggcaccctctttgattccagctactctcggaaccgcacgtttgacacgtacattgggcagggctacgtgattcctgggatggatgaaggtctacttggtgtttgcattggagaaaagcgaaggattgtggtcccgcctcacctggggtatggagaggaaggaagagggaatatccccggctcggctgtgctggtgtttgacatccatgtgatcgacttccacaacccttcggactccatcagcatcacctcccactacaaaccccctgactgctcagtgctgagtaagaagggagattacctcaaatatcactacaatgcctcacttctggatgggaccctgctggactccacgtggaatttaggcaaaacttacaatattgttctgggatctgggcaagttgtgttggggatggacatgggtctcagagagatgtgcgttggcgagaaacggacagtgatcattccgcctcacctgggctatggggaagctggcgtggatggagaagtgcccggcagtgccgtattagtgtttgacattgagctgctggagctggtggctggccttcctgaggggtacatgttcatatggaatggtgaggtgtcacccaacctctttgaagaaattgacaaggatggcaacggagaagtcctcctggaagagttctcagagtacattcacgcccaggtggcatctggcaaagggaaactcgctcctggctttgatgctgagctgattgtgaagaatatgttcaccaaccaggaccggaatggagatgggaaggtcacagccgaggaatttaaactcaaagaccaggaagccaaacacgatgaactctaaacctggcatgaaccagatggtgccagggagtacgtgacaccaagccacctgtgtggcaagacgtgcagtgagggtgcaagggtctctcagaagttgcatcattagccagtagtaggtgggtcacatagtacctggtgtacacatcggggtgggttgatatatggggtgagaagtttgggctgatcgccagtgatagtaaacaaaatctgtgcagagggccttagcatgggatgtgtccagtattgaaaaggctgcactgccaaccatgatttgtgagccttctgggaaattttgttattaaaggaatatatagtgtcagacggaagttataatcatcttggaggaaccataagaaaaggtgtccagggtatctatataaagagggttaaatttttttttaacttgctggttaaaacattttagaaatattctagagatgggcaggagagtcaaagggcttgcttgccccagcagagttcccagcagacagccatggctcttcccagcagcctgtgcaaattctgatgatggccccacccccgcacacgcacacgcacatcatgcttttccagctcatcacaccccgccccactatgggcctaccattaatagtgtataacttggaggttaaaagagccttttggacagaaaactgggccaggaaaaggcatctcagaccacaaatagagaatttgattcctcatttgccacataagtcatctgcttagcttttcctttcctttttttttttttttttttttctggaggcagagtctccctttgtcgccaggctggagtgcagtggtgccatctcggctcactgcagcactgtctcggctcactgcagcctccgcctcccgtattcaagcgattctcctgtctcagcctcctgagtagctgggactacaggtgtgcaccaccacgcccggctaatttttgtatttttagtagagacggggtttcactgtgttggccaggatggtctcaatctcgacctcgtgatccgcccaccttggcctcccaaagtgttgggattacaggcgtgactcaccatgcccagccacttagttttttcttattcccacctttctatcccatagaacactcttttttatcttccctgaaccatattgatgagataaatagggctgggggctgggccccgctggtcactcaacagagtatttcccttggccgagatggaagttttgtcccaatagatgagctgctgagtatcaacaaggtgacatttttctgctgcccatttgtgtcctggagacggtggtaccctgaaggcagaggccagctgccgcaagacagcaatgacagtccacctgccgacctgattcctgcatcatggaataaccacatggctaccttctatcctctgttcccaaatggtggtggcacttatcctgaagtcgtcaatgatttccctttgaaactactttattttactaatttaaactattttgtactgatgtagccctgaggtagttcatgaaaatgctgtgcactcattccatggaataaatgttggaaagctgatcttttctgatataaaatgttgaatgataatgttgaatgatattatctgg

SEQ ID NO: 316439 - DNA, 3062 bp, Homo sapiens
ttctcttccgactttgggccaaagccttgtccggagatcacagtgtctcgctcggggacacgccctctctaggcccagacttggtccccactggagttcccagcccccctccccgctgcggcacgcacattcccaatgccgggcggggcagggcgcagcaggcccgccctcggcgcgcggccaggctgggctcctcccctggagctgcggccgggagggcgggcggccggggagacggggtggcggctgcagcccgggtagggccaggagacccggtccacgtttgcaaacgcagccgaacgcccaggccgacccgtgccgcccgagcgccgcgctgcgtccgcgccactcttctcgccgccccgatggcgttccggggctggaggcccccgccgccaccgctgctcctgctgctgctctgggtgaccgggcaggcagcgcccgtggcgggcctgggctccgacgcggagctgcagatcgagcggcgcttcgtgcccgacgagtgcccgcgcaccgtgcgcagcggcgacttcgtgcgctaccactacgtggggacgttccccgacggccagaagttcgactccagctatgacagagactccactttcaatgtgtttgtgggaaaaggacagctgatcacagggatggaccaggctcttgttgggatgtgcgtaaacgagagacgtttcgtgaagattcccccaaagcttgcctacggaaatgaaggagtttctggtgtgatcccccccaattcagtgcttcattttgatgtacttctgatggatatttggaattctgaagaccaggttcagattcacacctatttcaagcccccgagttgccctcggaccatccaggtgtctgattttgtgaggtaccactacaacgggacgttcctggacggaactctgtttgattcgagtcacaatcgcatgaaaacatatgacacgtatgtgggaattggctggctgattcctggaatggataaagggctgctggggatgtgtgtgggtgagaagcgcatcatcaccattcctccttttctggcctatggagaggatggagatgggaaagacattcccggtcaggcatctctggtgtttgatgttgcattattggacctccataaccccaaggacagcatttccattgagaacaaggtagtacctgaaaactgtgagcggataagtcaaagtggggactttctcaggtatcattacaatggcacgcttctggatggcaccctctttgattccagctactctcggaaccgcacgtttgacacgtacattgggcagggctacgtgattcctgggatggatgaaggtctacttggtgtttgcattggagaaaagcgaaggattgtggtcccgcctcacctggggtatggagaggaaggaagagggaatatccccggctcggctgtgctggtgtttgacatccatgtgatcgacttccacaacccttcggactccatcagcatcacctcccactacaaaccccctgactgctcagtgctgagtaagaagggagattacctcaaatatcactacaatgcctcacttctggatgggaccctgctggactccacgtggaatttaggcaaaacttacaatattgttctgggatctgggcaagttgtgttggggatggacatgggtctcagagagatgtgcgttggcgagaaacggacagtgatcattccgcctcacctgggctatggggaagctggcgtggatggagaagtgcccggcagtgccgtattagtgtttgacattgagctgctggagctggtggctggccttcctgaggggtacatgttcatatggaatggtgaggtgtcacccaacctctttgaagaaattgacaaggatggcaacggagaagtcctcctggaagagttctcagagtacattcacgcccaggtggcatctggcaaagggaaactcgctcctggctttgatgctgagctgattgtgaagaatatgttcaccaaccaggaccggaatggagatgggaaggtcacagccgaggaatttaaactcaaagaccaggaagccaaacacgatgaactctaaacctggcatgaaccagatggtgccagggagtacgtgacaccaagccacctgtgtggcaagacgtgcagtgagggtgcaagggtctctcagaagttgcatcattagccagtagtaggtgggtcacatagtacctggtgtacacatcggggtgggttgatatatggggtgagaagtttgggctgatcgccagtgatagtaaacaaaatctgtgcagagggccttagcatgggatgtgtccagtattgaaaaggctgcactgccaaccatgatttgtgagccttctgggaaattttgttattaaaggaatatatagtgtcagacggaagttataatcatcttggaggaaccataagaaaaggtgtccagggtatctatataaagagggttaaatttttttttaacttgctggttaaaacattttagaaatattctagagatgggcaggagagtcaaagggcttgcttgccccagcagagttcccagcagacagccatggctcttcccagcagcctgtgcaaattctgatgatggccccacccccgcacacgcacacgcacatcatgcttttccagctcatcacaccccgccccactatgggcctaccattaatagtgtataacttggaggttaaaagagccttttggacagaaaactgggccaggaaaaggcatctcagaccacaaatagagaatttgattcctcatttgccacataagtcatctgcttagcttttcctttcctttttttttttttttttttttctggaggcagagtctccctttgtcgccaggctggagtgcagtggtgccatctcggctcactgcagcactgtctcggctcactgcagcctccgcctcccgtattctaatttaaactattttgtactgatgtagccctgaggtagttcatgaaaatgctgtgcactcattccatggaataaatgttggaaagctgatcttttctgatataaaatgttgaatgata

SEQ ID NO: 316440 - DNA, 854 bp, Homo sapiens
atcatatagaaaatgaaatgaagttttttgttgttttttttttttttttttttttttttgacacagagtcttgctctgtcacctaggctggagtgcagtggcgctatcttggctcactgcaacctccgcctcccgagttcaaaagcgattctcctgtctcagcctcctgagtagctgggactacaggtgtgcaccaccacgcccggctaatttttgtatttttagtagagacggggtttcactgtgttggccaggatggtctcaatctcgacctcgtgatccgcccaccttggcctcccaaagtgttgggattacaggcgtgactcaccatgcccagccacttagttttttcttattcccacctttctatcccatagaacactcttttttatcttccctgaaccatattgatgagataaatagggctgggggctgggccccgctggtcactcaacagagtatttcccttggccgagatggaagttttgtcccaatagatgagctgctgagtatcaacaaggtgacatttttctgctgcccatttgtgtcctggagacggtggtaccctgaaggcagaggccagctgccgcaagacagcaatgacagtccacctgccgacctgattcctgcatcatggaataaccacatggctaccttctatcctctgttcccaaatggtggtggcacttatcctgaagtcgtcaatgatttccctttgaaactactttattttactaatttaaactattttgtactgatgtagccctgaggtagttcatgaaaatgctgtgcactcattccatggaataaatgttggaaagctgatcttttctgatataaaatgttgaatgata

SEQ ID NO: 316441 - DNA, 2640 bp, Homo sapiens
ttctcttccgactttgggccaaagccttgtccggagatcacagtgtctcgctcggggacacgccctctctaggcccagacttggtccccactggagttcccagcccccctccccgctgcggcacgcacattcccaatgccgggcggggcagggcgcagcaggcccgccctcggcgcgcggccaggctgggctcctcccctggagctgcggccgggagggcgggcggccggggagacggggtggcggctgcagcccgggtagggccaggagacccggtccacgtttgcaaacgcagccgaacgcccaggccgacccgtgccgcccgagcgccgcgctgcgtccgcgccactcttctcgccgccccgatggcgttccggggctggaggcccccgccgccaccgctgctcctgctgctgctctgggtgaccgggcaggcagcgcccgtggcgggcctgggctccgacgcggagctgcagatcgagcggcgcttcgtgcccgacgagtgcccgcgcaccgtgcgcagcggcgacttcgtgcgctaccactacgtggggacgttccccgacggccagaagttcgactccagctatgacagagactccactttcaatgtgtttgtgggaaaaggacagctgatcacagggatggaccaggctcttgttgggatgtgcgtaaacgagagacgtttcgtgaagattcccccaaagcttgcctacggaaatgaaggagtttctggtgtgatcccccccaattcagtgcttcattttgatgtacttctgatggatatttggaattctgaagaccaggttcagattcacacctatttcaagcccccgagttgccctcggaccatccaggtgtctgattttgtgaggtaccactacaacgggacgttcctggacggaactctgtttgattcgagtcacaatcgcatgaaaacatatgacacgtatgtgggaattggctggctgattcctggaatggataaagggctgctggggatgtgtgtgggtgagaagcgcatcatcaccattcctccttttctggcctatggagaggatggagatgggaaagacattcccggtcaggcatctctggtgtttgatgttgcattattggacctccataaccccaaggacagcatttccattgagaacaaggtagtacctgaaaactgtgagcggataagtcaaagtggggactttctcaggtatcattacaatggcacgcttctggatggcaccctctttgattccagctactctcggaaccgcacgtttgacacgtacattgggcagggctacgtgattcctgggatggatgaaggtctacttggtgtttgcattggagaaaagcgaaggattgtggtcccgcctcacctggggtatggagaggaaggaagagggaatatccccggctcggctgtgctggtgtttgacatccatgtgatcgacttccacaacccttcggactccatcagcatcacctcccactacaaaccccctgactgctcagtgctgagtaagaagggagattacctcaaatatcactacaatgcctcacttctggatgggaccctgctggactccacgtggaatttaggcaaaacttacaatattgttctgggatctgggcaagttgtgttggggatggacatgggtctcagagagatgtgcgttggcgagaaacggacagtgatcattccgcctcacctgggctatggggaagctggcgtggatggagaagtgcccggcagtgccgtattagtgtttgacattgagctgctggagctggtggctggccttcctgaggggtacatgttcatatggaatggtgaggtgtcacccaacctctttgaagaaattgacaaggatggcaacggagaagtcctcctggaagagttctcagagtacattcacgcccaggtggcatctggcaaagggaaactcgctcctggctttgatgctgagctgattgtgaagaatatgttcaccaaccaggaccggaatggagatgggaaggtcacagccgaggaatttaaactcaaagaccaggaagccaaacacgatgaactctaaacctggcatgaaccagatggtgccagggagtacgtgacaccaagccacctgtgtggcaagacgtgcagtgagggtgcaagggtctctcagaagttgcatcattagccagtagtaggtgggtcacatagtacctggtgtacacatcggggtgggttgatatatggggtgagaagtttgggctgatcgccagtgatagtaaacaaaatctgtgcagagggccttagcatgggatgtgtccagtattgaaaaggctgcactgccaaccatgatttgtgagccttctgggaaattttgttattaaaggaatatatagtgtcagacggaagttataatcatcttggaggaaccataagaaaaggtgtccagggtatctatataaagagggttaaatttttttttaacttgctggttaaaacattttagaaatattctagagatgggcaggagagtcaaagggcttgcttgccccagcagagttcccagcagacagccatggctcttcccagcagccttttcaatactggacagcatccgtaccgcatgccgcgcggggatcctctag

SEQ ID NO: 316442 - DNA, 676 bp, Homo sapiens
  misc_feature (36)..(36): n is a, c, g, or t
ccaatcatcccttcttgctcctctttgtgcacgtanacaaaaaaaaaaaaaaaaaaaaaaacacacccctgctcaacagaggtttagtttacagtctctgaactaaagtagtaaccctcccaaagtgttgggattacaggcgtgactcaccatgcccagccacttagttttttcttattcccacctttctatcccatagaacactcttttttatcttccctgaaccatattgatgagataaatagggctgggggctgggccccgctggtcactcaacagagtatttcccttggccgagatggaagttttgtcccaatagatgagctgctgagtatcaacaaggtgacatttttctgctgcccatttgtgtcctggagacggtggtaccctgaaggcagaggccagctgccgcaagacagcaatgacagtccacctgccgacctgattcctgcatcatggaataaccacatggctaccttctatcctctgttcccaaatggtggtggcacttatcctgaagtcgtcaatgatttccctttgaaactactttattttactaatttaaactattttgtactgatgtagccctgaggtagttcatgaaaatgctgtgcactcattccatggaataaatgttggaaagctgatcttttctgatataaaatgttgaatgata

SEQ ID NO: 316443 - DNA, 2392 bp, Homo sapiens
ttctcttccgactttgggccaaagccttgtccggagatcacagtgtctcgctcggggacacgccctctctaggcccagacttggtccccactggagttcccagcccccctccccgctgcggcacgcacattcccaatgccgggcggggcagggcgcagcaggcccgccctcggcgcgcggccaggctgggctcctcccctggagctgcggccgggagggcgggcggccggggagacggggtggcggctgcagcccgggtagggccaggagacccggtccacgtttgcaaacgcagccgaacgcccaggccgacccgtgccgcccgagcgccgcgctgcgtccgcgccactcttctcgccgccccgatggcgttccggggctggaggcccccgccgccaccgctgctcctgctgctgctctgggtgaccgggcaggcagcgcccgtggcgggcctgggctccgacgcggagctgcagatcgagcggcgcttcgtgcccgacgagtgcccgcgcaccgtgcgcagcggcgacttcgtgcgctaccactacgtggggacgttccccgacggccagaagttcgactccagctatgacagagactccactttcaatgtgtttgtgggaaaaggacagctgatcacagggatggaccaggctcttgttgggatgtgcgtaaacgagagacgtttcgtgaagattcccccaaagcttgcctacggaaatgaaggagtttctggtgtgatcccccccaattcagtgcttcattttgatgtacttctgatggatatttggaattctgaagaccaggttcagattcacacctatttcaagcccccgagttgccctcggaccatccaggtgtctgattttgtgaggtaccactacaacgggacgttcctggacggaactctgtttgattcgagtcacaatcgcatgaaaacatatgacacgtatgtgggaattggctggctgattcctggaatggataaagggctgctggggatgtgtgtgggtgagaagcgcatcatcaccattcctccttttctggcctatggagaggatggagatgggaaagacattcccggtcaggcatctctggtgtttgatgttgcattattggacctccataaccccaaggacagcatttccattgagaacaaggtagtacctgaaaactgtgagcggataagtcaaagtggggactttctcaggtatcattacaatggcacgcttctggatggcaccctctttgattccagctactctcggaaccgcacgtttgacacgtacattgggcagggctacgtgattcctgggatggatgaaggtctacttggtgtttgcattggagaaaagcgaaggattgtggtcccgcctcacctggggtatggagaggaaggaagagggaatatccccggctcggctgtgctggtgtttgacatccatgtgatcgacttccacaacccttcggactccatcagcatcacctcccactacaaaccccctgactgctcagtgctgagtaagaagggagattacctcaaatatcactacaatgcctcacttctggatgggaccctgctggactccacgtggaatttaggcaaaacttacaatattgttctgggatctgggcaagttgtgttggggatggacatgggtctcagagagatgtgcgttggcgagaaacggacagtgatcattccgcctcacctgggctatggggaagctggcgtggatggagaagtgcccggcagtgccgtattagtgtttgacattgagctgctggagctggtggctggccttcctgaggggtacatgttcatatggaatggtgaggtgtcacccaacctctttgaagaaattgacaaggatggcaacggagaagtcctcctggaagagttctcagagtacattcacgcccaggtggcatctggcaaagggaaactcgctcctggctttgatgctgagctgattgtgaagaatatgttcaccaaccaggaccggaatggagatgggaagttttgtcccaatagatgagctgctgagtatcaacaaggtgacatttttctgctgcccatttgtgtcctggagacggtggtaccctgaaggcagaggccagctgccgcaagacagcaatgacagtccacctgccgacctgattcctgcatcatggaataaccacatggctaccttctatcctctgttcccaaatggtggtggcacttatcctgaagtcgtcaatgatttccctttgaaactactttattttactaatttaaactattttgtactgatgtagccctgaggtagttcatgaaaatgctgtgcactcattccatggaataaatgttggaaagctgatcttttctgatataaaatgttgaatgata

SEQ ID NO: 316444 - DNA, 2175 bp, Homo sapiens
ttctcttccgactttgggccaaagccttgtccggagatcacagtgtctcgctcggggacacgccctctctaggcccagacttggtccccactggagttcccagcccccctccccgctgcggcacgcacattcccaatgccgggcggggcagggcgcagcaggcccgccctcggcgcgcggccaggctgggctcctcccctggagctgcggccgggagggcgggcggccggggagacggggtggcggctgcagcccgggtagggccaggagacccggtccacgtttgcaaacgcagccgaacgcccaggccgacccgtgccgcccgagcgccgcgctgcgtccgcgccactcttctcgccgccccgatggcgttccggggctggaggcccccgccgccaccgctgctcctgctgctgctctgggtgaccgggcaggcagcgcccgtggcgggcctgggctccgacgcggagctgcagatcgagcggcgcttcgtgcccgacgagtgcccgcgcaccgtgcgcagcggcgacttcgtgcgctaccactacgtggggacgttccccgacggccagaagttcgactccagctatgacagagactccactttcaatgtgtttgtgggaaaaggacagctgatcacagggatggaccaggctcttgttgggatgtgcgtaaacgagagacgtttcgtgaagattcccccaaagcttgcctacggaaatgaaggagtttctggtgtgatcccccccaattcagtgcttcattttgatgtacttctgatggatatttggaattctgaagaccaggttcagattcacacctatttcaagcccccgagttgccctcggaccatccaggtgtctgattttgtgaggtaccactacaacgggacgttcctggacggaactctgtttgattcgagtcacaatcgcatgaaaacatatgacacgtatgtgggaattggctggctgattcctggaatggataaagggctgctggggatgtgtgtgggtgagaagcgcatcatcaccattcctccttttctggcctatggagaggatggagatgggaaagacattcccggtcaggcatctctggtgtttgatgttgcattattggacctccataaccccaaggacagcatttccattgagaacaaggtagtacctgaaaactgtgagcggataagtcaaagtggggactttctcaggtatcattacaatggcacgcttctggatggcaccctctttgattccagctactctcggaaccgcacgtttgacacgtacattgggcagggctacgtgattcctgggatggatgaaggtctacttggtgtttgcattggagaaaagcgaaggattgtggtcccgcctcacctggggtatggagaggaaggaagagggaatatccccggctcggctgtgctggtgtttgacatccatgtgatcgacttccacaacccttcggactccatcagcatcacctcccactacaaaccccctgactgctcagtgctgagtaagaagggagattacctcaaatatcactacaatgcctcacttctggatgggaccctgctggactccacgtggaatttaggcaaaacttacaatattgttctgggatctgggcaagttgtgttggggatggacatgggtctcagagagatgtgcgttggcgagaaacggacagtgatcattccgcctcacctgggctatggggaagctggcgtggatggagaagtgcccggcagtgccgtattagtgtttgacattgagctgctggagctggtggctggccttcctgaggggtacatgttcatatggaatggtgaggtgtcacccaacctctttgaagaaattgacaaggatggcaacggagaagtcctcctggaagagttctcagagtacattcacgcccaggtggcatctggcaaagggaaactcgctcctggctttgatgctgagctgattgtgaagaatatgttcccaaatggtggtggcacttatcctgaagtcgtcaatgatttccctttgaaactactttattttactaatttaaactattttgtactgatgtagccctgaggtagttcatgaaaatgctgtgcactcattccatggaataaatgttggaaagctgatcttttctgatataaaatgttgaatgata

SEQ ID NO: 316445 - DNA, 1801 bp, Homo sapiens
ttctcttccgactttgggccaaagccttgtccggagatcacagtgtctcgctcggggacacgccctctctaggcccagacttggtccccactggagttcccagcccccctccccgctgcggcacgcacattcccaatgccgggcggggcagggcgcagcaggcccgccctcggcgcgcggccaggctgggctcctcccctggagctgcggccgggagggcgggcggccggggagacggggtggcggctgcagcccgggtagggccaggagacccggtccacgtttgcaaacgcagccgaacgcccaggccgacccgtgccgcccgagcgccgcgctgcgtccgcgccactcttctcgccgccccgatggcgttccggggctggaggcccccgccgccaccgctgctcctgctgctgctctgggtgaccgggcaggcagcgcccgtggcgggcctgggctccgacgcggagctgcagatcgagcggcgcttcgtgcccgacgagtgcccgcgcaccgtgcgcagcggcgacttcgtgcgctaccactacgtggggacgttccccgacggccagaagttcgactccagctatgacagagactccactttcaatgtgtttgtgggaaaaggacagctgatcacagggatggaccaggctcttgttgggatgtgcgtaaacgagagacgtttcgtgaagattcccccaaagcttgcctacggaaatgaaggagtttctggtgtgatcccccccaattcagtgcttcattttgatgtacttctgatggatatttggaattctgaagaccaggttcagattcacacctatttcaagcccccgagttgccctcggaccatccaggtgtctgattttgtgaggtaccactacaacgggacgttcctggacggaactctgtttgattcgagtcacaatcgcatgaaaacatatgacacgtatgtgggaattggctggctgattcctggaatggataaagggctgctggggatgtgtgtgggtgagaagcgcatcatcaccattcctccttttctggcctatggagaggatggagatgggaaagacattcccggtcaggcatctctggtgtttgatgttgcattattggacctccataaccccaaggacagcatttccattgagaacaaggtagtacctgaaaactgtgagcggataagtcaaagtggggactttctcaggtatcattacaatggcacgcttctggatggcaccctctttgattccagctactctcggaaccgcacgtttgacacgtacattgggcagggctacgtgattcctgggatggatgaaggtctacttggtgtttgcattggagaaaagcgaaggattgtggtcccgcctcacctggggtatggagaggaaggaagaggtgagcatcagcatcacctgccttcctcactagctgtggctgcttccacattgcttgaaacagggcttctttttctttttcttctttctttttgagatagggtctccctctgttgaacaggctggaaagtgtagtgtgtgatcatcgtgtactatggcctggaactcttggcctcaagtgatcctcttgcctcagccttcagagtagctggcactacaggcacgcaccaccacaccctgcacagaacttcttgagagccaaaatattgaagctaaagtccagcttaagactggaattcccaaatagatttagtttctagagttgtcctgttatttctccttgtttctctgcccattttcctttaccttttgaaaatgttaaatcctacaccaaagtc

SEQ ID NO: 316446 - DNA, 1733 bp, Homo sapiens
ttctcttccgactttgggccaaagccttgtccggagatcacagtgtctcgctcggggacacgccctctctaggcccagacttggtccccactggagttcccagcccccctccccgctgcggcacgcacattcccaatgccgggcggggcagggcgcagcaggcccgccctcggcgcgcggccaggctgggctcctcccctggagctgcggccgggagggcgggcggccggggagacggggtggcggctgcagcccgggtagggccaggagacccggtccacgtttgcaaacgcagccgaacgcccaggccgacccgtgccgcccgagcgccgcgctgcgtccgcgccactcttctcgccgccccgatggcgttccggggctggaggcccccgccgccaccgctgctcctgctgctgctctgggtgaccgggcaggcagcgcccgtggcgggcctgggctccgacgcggagctgcagatcgagcggcgcttcgtgcccgacgagtgcccgcgcaccgtgcgcagcggcgacttcgtgcgctaccactacgtggggacgttccccgacggccagaagttcgactccagctatgacagagactccactttcaatgtgtttgtgggaaaaggacagctgatcacagggatggaccaggctcttgttgggatgtgcgtaaacgagagacgtttcgtgaagattcccccaaagcttgcctacggaaatgaaggagtttctggtgtgatcccccccaattcagtgcttcattttgatgtacttctgatggatatttggaattctgaagaccaggttcagattcacacctatttcaagcccccgagttgccctcggaccatccaggtgtctgattttgtgaggtaccactacaacgggacgttcctggacggaactctgtttgattcgagtcacaatcgcatgaaaacatatgacacgtatgtgggaattggctggctgattcctggaatggataaagggctgctggggatgtgtgtgggtgagaagcgcatcatcaccattcctccttttctggcctatggagaggatggagatgggaaagacattcccggtcaggcatctctggtgtttgatgttgcattattggacctccataaccccaaggacagcatttccattgagaacaaggtagtacctgaaaactgtgagcggataagtcaaagtggggactttctcaggtatcattacaatggcacgcttctggatggcaccctctttgattccagctactctcggaaccgcacgtttgacacgtacattgggcagggctacgtgattcctgggatggatgaaggtctacttggtgtttgcattggagaaaagcgaaggattgtggtcccgcctcacctggggtatggagaggaaggaagaggacggagtctcactctgttgcccaggctagagtacagtggtgcaatcctaactcactgtagccttgacctcctggcctcaagcaatcctcctgcctcaacctcccgagtatctgggactacaagtgctcaccaccacgcccagctaatttttttgtagagacatttggctgtgttgcctaggctggtctcaaacccctggcctcaagtgatcctcccacctcagcctcccagagttgagattataggcatgagccaccaccatacctaacctgagttggtttttttatatgtaaaatgctgatgataataaaatatgtccttgactcta

SEQ ID NO: 316447 - DNA, 494 bp, Homo sapiens
  misc_feature (36)..(36): n is a, c, g, or t
  misc_feature (90)..(90): n is a, c, g, or t
acaggaaaacaagcctatgaccccatgaattgacgncccaagcctcgaaattaaccccctcacctaaagggaaacaaaaagcctggaagnctccccaccgcggtggcggcccgcctcctagaacctagtggatccccccgggcctgccaggaattcggcaccgagatttttctgctgcccatttgtgtcctggagacggtggtaccctgaaggcagaggccagctgccgcaagacagcaatgacagtccacctgccgacctgattcctgcatcatggaataaccacatggctaccttctatcctctgttcccaaatggtggtggcacttatcctgaagtcgtcaatgatttccctttgaaactactttattttactaatttaaactattttgtactgatgtagccctgaggtagttcatgaaaatgctgtgcactcattccatggaataaatgttggaaagctgatcttttctgatataaaatgttgaatgata

SEQ ID NO: 316448 - DNA, 3655 bp, Homo sapiens
ttctcttccgactttgggccaaagccttgtccggagatcacagtgtctcgctcggggacacgccctctctaggcccagacttggtccccactggagttcccagcccccctccccgctgcggcacgcacattcccaatgccgggcggggcagggcgcagcaggcccgccctcggcgcgcggccaggctgggctcctcccctggagctgcggccgggagggcgggcggccggggagacggggtggcggctgcagcccgggtagggccaggagacccggtccacgtttgcaaacgcagccgaacgcccaggccgacccgtgccgcccgagcgccgcgctgcgtccgcgccactcttctcgccgccccgatggcgttccggggctggaggcccccgccgccaccgctgctcctgctgctgctctgggtgaccgggcaggcagcgcccgtggcgggcctgggctccgacgcggagctgcagatcgagcggcgcttcgtgcccgacgagtgcccgcgcaccgtgcgcagcggcgacttcgtgcgctaccactacgtggggacgttccccgacggccagaagttcgactccagctatgacagagactccactttcaatgtgtttgtgggaaaaggacagctgatcacagggatggaccaggctcttgttgggatgtgcgtaaacgagagacgtttcgtgaagattcccccaaagcttgcctacggaaatgaaggagtttctggtgtgatcccccccaattcagtgcttcattttgatgtacttctgatggatatttggaattctgaagaccaggttcagattcacacctatttcaagcccccgagttgccctcggaccatccaggtgtctgattttgtgaggtaccactacaacgggacgttcctggacggaactctgtttgattcgagtcacaatcgcatgaaaacatatgacacgtatgtgggaattggctggctgattcctggaatggataaagggctgctggggatgtgtgtgggtgagaagcgcatcatcaccattcctccttttctggcctatggagaggatggagatgggaaagacattcccggtcaggcatctctggtgtttgatgttgcattattggacctccataaccccaaggacagcatttccattgagaacaaggtagtacctgaaaactgtgagcggataagtcaaagtggggactttctcaggtatcattacaatggcacgcttctggatggcaccctctttgattccagctactctcggaaccgcacgtttgacacgtacattgggcagggctacgtgattcctgggatggatgaaggtctacttggtgtttgcattggagaaaagcgaaggattgtggtcccgcctcacctggggtatggagaggaaggaagagggaatatccccggctcggctgtgctggtgtttgacatccatgtgatcgacttccacaacccttcggactccatcagcatcacctcccactacaaaccccctgactgctcagtgctgagtaagaagggagattacctcaaatatcactacaatgcctcacttctggatgggaccctgctggactccacgtggaatttaggcaaaacttacaatattgttctgggatctgggcaagttgtgttggggatggacatgggtctcagagagatgtgcgttggcgagaaacggacagtgatcattccgcctcacctgggctatggggaagctggcgtggatggagaagtgcccggcagtgccgtattagtgtttgacattgagctgctggagctggtggctggccttcctgaggggtacatgttcatatggaatggtgaggtgtcacccaacctctttgaagaaattgacaaggatggcaacggagaagtcctcctggaagagttctcagagtacattcacgcccaggtggcatctggcaaagggaaactcgctcctggctttgatgctgagctgattgtgaagaatatgttcaccaaccaggaccggaatggagatgggaaggtcacagccgaggaatttaaactcaaagaccaggaagccaaacacgatgaactctaaacctggcatgaaccagatggtgccagggagtacgtgacaccaagccacctgtgtggcaagacgtgcagtgagggtgcaagggtctctcagaagttgcatcattagccagtagtaggtgggtcacatagtacctggtgtacacatcggggtgggttgatatatggggtgagaagtttgggctgatcgccagtgatagtaaacaaaatctgtgcagagggccttagcatgggatgtgtccagtattgaaaaggctgcactgccaaccatgatttgtgagccttctgggaaattttgttattaaaggaatatatagtgtcagacggaagttataatcatcttggaggaaccataagaaaaggtgtccagggtatctatataaagagggttaaatttttttttaacttgctggttaaaacattttagaaatattctagagatgggcaggagagtcaaagggcttgcttgccccagcagagttcccagcagacagccatggctcttcccagcagcctgtgcaaattctgatgatggccccacccccgcacacgcacacgcacatcatgcttttccagctcatcacaccccgccccactatgggcctaccattaatagtgtataacttggaggttaaaagagccttttggacagaaaactgggccaggaaaaggcatctcagaccacaaatagagaatttgattcctcatttgccacataagtcatctgcttagcttttcctttcctttttttttttttttttttttctggaggcagagtctccctttgtcgccaggctggagtgcagtggtgccatctcggctcactgcagcactgtctcggctcactgcagcctccgcctcccgtattcaagcgattctcctgtctcagcctcctgagtagctgggactacaggtgtgcaccaccacgcccggctaatttttgtatttttagtagagacggggtttcactgtgttggccaggatggtctcaatctcgacctcgtgatccgcccaccttggcctcccaaagtgttgggattacaggcgtgactcaccatgcccagccacttagttttttcttattcccacctttctatcccatagaacactcttttttatcttccctgaaccatattgatgagataaatagggctgggggctgggccccgctggtcactcaacagagtatttcccttggccgagatggaagttttgtcccaatagatgagctgctgagtatcaacaaggtgacatttttctgctgcccatttgtgtcctggagacggtggtaccctgaaggcagaggccagctgccgcaagacagcaatgacagtccacctgccgacctgattcctgcatcatggaataaccacatggctaccttctatcctctgttcccaaatggtggtggcacttatcctgaagtcgtcaatgatttccctttgaaactactttattttactaatttaaactattttgtactgatgtagccctgaggtagttcatgaaaatgctgtgcactcattccatggaataaatgttggaaagctgatcttttctgatataaaatgttgaatgata

SEQ ID NO: 316449 - DNA, 4703 bp, Homo sapiens
ttctcttccgactttgggccaaagccttgtccggagatcacagtgtctcgctcggggacacgccctctctaggcccagacttggtccccactggagttcccagcccccctccccgctgcggcacgcacattcccaatgccgggcggggcagggcgcagcaggcccgccctcggcgcgcggccaggctgggctcctcccctggagctgcggccgggagggcgggcggccggggagacggggtggcggctgcagcccgggtagggccaggagacccggtccacgtttgcaaacgcagccgaacgcccaggccgacccgtgccgcccgagcgccgcgctgcgtccgcgccactcttctcgccgccccgatggcgttccggggctggaggcccccgccgccaccgctgctcctgctgctgctctgggtgaccgggcaggcagcgcccgtggcgggcctgggctccgacgcggagctgcagatcgagcggcgcttcgtgcccgacgagtgcccgcgcaccgtgcgcagcggcgacttcgtgcgctaccactacgtggggacgttccccgacggccagaagttcgactccagctatgacagagactccactttcaatgtgtttgtgggaaaaggacagctgatcacagggatggaccaggctcttgttgggatgtgcgtaaacgagagacgtttcgtgaagattcccccaaagcttgcctacggaaatgaaggagtttctggtgtgatcccccccaattcagtgcttcattttgatgtacttctgatggatatttggaattctgaagaccaggttcagattcacacctatttcaagcccccgagttgccctcggaccatccaggtgtctgattttgtgaggtaccactacaacgggacgttcctggacggaactctgtttgattcgagtcacaatcgcatgaaaacatatgacacgtatgtgggaattggctggctgattcctggaatggataaagggctgctggggatgtgtgtgggtgagaagcgcatcatcaccattcctccttttctggcctatggagaggatggagatgggaaagacattcccggtcaggcatctctggtgtttgatgttgcattattggacctccataaccccaaggacagcatttccattgagaacaaggtagtacctgaaaactgtgagcggataagtcaaagtggggactttctcaggtatcattacaatggcacgcttctggatggcaccctctttgattccagctactctcggaaccgcacgtttgacacgtacattgggcagggctacgtgattcctgggatggatgaaggtctacttggtgtttgcattggagaaaagcgaaggattgtggtcccgcctcacctggggtatggagaggaaggaagagggaatatccccggctcggctgtgctggtgtttgacatccatgtgatcgacttccacaacccttcggactccatcagcatcacctcccactacaaaccccctgactgctcagtgctgagtaagaagggagattacctcaaatatcactacaatgcctcacttctggatgggaccctgctggactccacgtggaatttaggcaaaacttacaatattgttctgggatctgggcaagttgtgttggggatggacatgggtctcagagagatgtgcgttggcgagaaacggacagtgatcattccgcctcacctgggctatggggaagctggcgtggatggagaagtgcccggcagtgccgtattagtgtttgacattgagctgctggagctggtggctggccttcctgaggggtacatgttcatatggaatggtgaggtgtcacccaacctctttgaagaaattgacaaggatggcaacggagaagtcctcctggaagaggtaactaactggcctctgtaggaaggtgggaccgaagagctcagggagcctggtaaggccgtggggccggttctgaaggtaaggacttctaagggtgaggccagctggctggagggcttgtgagatgaccagcacacttgtgtgccaagcgcttttacacacaccctctcgatggaagctcaccattcctctctgaagaaaccgattccctaagaggtgtagggcatgattccagggcatacagtctgcatttagttctcgttactgggtgctcaatgcctgcctgtatgtgctgagtgtattctctgatttggccctcacagcagctgttttttagaagaaactgcacagagaaggtaaatgacttgtccaaggtcacacatctactcagttgtttgagccaggaccacactcctctttgtgaagctgggcaatagaaccatctgttctgtcccacccctggggaattccagctccctgcctcttccacatctgctattgaagcacatcctccagccttttcctctctctctccacatcatcagcccttctggatctttctcatttgcatacaaatgtgctattattttcccttccctggatgtgtctgtttctttcattgctttccttcctttacagcaaaaacttcaaaagaattgtgtgtcctttctgcctccaattcctctcctcccattctctcctaaacccactcctttctggcatttgtccctctatgcctctgagcctgaccttgccagggtggccaatgtcttccgtatcgcggaatccagtggtcagctcttacgctcctcttaacttcaacacagctgattcccctacaggacgcatctttctctggcttccaggacaccacacttcatggtgttccttctacctccctggtacgtccctctcaggcatcttgtctgtgttggtagcccagactcaagttccagccctgtcacccccagactgctctgtttctggccccaggcctggcgttcatggcggctgaactcatggtctttcctgtccccttcttttccagttctcagagtacattcacgcccaggtggcatctggcaaagggaaactcgctcctggctttgatgctgagctgattgtgaagaatatgttcaccaaccaggaccggaatggagatgggaaggtcacagccgaggaatttaaactcaaagaccaggaagccaaacacgatgaactctaaacctggcatgaaccagatggtgccagggagtacgtgacaccaagccacctgtgtggcaagacgtgcagtgagggtgcaagggtctctcagaagttgcatcattagccagtagtaggtgggtcacatagtacctggtgtacacatcggggtgggttgatatatggggtgagaagtttgggctgatcgccagtgatagtaaacaaaatctgtgcagagggccttagcatgggatgtgtccagtattgaaaaggctgcactgccaaccatgatttgtgagccttctgggaaattttgttattaaaggaatatatagtgtcagacggaagttataatcatcttggaggaaccataagaaaaggtgtccagggtatctatataaagagggttaaatttttttttaacttgctggttaaaacattttagaaatattctagagatgggcaggagagtcaaagggcttgcttgccccagcagagttcccagcagacagccatggctcttcccagcagcctgtgcaaattctgatgatggccccacccccgcacacgcacacgcacatcatgcttttccagctcatcacaccccgccccactatgggcctaccattaatagtgtataacttggaggttaaaagagccttttggacagaaaactgggccaggaaaaggcatctcagaccacaaatagagaatttgattcctcatttgccacataagtcatctgcttagcttttcctttcctttttttttttttttttttttctggaggcagagtctccctttgtcgccaggctggagtgcagtggtgccatctcggctcactgcagcactgtctcggctcactgcagcctccgcctcccgtattcaagcgattctcctgtctcagcctcctgagtagctgggactacaggtgtgcaccaccacgcccggctaatttttgtatttttagtagagacggggtttcactgtgttggccaggatggtctcaatctcgacctcgtgatccgcccaccttggcctcccaaagtgttgggattacaggcgtgactcaccatgcccagccacttagttttttcttattcccacctttctatcccatagaacactcttttttatcttccctgaaccatattgatgagataaatagggctgggggctgggccccgctggtcactcaacagagtatttcccttggccgagatggaagttttgtcccaatagatgagctgctgagtatcaacaaggtgacatttttctgctgcccatttgtgtcctggagacggtggtaccctgaaggcagaggccagctgccgcaagacagcaatgacagtccacctgccgacctgattcctgcatcatggaataaccacatggctaccttctatcctctgttcccaaatggtggtggcacttatcctgaagtcgtcaatgatttccctttgaaactactttattttactaatttaaactattttgtactgatgtagccctgaggtagttcatgaaaatgctgtgcactcattccatggaataaatgttggaaagctgatcttttctgatataaaatgttgaatgata

SEQ ID NO: 316450 - DNA, 3968 bp, Homo sapiens
ttctcttccgactttgggccaaagccttgtccggagatcacagtgtctcgctcggggacacgccctctctaggcccagacttggtccccactggagttcccagcccccctccccgctgcggcacgcacattcccaatgccgggcggggcagggcgcagcaggcccgccctcggcgcgcggccaggctgggctcctcccctggagctgcggccgggagggcgggcggccggggagacggggtggcggctgcagcccgggtagggccaggagacccggtccacgtttgcaaacgcagccgaacgcccaggccgacccgtgccgcccgagcgccgcgctgcgtccgcgccactcttctcgccgccccgatggcgttccggggctggaggcccccgccgccaccgctgctcctgctgctgctctgggtgaccgggcaggcagcgcccgtggcgggcctgggctccgacgcggagctgcagatcgagcggcgcttcgtgcccgacgagtgcccgcgcaccgtgcgcagcggcgacttcgtgcgctaccactacgtggggacgttccccgacggccagaagttcgactccagctatgacagagactccactttcaatgtgtttgtgggaaaaggacagctgatcacagggatggaccaggctcttgttgggatgtgcgtaaacgagagacgtttcgtgaagattcccccaaagcttgcctacggaaatgaaggagtttctggtgtgatcccccccaattcagtgcttcattttgatgtacttctgatggatatttggaattctgaagaccaggttcagattcacacctatttcaagcccccgagttgccctcggaccatccaggtgtctgattttgtgaggtaccactacaacgggacgttcctggacggaactctgtttgattcgagtcacaatcgcatgaaaacatatgacacgtatgtgggaattggctggctgattcctggaatggataaagggctgctggggatgtgtgtgggtgagaagcgcatcatcaccattcctccttttctggcctatggagaggatggagatgggaaagacattcccggtcaggcatctctggtgtttgatgttgcattattggacctccataaccccaaggacagcatttccattgagaacaaggtagtacctgaaaactgtgagcggataagtcaaagtggggactttctcaggtatcattacaatggcacgcttctggatggcaccctctttgattccagctactctcggaaccgcacgtttgacacgtacattgggcagggctacgtgattcctgggatggatgaaggtctacttggtgtttgcattggagaaaagcgaaggattgtggtcccgcctcacctggggtatggagaggaaggaagagggaatatccccggctcggctgtgctggtgtttgacatccatgtgatcgacttccacaacccttcggactccatcagcatcacctcccactacaaaccccctgactgctcagtgctgagtaagaagggagattacctcaaatatcactacaatgcctcacttctggatgggaccctgctggactccacgtggaatttaggcaaaacttacaatattgttctgggatctgggcaagttgtgttggggatggacatgggtctcagagagatgtgcgttggcgagaaacggacagtgatcattccgcctcacctgggctatggggaagctggcgtggatggagaagtgcccggcagtgccgtattagtgtttgacattgagctgctggagctggtggctggccttcctgaggggtacatgttcatatggaatggtgaggtgtcacccaacctctttgaagaaattgacaaggatggcaacggagaagtcctcctggaagagttctcagagtacattcacgcccaggtggcatctggcaaagggaaactcgctcctggctttgatgctgagctgattgtgaagaatatgttcaccaaccaggaccggaatggagatgggaaggtcacagccgaggaatttaaactcaaagaccaggaagccaaacacgatgaactctaaacctggcatgaaccagatggtgccagggagtacgtgacaccaagccacctgtgtggcaagacgtgcagtgagggtgcaagggtctctcagaagttgcatcattagccagtagtaggtgggtcacatagtacctggtgtacacatcggggtgggttgatatatggggtgagaagtttgggctgatcgccagtgatagtaaacaaaatctgtgcagagggccttagcatgggatgtgtccagtattgaaaaggctgcactgccaaccatgatttgtgagccttctgggaaattttgttattaaaggaatatatagtgtcagacggaagttataatcatcttggaggaaccataagaaaaggtgtccagggtatctatataaagagggttaaatttttttttaacttgctggttaaaacattttagaaatattctagagatgggcaggagagtcaaagggcttgcttgccccagcagagttcccagcagacagccatggctcttcccagcagcctgtgcaaattctgatgatggccccacccccgcacacgcacacgcacatcatgcttttccagctcatcacaccccgccccactatgggcctaccattaatagtgtataacttggaggttaaaagagccttttggacagaaaactgggccaggaaaaggcatctcagaccacaaatagagaatttgattcctcatttgccacataagtcatctgcttagcttttcctttcctttttttttttttttttttttctggaggcagagtctccctttgtcgccaggctggagtgcagtggtgccatctcggctcactgcagcactgtctcggctcactgcagcctccgcctcccgtattcaagcgattctcctgtctcagcctcctgagtagctgggactacaggtgtgcaccaccacgcccggctaatttttgtatttttagtagagacggggtttcactgtgttggccaggatggtctcaatctcgacctcgtgatccgcccaccttggcctcccaaagtgttgggattacaggcgtgactcaccatgcccagccacttagttttttcttattcccacctttctatcccatagaacactcttttttatcttccctgaaccatattgatgagataaatagggctgggggctgggccccgctggtcactcaacagagtatttcccttggccgagatggaagttttgtcccaatagatgagctgctgagtatcaacaaggtgacatttttctgctgcccatttgtgtcctggagacggtggtaccctgaaggcagaggccagctgccgcaagacagcaatgacagtccacctgccgacctgattcctgcatcatggaataaccacatggctaccttctatcctctgttcccaaatggtggtggcacttatcctgaagtcgtcaatgatttccctttgaaactactttattttactaatttaaactattttgtactgatgtagccctgaggtagttcatgaaaatgctgtgcactcattccatggaataaatgttggaaagctgatcttttctgatataaaatgttgaatgataaaaaaaacgcgagcaaaacaacacatgatttgtgacgcatggcacaaaacaagacagtaaaaaccgaactgttgggcagcgctagacccaatgaagagtaacgaggccaacacaggtaccaaggaaccccgggcaagaccaagtgttgggactccccaaaaaaagcccgggggacgcagatctacaaatcgaagggcggcgacagcgactgcacgagaaggacgaataatgccgccagcgaagaggcaacacgaagacaaagacagagggactaacgagaggcgaacccacgacagacaacagaaaacaacaa

SEQ ID NO: 316451 - DNA, 2641 bp, Homo sapiens
ttctcttccgactttgggccaaagccttgtccggagatcacagtgtctcgctcggggacacgccctctctaggcccagacttggtccccactggagttcccagcccccctccccgctgcggcacgcacattcccaatgccgggcggggcagggcgcagcaggcccgccctcggcgcgcggccaggctgggctcctcccctggagctgcggccgggagggcgggcggccggggagacggggtggcggctgcagcccgggtagggccaggagacccggtccacgtttgcaaacgcagccgaacgcccaggccgacccgtgccgcccgagcgccgcgctgcgtccgcgccactcttctcgccgccccgatggcgttccggggctggaggcccccgccgccaccgctgctcctgctgctgctctgggtgaccgggcaggcagcgcccgtggcgggcctgggctccgacgcggagctgcagatcgagcggcgcttcgtgcccgacgagtgcccgcgcaccgtgcgcagcggcgacttcgtgcgctaccactacgtggggacgttccccgacggccagaagttcgactccagctatgacagagactccactttcaatgtgtttgtgggaaaaggacagctgatcacagggatggaccaggctcttgttgggatgtgcgtaaacgagagacgtttcgtgaagattcccccaaagcttgcctacggaaatgaaggagtttctggtgtgatcccccccaattcagtgcttcattttgatgtacttctgatggatatttggaattctgaagaccaggttcagattcacacctatttcaagcccccgagttgccctcggaccatccaggtgtctgattttgtgaggtaccactacaacgggacgttcctggacggaactctgtttgattcgagtcacaatcgcatgaaaacatatgacacgtatgtgggaattggctggctgattcctggaatggataaagggctgctggggatgtgtgtgggtgagaagcgcatcatcaccattcctccttttctggcctatggagaggatggagatgggaaagacattcccggtcaggcatctctggtgtttgatgttgcattattggacctccataaccccaaggacagcatttccattgagaacaaggtagtacctgaaaactgtgagcggataagtcaaagtggggactttctcaggtatcattacaatggcacgcttctggatggcaccctctttgattccagctactctcggaaccgcacgtttgacacgtacattgggcagggctacgtgattcctgggatggatgaaggtctacttggtgtttgcattggagaaaagcgaaggattgtggtcccgcctcacctggggtatggagaggaaggaagagggaatatccccggctcggctgtgctggtgtttgacatccatgtgatcgacttccacaacccttcggactccatcagcatcacctcccactacaaaccccctgactgctcagtgctgagtaagaagggagattacctcaaatatcactacaatgcctcacttctggatgggaccctgctggactccacgtggaatttaggcaaaacttacaatattgttctgggatctgggcaagttgtgttggggatggacatgggtctcagagagatgtgcgttggcgagaaacggacagtgatcattccgcctcacctgggctatggggaagctggcgtggatggagaagtgcccggcagtgccgtattagtgtttgacattgagctgctggagctggtggctggccttcctgaggggtacatgttcatatggaatggtgaggtgtcacccaacctctttgaagaaattgacaaggatggcaacggagaagtcctcctggaagagttctcagagtacattcacgcccaggtggcatctggcaaagggaaactcgctcctggctttgatgctgagctgattgtgaagaatatgttcaccaaccaggaccggaatggagatgggaaggtcacagccgaggaatttaaactcaaagaccaggaagccaaacacgatgaactctaaacctggcatctggcaaagggaaactcgctcctggctttgatgctgagctgattgtgaagaatatgttccacctttctatcccatagaacactcttttttatcttccctgaaccatattgatgagataaatagggctgggggctgggccccgctggtcactcaacagagtatttcccttggccgagatggaagttttgtcccaatagatgagctgctgagtatcaacaaggtgacatttttctgctgcccatttgtgtcctggagacggtggtaccctgaaggcagaggccagctgccgcaagacagcaatgacagtccacctgccgacctgattcctgcatcatggaataaccacatggctaccttctatcctctgttcccaaatggtggtggcacttatcctgaagtcgtcaatgatttccctttgaaactactttattttactaatttaaactattttgtactgatgtagccctgaggtagttcatgaaaatgctgtgcactcattccatggaataaatgttggaaagctgatcttttctgatataaaatgttgaatgata

SEQ ID NO: 316452 - DNA, 2595 bp, Homo sapiens
  misc_feature (2552)..(2552): n is a, c, g, or t
  misc_feature (2564)..(2564): n is a, c, g, or t
  misc_feature (2574)..(2576): n is a, c, g, or t
ttctcttccgactttgggccaaagccttgtccggagatcacagtgtctcgctcggggacacgccctctctaggcccagacttggtccccactggagttcccagcccccctccccgctgcggcacgcacattcccaatgccgggcggggcagggcgcagcaggcccgccctcggcgcgcggccaggctgggctcctcccctggagctgcggccgggagggcgggcggccggggagacggggtggcggctgcagcccgggtagggccaggagacccggtccacgtttgcaaacgcagccgaacgcccaggccgacccgtgccgcccgagcgccgcgctgcgtccgcgccactcttctcgccgccccgatggcgttccggggctggaggcccccgccgccaccgctgctcctgctgctgctctgggtgaccgggcaggcagcgcccgtggcgggcctgggctccgacgcggagctgcagatcgagcggcgcttcgtgcccgacgagtgcccgcgcaccgtgcgcagcggcgacttcgtgcgctaccactacgtggggacgttccccgacggccagaagttcgactccagctatgacagagactccactttcaatgtgtttgtgggaaaaggacagctgatcacagggatggaccaggctcttgttgggatgtgcgtaaacgagagacgtttcgtgaagattcccccaaagcttgcctacggaaatgaaggagtttctggtgtgatcccccccaattcagtgcttcattttgatgtacttctgatggatatttggaattctgaagaccaggttcagattcacacctatttcaagcccccgagttgccctcggaccatccaggtgtctgattttgtgaggtaccactacaacgggacgttcctggacggaactctgtttgattcgagtcacaatcgcatgaaaacatatgacacgtatgtgggaattggctggctgattcctggaatggataaagggctgctggggatgtgtgtgggtgagaagcgcatcatcaccattcctccttttctggcctatggagaggatggagatgggaaagacattcccggtcaggcatctctggtgtttgatgttgcattattggacctccataaccccaaggacagcatttccattgagaacaaggtagtacctgaaaactgtgagcggataagtcaaagtggggactttctcaggtatcattacaatggcacgcttctggatggcaccctctttgattccagctactctcggaaccgcacgtttgacacgtacattgggcagggctacgtgattcctgggatggatgaaggtctacttggtgtttgcattggagaaaagcgaaggattgtggtcccgcctcacctggggtatggagaggaaggaagagggaatatccccggctcggctgtgctggtgtttgacatccatgtgatcgacttccacaacccttcggactccatcagcatcacctcccactacaaaccccctgactgctcagtgctgagtaagaagggagattacctcaaatatcactacaatgcctcacttctggatgggaccctgctggactccacgtggaatttaggcaaaacttacaatattgttctgggatctgggcaagttgtgttggggatggacatgggtctcagagagatgtgcgttggcgagaaacggacagtgatcattccgcctcacctgggctatggggaagctggcgtggatggagaagtgcccggcagtgccgtattagtgtttgacattgagctgctggagctggtggctggccttcctgaggggtacatgttcatatggaatggtgaggtgtcacccaacctctttgaagaaattgacaaggatggcaacggagaagtcctcctggaagagttctcagagtacattcacgcccaggtggcatctggcaaagggaaactcgctcctggctttgatgctgagctgattgtgaagaatatgttcaccaaccaggaccggaatggagatgggaaggtcacagccgaggaatttaaactcaaagaccaggaagccaaacacgatgaactctaaacctggcatgaaccagatggtgccagggagtacgtgacaccaagccacctgtgtggcaagacgtgcagtgagggtgcaagggtctctcagaagttgcatcattagccagtagtaggtgggtcacatagtacctggtgtacacatcggggtgggttgatatatggggtgagaagtttgggctgatcgccagtgatagtaaacaaaatctgtgcagagggccttagcatgggatgtgtccagtattgaaaaggctgcactgccaaccatgatttgtgagccttctgggaaattttgttattaaaggaatatatagtgtcagacggaagttataatcatcttggaggaaccataagaaaaggtgtccagggtatctatataaagagggttaaatttttttttaacttgctggttaaaacattttagaaatattctagagatgggcaggagagtcaaagggcttgcttgccccagccnggccgcccccancgcgcccgcnnnagatcctctagagtaccta

SEQ ID NO: 316453 - DNA, 2051 bp, Homo sapiens
ttctcttccgactttgggccaaagccttgtccggagatcacagtgtctcgctcggggacacgccctctctaggcccagacttggtccccactggagttcccagcccccctccccgctgcggcacgcacattcccaatgccgggcggggcagggcgcagcaggcccgccctcggcgcgcggccaggctgggctcctcccctggagctgcggccgggagggcgggcggccggggagacggggtggcggctgcagcccgggtagggccaggagacccggtccacgtttgcaaacgcagccgaacgcccaggccgacccgtgccgcccgagcgccgcgctgcgtccgcgccactcttctcgccgccccgatggcgttccggggctggaggcccccgccgccaccgctgctcctgctgctgctctgggtgaccgggcaggcagcgcccgtggcgggcctgggctccgacgcggagctgcagatcgagcggcgcttcgtgcccgacgagtgcccgcgcaccgtgcgcagcggcgacttcgtgcgctaccactacgtggggacgttccccgacggccagaagttcgactccagctatgacagagactccactttcaatgtgtttgtgggaaaaggacagctgatcacagggatggaccaggctcttgttgggatgtgcgtaaacgagagacgtttcgtgaagattcccccaaagcttgcctacggaaatgaaggagtttctggtgtgatcccccccaattcagtgcttcattttgatgtacttctgatggatatttggaattctgaagaccaggttcagattcacacctatttcaagcccccgagttgccctcggaccatccaggtgtctgattttgtgaggtaccactacaacgggacgttcctggacggaactctgtttgattcgagtcacaatcgcatgaaaacatatgacacgtatgtgggaattggctggctgattcctggaatggataaagggctgctggggatgtgtgtgggtgagaagcgcatcatcaccattcctccttttctggcctatggagaggatggagatgggaaagacattcccggtcaggcatctctggtgtttgatgttgcattattggacctccataaccccaaggacagcatttccattgagaacaaggtagtacctgaaaactgtgagcggataagtcaaagtggggactttctcaggtatcattacaatggcacgcttctggatggcaccctctttgattccagctactctcggaaccgcacgtttgacacgtacattgggcagggctacgtgattcctgggatggatgaaggtctacttggtgtttgcattggagaaaagcgaaggattgtggtcccgcctcacctggggtatggagaggaaggaagagggaatatccccggctcggctgtgctggtgtttgacatccatgtgatcgacttccacaacccttcggactccatcagcatcacctcccactacaaaccccctgactgctcagtgctgagtaagaagggagattacctcaaatatcactacaatgcctcacttctggatgggaccctgctggactccacgtggaatttaggcaaaacttacaatattgttctgggatctgggcaagttgtgttggggatggacatgggtctcagagagatgtgcgttggcgagaaacggacagtgatcattccgcctcacctgggctatggggaagctggcgtggatggagaagtgcccggcagtgccgtattagtgtttgacattgactgccgcaagacagcaatgacagtccacctgccgacctgattcctgcatcatggaataaccacatggctaccttctatcctctgttcccaaatggtggtggcacttatcctgaagtcgtcaatgatttccctttgaaactactttattttactaatttaaactattttgtactgatgtagccctgaggtagttcatgaaaatgctgtgcactcattccatggaataaatgttggaaagctgatcttttctgatataaaatgttgaatgata

SEQ ID NO: 316454 - DNA, 1760 bp, Homo sapiens
ttctcttccgactttgggccaaagccttgtccggagatcacagtgtctcgctcggggacacgccctctctaggcccagacttggtccccactggagttcccagcccccctccccgctgcggcacgcacattcccaatgccgggcggggcagggcgcagcaggcccgccctcggcgcgcggccaggctgggctcctcccctggagctgcggccgggagggcgggcggccggggagacggggtggcggctgcagcccgggtagggccaggagacccggtccacgtttgcaaacgcagccgaacgcccaggccgacccgtgccgcccgagcgccgcgctgcgtccgcgccactcttctcgccgccccgatggcgttccggggctggaggcccccgccgccaccgctgctcctgctgctgctctgggtgaccgggcaggcagcgcccgtggcgggcctgggctccgacgcggagctgcagatcgagcggcgcttcgtgcccgacgagtgcccgcgcaccgtgcgcagcggcgacttcgtgcgctaccactacgtggggacgttccccgacggccagaagttcgactccagctatgacagagactccactttcaatgtgtttgtgggaaaaggacagctgatcacagggatggaccaggctcttgttgggatgtgcgtaaacgagagacgtttcgtgaagattcccccaaagcttgcctacggaaatgaaggagtttctggtgtgatcccccccaattcagtgcttcattttgatgtacttctgatggatatttggaattctgaagaccaggttcagattcacacctatttcaagcccccgagttgccctcggaccatccaggtgtctgattttgtgaggtaccactacaacgggacgttcctggacggaactctgtttgattcgagtcacaatcgcatgaaaacatatgacacgtatgtgggaattggctggctgattcctggaatggataaagggctgctggggatgtgtgtgggtgagaagcgcatcatcaccattcctccttttctggcctatggagaggatggagatgggaaagacattcccggtcaggcatctctggtgtttgatgttgcattattggacctccataaccccaaggacagcatttccattgagaacaaggtagtacctgaaaactgtgagcggataagtcaaagtggggactttctcaggtatcattacaatggcacgcttctggatggcaccctctttgattccagctactctcggaaccgcacgtttgacacgtacattgggcagggctacgtgattcctgggatggatgaaggtctacttggtgtttgcattggagaaaagcgaaggattgtggtcccgcctcacctggggtatggagaggaaggaagaggcggagaaactccatctatccatccatcaaagatttattgagtttcttcatgaccaggccctgctcacggtgttagggattcagcagaaagaaacacaaacaaaacttcctacgcacacagagagtgtttccttgttgacgccctcaataatgtgtgtgcctcagaggttatcaggcacctgggagactgactcacgttaacttcctagaagctgacatactcacctgatgctacatggttccttgactgggtgtgaatcgacctctacactggttggaattcttgtgcctggaatcctcggggcctgagaggctgagttcatttgactgctgacatcagatcccagggatgtggg

SEQ ID NO: 316455 - DNA, 4120 bp, Homo sapiens
  misc_feature (3049)..(3049): n is a, c, g, or t
  misc_feature (3061)..(3061): n is a, c, g, or t
  misc_feature (3076)..(3076): n is a, c, g, or t
  misc_feature (3084)..(3085): n is a, c, g, or t
  misc_feature (3089)..(3089): n is a, c, g, or t
  misc_feature (3092)..(3092): n is a, c, g, or t
  misc_feature (3097)..(3098): n is a, c, g, or t
  misc_feature (3108)..(3108): n is a, c, g, or t
  misc_feature (3113)..(3113): n is a, c, g, or t
  misc_feature (3117)..(3117): n is a, c, g, or t
  misc_feature (3121)..(3121): n is a, c, g, or t
  misc_feature (3130)..(3130): n is a, c, g, or t
  misc_feature (3143)..(3143): n is a, c, g, or t
  misc_feature (3147)..(3147): n is a, c, g, or t
  misc_feature (3173)..(3173): n is a, c, g, or t
  misc_feature (3180)..(3180): n is a, c, g, or t
  misc_feature (3183)..(3184): n is a, c, g, or t
  misc_feature (3187)..(3187): n is a, c, g, or t
  misc_feature (3202)..(3203): n is a, c, g, or t
  misc_feature (3216)..(3216): n is a, c, g, or t
  misc_feature (3218)..(3218): n is a, c, g, or t
  misc_feature (3221)..(3221): n is a, c, g, or t
  misc_feature (3225)..(3225): n is a, c, g, or t
  misc_feature (3228)..(3228): n is a, c, g, or t
  misc_feature (3251)..(3251): n is a, c, g, or t
  misc_feature (3253)..(3254): n is a, c, g, or t
  misc_feature (3259)..(3261): n is a, c, g, or t
  misc_feature (3271)..(3271): n is a, c, g, or t
  misc_feature (3279)..(3282): n is a, c, g, or t
  misc_feature (3289)..(3289): n is a, c, g, or t
  misc_feature (3295)..(3295): n is a, c, g, or t
  misc_feature (3297)..(3298): n is a, c, g, or t
  misc_feature (3300)..(3300): n is a, c, g, or t
  misc_feature (3304)..(3304): n is a, c, g, or t
  misc_feature (3309)..(3309): n is a, c, g, or t
  misc_feature (3313)..(3313): n is a, c, g, or t
  misc_feature (3317)..(3317): n is a, c, g, or t
  misc_feature (3319)..(3320): n is a, c, g, or t
cggcagggagaaggtggatgaaggggccgccaggagggagctgaatggctttctcctggcctgtcctggcttgttgggcatggctcagtatcactcacagtgagagactgagccatgtttcccagccaagggtctctacgagcaggctaggaagatgctgcagtgagtccttctacctgtcttctccaaatgtactttcaagcctgctgggatggccctgcaaggcaggccaccatgcacagctttactcacagcccctggccaggactgccaaggctggcctcatgcagtgagtccggagggaagaccctaaagcttagagctggaagggcccagccctggcaccgactccctggggtgtggttcagggatgactgggacctgcccaaggccgcgcagtcctctgggaggaggcagggcttctaacacagtgcatttgggcttcaagttcatggctctttccagttctcagattacaggcagcaagcagccaagtaacagagaattcctatttccaagtagggaaattgaggccaaagcagattaaggttctcagctgaggtgatgctgtgagctgggggtgtggtctccagtgacccagatgtgaaccagagctgacccaggctgttggtgcccctggaatcctggagagaactctgccttcctattttctccttgtcccctgaggcgacttttcttgagtagatttcctagtggatttcaggagggcagggtaaaaacatgtttagaccacgagagaaaggggctgggaaagttcaggggtctttccatgtcagcacgcttggagcctgcacacctagaaaagaatatggctgcttcgagtgcagcaggaaggatgcaggttagacttaagcaggaacttccaggccttggagaatgtccacctggtaagaagttctccaagatccttttgcgggcttctcctagaggttattaaatattcccactcttgatataaaccctaactagtgtagtgatggcacattagagttgaccaggggctgcattagaaacatctcaccgtttcttcagcccagccctgccaggtgagtgggacagtgctgactgttttgcaggccagggacctgagccttaggagcatgagggggactttggattctagatgtttcttgcttctctgcccctgtatcctacccgctggagcacacggttggggtggacacttcctggaggcagaagagtggaggagatggccttctgagttctccttggcatcctgctttggatgtggtggcgaggaccgtccctgtcctcagctctattcctctgagttgttgtggccaagagagaatgcagagtctcactccttagccttgttctatctcctcttgggccttgttctgctccaagtatgaagtgttcagttctccagaggggcccgacctgggaaagtagagaaaccacgtggcctggggccctggcagggagccaagtcattccttgggcctggggccagcctgctgcagccaggagctcgggcatgtggaggaaggtccctgctgctggccaggctgggcatgcatgccatgtggtcgccttacacatgcaggcatggccagagagagggaagcagatggggttgaagtgggggctatacattccagctcagcagccgccaccctaagacccagggagctctggggtgactgctggaaatggctctgccacttagtagcggagggatgaggcaaggtatgggtgagggggtcttgggtgtgttctgggctgcagtctccccattggtgtaatgaggtggtgaacatcaagaacgtctcgggtcctttcatccttagaccatctgtgattgttccaatcagagatttgttccagcacctttaaagctcttttttccaaccactgtgctcttaattacaaaccctagattcctagaggtcatctgcttgacccctccattggaagggagattgaagatggagacaggggttgactcccggaggccctcagcgtgtccaagcagaaccagtcctcagcatcaatcatgccattcctttttgcacattagctcagggctctaatgagccctcggagagcctgtaggctggttctagttcatctgttcattcagtgtccagttgtagctaagagaacagcttctggagtcacactgcctaggttcgaatctcatctctgctatgccagggctgtgtgactttggaaacatttcctagcctttcagaatcacagtttcctcatctcaaaaattcagccaataatagggacctgttgggtggtcacgctgttggggtttactgttgctatgattgtttcatcccaccatcatcgccctctggctagactcaggctgcattttgtctgcagaggttactcccctccagaaactgactcaaaattctgatgaccgtctctcccttgcttatacctcagagacattccctcacatggctgaggcctcccatgtggcagtgaggcaccctcactgaggcacccttcatgtggcatctcagctcatcctcacagcactcccttttggatggcaaagagaactgaggccccaagaggcctgtgggtggtgcagtcaggactgtcttggggcaggctggccagcctggaatggcctctgaatgcagacccatgggtctgagacctgcctggcagctgctgtatgtgaatatattgggcatcacagggtcctaaaggatccttagagatcacacacctccaacctgagcaggacagagggtcaagtgtgggggcctgcccaaggtcagacagccagcctagaggagagccagggctcatctgcaggccatctccatatgctggacttggagaacagggcaggactacaagttctgtcccttgtaggccatgtggagtcagccaggtgcccagccagacaacattgcccttgtctcaaggagttgctttcctctcctaccaggttcttctaccccaaagttcagaggccagaggtgggaactcaatgccttcagaaggtgccctggctggacgccatggctcacanctgtaatcccancactttgggaggccnaggcaggnngatngcntgagnncaggagttcnagacnagcntggncaacatggngaaaccccatctntacnaaaaatacaaaaattagccaggtgtngtggtgngcnnctntaatcccagctactnnggaggctgaggcngnagnatcnctnggaggcagaggttgcagtgagcngnnatcannncactgcactncagcctgnnnnacagagngagacncnntntcangaaanaaanaaanannaatttctgttatgacagagagatgatgaaagtaggcagggctgtgttcctttgtgtagcctgtatatattttccatatgtagagccctgattaacttcaaggacaaacactggctggagaaagccagactgatgggaatgagactttggccaaaaatcccaaaacatcattttcaatcagtagagaagtgcttagggttgaaaattgatttcatttgctactgaatttggtaaatcctgggtaacttttatcaagatgaagacattttaccctacctactctagaaatatacaacaatgttatattttacactccttggaaacatttgaggaaaaaaatgcaatttgcacttcactttgttggaatatcccatagcactcaataaactcagctgctagagtgccgatgtcaggagggctgtgtcgggtaatgcgtgtggctgaatgggcataaccactgtggcttcttgtgctgcagaagctcgttgacaagactgaggaggatttcaagagcaaccaagtaaagtcatgcattttctaattttgtgtatatggaatatatttttaaatagagatttttctactttagataatgtgttaatattgctattacctaggttaagcactattgtctgtgctagtaagaaaaagaaaggaaaaccatcattgctttatagtagcttatatcaatttagatttcatcattactattttgcatactggaatttataaatgtgtaaattatcattttcttagttttgtaataccttttttatttgtgaataaaattatcacctggta

SEQ ID NO: 316456 - DNA, 1707 bp, Homo sapiens
ggacctgcagcctcccaggtggctgggaagaactctccaacaataaatacatttgataagaaagatggctttaaaagtgctactagaacaagagaaaacgtttttcactcttttagtattactaggctatttgtcatgtaaagtgacttgtgaatcaggagactgtagacagcaagaattcagggatcggtctggaaactgtgttccctgcaaccagtgtgggccaggcatggagttgtctaaggaatgtggcttcggctatggggaggatgcacagtgtgtgacgtgccggctgcacaggttcaaggaggactggggcttccagaaatgcaagccctgtctggactgcgcagtggtgaaccgctttcagaaggcaaattgttcagccaccagtgatgccatctgcggggactgcttgccaggattttataggaagacgaaacttgtcggctttcaagacatggagtgtgtgccttgtggagaccctcctcctccttacgaaccgcactgtgccagcaaggtcaacctcgtgaagatcgcgtccacggcctccagcccacgggacacggcgctggctgccgttatctgcagcgctctggccaccgtcctgctggccctgctcatcctctgtgtcatctattgtaagagacagtttatggagaagaaacccagctggtctctgcggtcacaggacattcagtacaacggctctgagctgtcgtgttttgacagacctcagctccacgaatatgcccacagagcctgctgccagtgccgccgtgactcagtgcagacctgcgggccggtgcgcttgctcccatccatgtgctgtgaggaggcctgcagccccaacccggcgactcttggttgtggggtgcattctgcagccagtcttcaggcaagaaacgcaggcccagccggggagatggtgccgactttcttcggatccctcacgcagtccatctgtggcgagttttcagatgcctggcctctgatgcagaatcccatgggtggtgacaacatctctttttgtgactcttatcctgaactcactggagaagacattcattctctcaatccagaacttgaaagctcaacgtctttggattcaaatagcagtcaagatttggttggtggggctgttccagtccagtctcattctgaaaactttacagcagctactgatttatctagatataacaacacactggtagaatcagcatcaactcaggatgcactaactatgagaagccagctagatcaggagagtggcgctgtcatccacccagccactcagacgtccctccaggtaaggcagcgactgggttccctgtgaacacagcactgacttacagtagatcagaactctgttcccagcataagatttgggggaacctggatgagtttttttttttgcatctttaataatttcttatatgttgtagagtatgttttaaaataaatttcaagtatttttttaaaaaactttcacagctaatatataagagcaaagtggacagctgcattcttttattcctctttgtaagtacaaccacttagcacagcacctgctgcctccttccctggttgagagaggtgagtcgggtatgggagcatcttgcagacaattcctgaccttcatttcttcctgttatatatacttattattatatatatattacttatgcccaatacttaaatctactt

SEQ ID NO: 316457 - DNA, 4670 bp, Homo sapiens
agcttccaacacacagtccacaacacagcttgggaaccaaaaaagctacagatccagccactcagcccaagcatgggagaactaccagcattgcctcattgcaaaaaagaggaggaaaacaacgtgatccatgtttaacaaaagagtctgtggactaggaggtgggagggtaactacctgctgaaagtgaactttctttgatatccatgcatatatataaactcagccctgcctttgatgttcagcaactgattcactgatcagattacaggcatttcatctccctgctcgtctgcctttgatctgcatggttaattttattttcctggatttgaagtttcgtctgggcttgtgctgacatacatttttgggaaggtagaagcatttggcacagaagtgctgccaggagaaactaagttgctgaacggaactctccaacaataaatacatttgataagaaagatggctttaaaagtgctactagaacaagagaaaacgtttttcactcttttagtattactaggctatttgtcatgtaaagtgacttgtgaatcaggagactgtagacagcaagaattcagggatcggtctggaaactgtgttccctgcaaccagtgtgggccaggcatggagttgtctaaggaatgtggcttcggctatggggaggatgcacagtgtgtgacgtgccggctgcacaggttcaaggaggactggggcttccagaaatgcaagccctgtctggactgcgcagtggtgaaccgctttcagaaggcaaattgttcagccaccagtgatgccatctgcggggactgcttgccaggattttataggaagacgaaacttgtcggctttcaagacatggagtgtgtgccttgtggagaccctcctcctccttacgaaccgcactgtgccagcaaggtcaacctcgtgaagatcgcgtccacggcctccagcccacgggacacggcgctggctgccgttatctgcagcgctctggccaccgtcctgctggccctgctcatcctctgtgtcatctattgtaagagacagtttatggagaagaaacccagctggtctctgcggtcacaggacattcagtacaacggctctgagctgtcgtgttttgacagacctcagctccacgaatatgcccacagagcctgctgccagtgccgccgtgactcagtgcagacctgcgggccggtgcgcttgctcccatccatgtgctgtgaggaggcctgcagccccaacccggcgactcttggttgtggggtgcattctgcagccagtcttcaggcaagaaacgcaggcccagccggggagatggtgccgactttcttcggatccctcacgcagtccatctgtggcgagttttcagatgcctggcctctgatgcagaatcccatgggtggtgacaacatctctttttgtgactcttatcctgaactcactggagaagacattcattctctcaatccagaacttgaaagctcaacgtctttggattcaaatagcagtcaagatttggttggtggggctgttccagtccagtctcattctgaaaactttacagcagctactgatttatctagatataacaacacactggtagaatcagcatcaactcaggatgcactaactatgagaagccagctagatcaggagagtggcgctgtcatccacccagccactcagacgtccctccaggaagcttaaagaacctgcttctttctgcagtagaagcgtgtgctggaacccaaagagtactcctttgttaggcttatggactgagcagtctggaccttgcatggcttctggggcaaaaataaatctgaaccaaactgacggcatttgaagcctttcagccagttgcttctgagccagaccagctgtaagctgaaacctcaatgaataacaagaaaagactccaggccgactcatgatactctgcatctttcctacatgagaagcttctctgccacaaaagtgacttcaaagacggatgggttgagctggcagcctatgagattgtggacatataacaagaaacagaaatgccctcatgcttattttcatggtgattgtggttttacaagactgaagacccagagtatactttttctttccagaaataatttcataccgcctatgaaatatcagataaattaccttagcttttatgtagaatgggttcaaaagtgagtgtttctatttgagaaggacactttttcatcatctaaactgattcgcataggtggttagaatggccctcatattgcctgcctaaatcttgggtttattagatgaagtttactgaatcagaggaatcagacagaggaggatagctctttccagaatccacacttctgacctcagcctcggtctcatgaacacccgctgatctcaggagaacacctgggctagggaatgtggtcgagaaagggcagcccattgcccagaattaacacatattgtagagacttgtatgcaaaggttggcatatttatatgaaaattagttgctatagaaacatttgttgcatctgtccctctgcctgagcttagaaggttatagaaaaagggtatttataaacataaatgaccttttacttgcattgtatcttatactaaaggctttagaaattacaacatatcaggttcccctactactgaagtagccttccgtgagaacacaccacatgttaggactagaagaaaatgcacaatttgtaggggtttggatgaagcagctgtaactgccctagtgtagtttgaccaggacattgtcgtgctccttccaattgtgtaagattagttagcacatcatctcctactttagccatccggtgttggatttaagaggacggtgcttctttctattaaagtgctccatcccctaccatctacacattagcattgtctctagagctaagacagaaattaaccccgttcagtcacaaagcagggaatggttcatttactcttaatctttatgccctggagaagacctacttgaacagggcatattttttagacttctgaacatcagtatgttcgagggtactatgatattttggtttggaattgccctgcccaagtcactgtcttttaacttttaaactgaatattaaaatgtatctgtctttcctagtatgtttttatcttctcatgtattatccatggttttctctgtttgtgacagattagtaaaatttaatgagccctctttcttgtggccgtttctccatagttttaggttttgatatgtgtttactagcttgcctgtgtctggtacatctcatgacctcaattccctcacctgaaataggaaatgagaatgtttcattgtagccccaagcggtcatgtcaacctagtgcctagtcataattaattgacttttcctgtattacttctttttttaagtataaaccaatgatcctttggtagtcaagaactcttaggaacattgccttttggacatgtaaaatatttaggatttgaccacacaatggctatgaaaatgcaagtagtttcctcgcgtgacctcaccatgattcacatacgtgccactgtttgaaatctggtctgtttgcatttctgttatgacagagagatgatgtttgcatttctgttatgacagagagatgatgaaagtaggcagggctgtgttcctttgtgtagcctgtatatattttccatatgtagagccctgattaacttcaaggacaaacactggctggagaaagccagactgatgggaatgagactttggccaaaaatcccaaaacatcattttcaatcagtagagaagtgcttagggttgaaaattgatttcatttgctactgaatttggtaaatcctgggtaacttttatcaagatgaagacattttaccctacctactctagaaatatacaacaatgttatattttacactccttggaaacatttgaggaaaaaaatgcaatttgcacttcactttgttggaatatcccatagcactcaataaactcagctgctagagtgccgatgtcaggagggctgtgtcgggtaatgcgtgtggctgaatgggcataaccactgtggcttcttgtgctgcagaagctcgttgacaagactgaggaggatttcaagagcaaccaagtaaagtcatgcattttctaattttgtgtatatggaatatatttttaaatagagatttttctactttagataatgtgttaatattgctattacctaggttaagcactattgtctgtgctagtaagaaaaagaaaggaaaaccatcattgctttatagtagcttatatcaatttagatttcatcattactattttgcatactggaatttataaatgtgtaaattatcattttcttagttttgtaataccttttttatttgtgaataaaattatcacctggtaaaaaaaaaaaaaaacacaacacaaacaacgttgtgtggcggactgaggcctgaaaaaggtttttagaccaaccctggtgggcccgcgggcccaagtgggtcatgtgaacctgtggccaacgcgtgctccacagagaactgcgcaacgacaggggggttggcttccccaataaaaaacgcggggacacgagcgttgtacaacctcaagggagctgaggggcacacggctctcaaggtcagggcaaata

SEQ ID NO: 316458 - DNA, 401 bp, Homo sapiens
tcttcattaattttatttttgtcttatgtctgtgatttttgacacctctgtcatctgtaagtaattaacatgtaagtaatttttacccatggaataatattttagaattttagaacagcactcaagaaactcagatgagacccaggaaactgcatgttttagacattggattaagtataactatattaattagaaggaggtgtcaaaactcagttttcaaataaatggagtaatttgacttattgtattgagatgagtttataacaataggaaacactagaattctgatgcagtaaattgctatttcatttagaagacctaaaattacggctgacatgcttctttgtagtagtgtttttctccccatcaaaaactttaagttcttttgaacgtgtgtgcag

SEQ ID NO: 316459 - DNA, 4423 bp, Homo sapiens
agcttccaacacacagtccacaacacagcttgggaaccaaaaaagctacagatccagccactcagcccaagcatgggagaactaccagcattgcctcattgcaaaaaagaggaggaaaacaacgtgatccatgtttaacaaaagagtctgtggactaggaggtgggagggtaactacctgctgaaagtgaactttctttgatatccatgcatatatataaactcagccctgcctttgatgttcagcaactgattcactgatcagattacaggcatttcatctccctgctcgtctgcctttgatctgcatggttaattttattttcctggatttgaagtttcgtctgggcttgtgctgacatacatttttgggaaggtagaagcatttggcacagaagtgctgccaggagaaactaagttgctgaacggaactctccaacaataaatacatttgataagaaagatggctttaaaagtgctactagaacaagagaaaacgtttttcactcttttagtattactaggctatttgtcatgtaaagtgacttgtgaatcaggagactgtagacagcaagaattcagggatcggtctggaaactgtgttccctgcaaccagtgtgggccaggcatggagttgtctaaggaatgtggcttcggctatggggaggatgcacagtgtgtgacgtgccggctgcacaggttcaaggaggactggggcttccagaaatgcaagccctgtctggactgcgcagtggtgaaccgctttcagaaggcaaattgttcagccaccagtgatgccatctgcggggactgcttgccaggattttataggaagacgaaacttgtcggctttcaagacatggagtgtgtgccttgtggagaccctcctcctccttacgaaccgcactgtgccagcaaggtcaacctcgtgaagatcgcgtccacggcctccagcccacgggacacggcgctggctgccgttatctgcagcgctctggccaccgtcctgctggccctgctcatcctctgtgtcatctattgtaagagacagtttatggagaagaaacccagctggtctctgcggtcacaggacattcagtacaacggctctgagctgtcgtgttttgacagacctcagctccacgaatatgcccacagagcctgctgccagtgccgccgtgactcagtgcagacctgcgggccggtgcgcttgctcccatccatgtgctgtgaggaggcctgcagccccaacccggcgactcttggttgtggggtgcattctgcagccagtcttcaggcaagaaacgcaggcccagccggggagatggtgccgactttcttcggatccctcacgcagtccatctgtggcgagttttcagatgcctggcctctgatgcagaatcccatgggtggtgacaacatctctttttgtgactcttatcctgaactcactggagaagacattcattctctcaatccagaacttgaaagctcaacgtctttggattcaaatagcagtcaagatttggttggtggggctgttccagtccagtctcattctgaaaactttacagcagctactgatttatctagatataacaacacactggtagaatcagcatcaactcaggatgcactaactatgagaagccagctagatcaggagagtggcgctgtcatccacccagccactcagacgtccctccaggaagcttaaagaacctgcttctttctgcagtagaagcgtgtgctggaacccaaagagtactcctttgttaggcttatggactgagcagtctggaccttgcatggcttctggggcaaaaataaatctgaaccaaactgacggcatttgaagcctttcagccagttgcttctgagccagaccagctgtaagctgaaacctcaatgaataacaagaaaagactccaggccgactcatgatactctgcatctttcctacatgagaagcttctctgccacaaaagtgacttcaaagacggatgggttgagctggcagcctatgagattgtggacatataacaagaaacagaaatgccctcatgcttattttcatggtgattgtggttttacaagactgaagacccagagtatactttttctttccagaaataatttcataccgcctatgaaatatcagataaattaccttagcttttatgtagaatgggttcaaaagtgagtgtttctatttgagaaggacactttttcatcatctaaactgattcgcataggtggttagaatggccctcatattgcctgcctaaatcttgggtttattagatgaagtttactgaatcagaggaatcagacagaggaggatagctctttccagaatccacacttctgacctcagcctcggtctcatgaacacccgctgatctcaggagaacacctgggctagggaatgtggtcgagaaagggcagcccattgcccagaattaacacatattgtagagacttgtatgcaaaggttggcatatttatatgaaaattagttgctatagaaacatttgttgcatctgtccctctgcctgagcttagaaggttatagaaaaagggtatttataaacataaatgaccttttacttgcattgtatcttatactaaaggctttagaaattacaacatatcaggttcccctactactgaagtagccttccgtgagaacacaccacatgttaggactagaagaaaatgcacaatttgtaggggtttggatgaagcagctgtaactgccctagtgtagtttgaccaggacattgtcgtgctccttccaattgtgtaagattagttagcacatcatctcctactttagccatccggtgttggatttaagaggacggtgcttctttctattaaagtgctccatcccctaccatctacacattagcattgtctctagagctaagacagaaattaaccccgttcagtcacaaagcagggaatggttcatttactcttaatctttatgccctggagaagacctacttgaacagggcatattttttagacttctgaacatcagtatgttcgagggtactatgatattttggtttggaattgccctgcccaagtcactgtcttttaacttttaaactgaatattaaaatgtatctgtctttcctagtatgtttttatcttctcatgtattatccatggttttctctgtttgtgacagattagtaaaatttaatgagccctctttcttgtggccgtttctccatagttttaggttttgatatgtgtttactagcttgcctgtgtctggtacatctcatgacctcaattccctcacctgaaataggaaatgagaatgtttcattgtagccccaagcggtcatgtcaacctagtgcctagtcataattaattgacttttcctgtattacttctttttttaagtataaaccaatgatcctttggtagtcaagaactcttaggaacattgccttttggacatgtaaaatatttaggatttgaccacacaatggctatgaaaatgcaagtagtttcctcgcgtgacctcaccatgattcacatacgtgccactgtttgaaatctggtctgtttgcatttctgttatgacagagagatgatgtttgcatttctgttatgacagagagatgatgaaagtaggcagggctgtgttcctttgtgtagcctgtatatattttccatatgtagagccctgattaacttcaaggacaaacactggctggagaaagccagactgatgggaatgagactttggccaaaaatcccaaaacatcattttcaatcagtagagaagtgcttagggttgaaaattgatttcatttgctactgaatttggtaaatcctgggtaacttttatcaagatgaagacattttaccctacctactctagaaatatacaacaatgttatattttacactccttggaaacatttgaggaaaaaaatgcaatttgcacttcactttgttggaatatcccatagcactcaataaactcagctgctagagtgccgatgtcaggagggctgtgtcgggtaatgcgtgtggctgaatgggcataaccactgtggcttcttgtgctgcagaagctcgttgacaagactgaggaggatttcaagagcaaccaagtaaagtcatgcattttctaattttgtgtatatggaatatatttttaaatagagatttttctactttagataatgtgttaatattgctattacctaggttaagcactattgtctgtgctagtaagaaaaagaaaggaaaaccatcattgctttatagtagcttatatcaatttagatttcatcattactattttgcatactggaatttataaatgtgtaaattatcattttcttagttttgtaataccttttttatttgtgaataaaattatcacctggta

SEQ ID NO: 316460 - DNA, 3225 bp, Homo sapiens
agcttccaacacacagtccacaacacagcttgggaaccaaaaaagctacagatccagccactcagcccaagcatgggagaactaccagcattgcctcattgcaaaaaagaggaggaaaacaacgtgatccatgtttaacaaaagagtctgtggactaggaggtgggagggtaactacctgctgaaagtgaactttctttgatatccatgcatatatataaactcagccctgcctttgatgttcagcaactgattcactgatcagattacaggcatttcatctccctgctcgtctgcctttgatctgcatggttaattttattttcctggatttgaagtttcgtctgggcttgtgctgacatacatttttgggaaggtagaagcatttggcacagaagtgctgccaggagaaactaagttgctgaacggaactctccaacaataaatacatttgataagaaagatggctttaaaagtgctactagaacaagagaaaacgtttttcactcttttagtattactaggctatttgtcatgtaaagtgacttgtgaatcaggagactgtagacagcaagaattcagggatcggtctggaaactgtgttccctgcaaccagtgtgggccaggcatggagttgtctaaggaatgtggcttcggctatggggaggatgcacagtgtgtgacgtgccggctgcacaggttcaaggaggactggggcttccagaaatgcaagccctgtctggactgcgcagtggtgaaccgctttcagaaggcaaattgttcagccaccagtgatgccatctgcggggactgcttgccaggattttataggaagacgaaacttgtcggctttcaagacatggagtgtgtgccttgtggagaccctcctcctccttacgaaccgcactgtgccagcaaggtcaacctcgtgaagatcgcgtccacggcctccagcccacgggacacggcgctggctgccgttatctgcagcgctctggccaccgtcctgctggccctgctcatcctctgtgtcatctattgtaagagacagtttatggagaagaaacccagctggtctctgcggtcacaggacattcagtacaacggctctgagctgtcgtgttttgacagacctcagctccacgaatatgcccacagagcctgctgccagtgccgccgtgactcagtgcagacctgcgggccggtgcgcttgctcccatccatgtgctgtgaggaggcctgcagccccaacccggcgactcttggttgtggggtgcattctgcagccagtcttcaggcaagaaacgcaggcccagccggggagatggtgccgactttcttcggatccctcacgcagtccatctgtggcgagttttcagatgcctggcctctgatgcagaatcccatgggtggtgacaacatctctttttgtgactcttatcctgaactcactggagaagacattcattctctcaatccagaacttgaaagctcaacgtctttggattcaaatagcagtcaagatttggttggtggggctgttccagtccagtctcattctgaaaactttacagcagctactgatttatctagatataacaacacactggtagaatcagcatcaactcaggatgcactaactatgagaagccagctagatcaggagagtggcgctgtcatccacccagccactcagacgtccctccaggaagcttaaagaacctgcttctttctgcagtagaagcgtgtgctggaacccaaagagtactcctttgttaggcttatggactgagcagtctggaccttgcatggcttctggggcaaaaataaatctgaaccaaactgacggcatttgaagcctttcagccagttgcttctgagccagaccagctgtaagctgaaacctcaatgaataacaagaaaagactccaggccgactcatgatactctgcatctttcctacatgagaagcttctctgccacaaaagtgacttcaaagacggatgggttgagctggcagcctatgagattgtggacatataacaagaaacagaaatgccctcatgcttattttcatggtgattgtggttttacaagactgaagacccagagtatactttttctttccagaaataatttcataccgcctatgaaatatcagataaattaccttagcttttatgtagaatgggttcaaaagtgagtgtttctatttgagaaggacactttttcatcatctaaactgattcgcataggtggttagaatggccctcatattgcctgcctaaatcttgggtttattagatgaagtttactgaatcagaggaatcagacagaggaggatagctctttccagaatccacacttctgacctcagcctcggtctcatgaacacccgctgatctcaggagaacacctgggctagggaatgtggtcgagaaagggcagcccattgcccagaattaacacatattgtagagacttgtatgcaaaggttggcatatttatatgaaaattagttgctatagaaacatttgttgcatctgtccctctgcctgagcttagaaggttatagaaaaagggtatttataaacataaatgaccttttacttgcattgtatcttatactaaaggctttagaaattacaacatatcaggttcccctactactgaagtagccttccgtgagaacacaccacatgttaggactagaagaaaatgcacaatttgtaggggtttggatgaagcagctgtaactgccctagtgtagtttgaccaggacattgtcgtgctccttccaattgtgtaagattagttagcacatcatctcctactttagccatccggtgttggatttaagaggacggtgcttctttctattaaagtgctccatcccctaccatctacacattagcattgtctctagagctaagacagaaattaaccccgttcagtcacaaagcagggaatggttcatttactcttaatctttatgccctggagaagacctacttgaacagggcatattttttagacttctgaacatcagtatgttcgagggtactatgatattttggtttggaattgccctgcccaagtcactgtcttttaacttttaaactgaatattaaaatgtatctgtctttcctagtatgtttttatcttctcatgtattatccatggttttctctgtttgtgacagattagtaaaatttaatgagccctc

SEQ ID NO: 316461 - DNA, 684 bp, Homo sapiens
ggggaaggtctccggccccaggcgcggcgcgcggggcttctgcccagtttcctgcttctcagccgcggtgtctgccccggcccagagcagtctgtgcaatttagaaactcgataggaggcagcagctggtctcccaccaccctaaaaataatccgttccggcgcactgcgtgcttcgcctaggggaggaaaactgtcatcggagagttctgcgtccgggtttgaaatttacatcttaagacagtgtaggaagtcggtgttttgaaggtagctcaagtgcaccggcaggggtttgaagcagcgtgaagctattgcccaaggaaaagtattgtttgtgaccattgctaaatcaattatcaatgaaaggaaagaaagaaaagagtaaaccatataagaagaaatgagcctttcattttgtggtaacaacatttcttcatataatatcaacgatggtgtactacaaaattcctgctttgtggatgccctcaacctggtccctcatgtctttctgttgtttatcacttttccaatattgtttattgggtgggggagccaaagctcaaaagtacaaattcaccacaacacatggcttcattttccgggacataacctgagatggattcttacattcgctctcctgtttgtgcatgtctgtgaaatagcagaaggcattgtttcagactcg

SEQ ID NO: 316462 - DNA, 950 bp, Homo sapiens
cacctcagtgctgctcataattgcagaggatggcctcaccagtcagggggtcctggagggcctgggggggcttggtctctgactgccagcaaaagacgctggtcacatctaggcagcaggaggcaaacactgagtcagctgacttgcctgactttaaccctcaggttttttaaaaaaattaaaatacaggtgcaggggcttgggctcgggactcctggacccacgtggggctgagcgtggatggtgtttggtgtccggcttcactcccaaaccgcacccggagggtttgcggggcggaggggcctcagggcgacggttccagaacagacccaggctgctccggtcagcagcagccccgccgctctcccacctagcggggacccccagccccgccagccgcatcgctctgtccctctcatgtcaggcaagccagttccggaccgcgtggcaccaggagccgccaggagccggggcgacccagaggtctccagcgacctggcgtccggcgaggacacagcccccaggaggggttagaccacgggagccggagcccgagtcccagggccgccgagccagtttagagtggtctccaggccctagtgggaaggggctccgcgcttctgggcgtccacaggagctgcatggccctgcccgctgacgcccggtcgggacgctccacaccctgtgtgggggcggaggggacgcggtgggtgcggcctgggcgcgggtgggctagagcctggagaccgccgggagcccgacttcctggcgctttgccctttggggagcggagccaaggaacagcgccaacctctctccacaagccagggaccctacgacccaccgccgcaggtgagctccgcccgggcgccccctcccccaccacgcctggatccctgccgggctccccgagccgagactgtgccttctgcaacagggctgtgctccag

SEQ ID NO: 316463 - DNA, 945 bp, Homo sapiens
aatgtatgttcacaaatgagccacagccttatcagctggggttgagggaagactggtctaggtgctgctcctgaacttggtctctgagccatggcttcccatagacactcaggtccctccagctacaaggtgggcaccatggcggagaagtttgactgccactactgcagggatcccttgcaggggaagaagtatgtgcaaaaggatggccaccactgctgcctgaaatgctttgacaagttctgtgccaacacctgtgtggaatgccgcaagcccatcggtgcggactccaaggaggtgcactataagaaccgcttctggcatgacacctgcttccgctgtgccaagtgccttcaccccttggccaatgagacctttgtggccaaggacaacaagatcctgtgcaacaagtgcaccactcgggaggactcccccaagtgcaaggggtgcttcaaggccattgtggcaggtactgcctccttcccaccccgggttcccagggaggaggccctgagggcagacgtgatgtgggcttgcttatcatggtggggctaacgttgctctgagctgctttgagatcttagcatatatatgtacacatatacatacacgtatatatgcgtacacatatatgctcgcacacacgcacacactcggagactaaagaacactggcgagaacagcctgtggcaacagaatgaagtgaacagtatgtagcgctttctcatttgggcgtagtaagtgatgaaagcatgcttcttcctcagggtgtcattctgggccaggcagtccctgatttaatgtctaagtgcacgcagggtatagaggtgggggagtgggggattcaggcactggatcctaaaataataatgctggggtccccacccatgacagaaatcctgggttggcacaagcacaagtagaacacaggtaggttagttggag

SEQ ID NO: 316464 - DNA, 579 bp, Homo sapiens
atttcctttgtttggaggcttggttctgagtgagagttcaacagcctttgcccaggcggcttctcaaacacagggtgtggtttccttagctcactctctgctgtttggttgctcatggcaacaagatccaaataacttggacatgtgtttgtataaaaaaaacctgggaatggaacccaaagtgagactttggggctttcagttagtggaagagctgcggtgagtaccaggcaactgctcatttattttctctcattctttctctctaaattacgctggaagtttgctagcacaataaccatgtttgtggatagttttagaaagtagtctcaattcttgtatttcctgcacaaatgaaataattgctatctatttacccgtgcaaatttctttttcgggggagaggaacaaattagcatatgtttaaagaagttgaaagctaatagaaactcatatttggtaccttttgggtggcaggattctataggaaatgccttggcaaagggagctgcagagtgccttagtaatgcttgggattgcaggcgtgttgtctagggccacagccggggaggggaccag

SEQ ID NO: 316465 - DNA, 2490 bp, Homo sapiens
tgtgtgcctcccgcccgccggcgtcctgggtcccgggggagcggctgcccttctgccccgccgccgccgccgctcggggctggtccctgcggtcccggctgcctggccttccagggctgggtactgcggcttcggcggcctcgctgaggccgggggccaggggccgtcccgggctgcggggtgcgggacgagggactgcgagtgcgaggtcccccctggcaccttggaagttgttttcaaccatatccagcctttgccgaatacatcctatctgccacacatccagcgtgaggtccctccagctacaaggtgggcaccatggcggagaagtttgactgccactactgcagggatcccttgcaggggaagaagtatgtgcaaaaggatggccaccactgctgcctgaaatgctttgacaagttctgtgccaacacctgtgtggaatgccgcaagcccatcggtgcggactccaaggaggtgcactataagaaccgcttctggcatgacacctgcttccgctgtgccaagtgccttcaccccttggccaatgagacctttgtggccaaggacaacaagatcctgtgcaacaagtgcaccactcgggaggactcccccaagtgcaaggggtgcttcaaggccattgtggcaggagatcaaaacgtggagtacaaggggaccgtctggcacaaagactgcttcacctgtagtaactgcaagcaagtcatcgggactggaagcttcttccctaaaggggaggacttctactgcgtgacttgccatgagaccaagtttgccaagcattgcgtgaagtgcaacaaggccatcacatctggaggaatcacttaccaggatcagccctggcatgccgattgctttgtgtgtgttacctgctctaagaagctggctgggcagcgtttcaccgctgtggaggaccagtattactgcgtggattgctacaagaactttgtggccaagaagtgtgctggatgcaagaaccccatcactgggtttggtaaaggctccagtgtggtggcctatgaaggacaatcctggcacgactactgcttccactgcaaaaaatgctccgtgaatctggccaacaagcgctttgttttccaccaggagcaagtgtattgtcccgactgtgccaaaaagctgtaaactgacaggggctcctgtcctgtaaaatggcatttgaatctcgttctttgtgtccttactttctgccctataccatcaataggggaagagtggtccttcccttctttaaagttctccttccgtcttttctcccattttacagtattactcaaataagggcacacagtgatcatattagcatttagcaaaaagcaaccctgcagcaaagtgaatttctgtccggctgcaatttaaaaatgaaaacttaggtagattgactcttctgcatgtttctcatagagcagaaaagtgctaatcatttagccacttagtgatgtaagcaagaagcataggagataaaacccccactgagatgcctctcatgcctcagctgggacccaccgtgtagacacacgacatgcaagagttgcagcggctgctccaactcactgctcaccctcttctgtgagcaggaaaagaaccctactgacatgcatggtttaacttcctcatcagaactctgcccttccttctgttcttttgtgctttcaaataactaacacgaacttccagaaaattaacatttgaacttagctgtaattctaaactgacctttccccgtactaacgtttggtttccccgtgtggcatgttttctgagcgttcctactttaaagcatggaacatgcaggtgatttgggaagtgtagaaagacctgagaaaacgagcctgtttcagaggaacatcgtcacaacgaatacttctggaagcttaacaaaactaaccctgctgtcctttttattgtttttaattaatatttttgttttaattgatagcaaaatagtttatgggtttggaaacttgcatgaaaatattttagccccctcagatgttcctgcagtgctgaaattcatcctacagaagtaaccgcaaaactctagagggggagttgagcaggcgccagggctgtcatcaacatggatatgacatttcacaacagtgactagttgaatcccttgtaacgtagtagttgtctgctctttgtccatgtgttaatgaggactgcaaagtcccttctgttgtgattcctaggacttttcctcaagaggaaatctggatttccacctaccgcttacctgaaatgcaggatcacctacttactgtattctacattattatatgacatagtataatgagacaatatcaaaagtaaacatgtaatgacaatacatactaacattcttgtaggagtggttagagaagctgatgcctcatttctacattctgtcattagctattatcatctaacgtttcagtgtatccttacagaaataaagcagcatatgaataa

SEQ ID NO: 316466 - DNA, 2351 bp, Homo sapiens
agctcaggcagtctgactctggtgcccctgctgtgaagagctgtgccctgctgcattcctcctgtagctgcacgaaagggcaccttggaagttgttttcaaccatatccagcctttgccgaatacatcctatctgccacacatccagcgtgaggtccctccagctacaaggtgggcaccatggcggagaagtttgactgccactactgcagggatcccttgcaggggaagaagtatgtgcaaaaggatggccaccactgctgcctgaaatgctttgacaagttctgtgccaacacctgtgtggaatgccgcaagcccatcggtgcggactccaaggaggtgcactataagaaccgcttctggcatgacacctgcttccgctgtgccaagtgccttcaccccttggccaatgagacctttgtggccaaggacaacaagatcctgtgcaacaagtgcaccactcgggaggactcccccaagtgcaaggggtgcttcaaggccattgtggcaggagatcaaaacgtggagtacaaggggaccgtctggcacaaagactgcttcacctgtagtaactgcaagcaagtcatcgggactggaagcttcttccctaaaggggaggacttctactgcgtgacttgccatgagaccaagtttgccaagcattgcgtgaagtgcaacaaggccatcacatctggaggaatcacttaccaggatcagccctggcatgccgattgctttgtgtgtgttacctgctctaagaagctggctgggcagcgtttcaccgctgtggaggaccagtattactgcgtggattgctacaagaactttgtggccaagaagtgtgctggatgcaagaaccccatcactgggtttggtaaaggctccagtgtggtggcctatgaaggacaatcctggcacgactactgcttccactgcaaaaaatgctccgtgaatctggccaacaagcgctttgttttccaccaggagcaagtgtattgtcccgactgtgccaaaaagctgtaaactgacaggggctcctgtcctgtaaaatggcatttgaatctcgttctttgtgtccttactttctgccctataccatcaataggggaagagtggtccttcccttctttaaagttctccttccgtcttttctcccattttacagtattactcaaataagggcacacagtgatcatattagcatttagcaaaaagcaaccctgcagcaaagtgaatttctgtccggctgcaatttaaaaatgaaaacttaggtagattgactcttctgcatgtttctcatagagcagaaaagtgctaatcatttagccacttagtgatgtaagcaagaagcataggagataaaacccccactgagatgcctctcatgcctcagctgggacccaccgtgtagacacacgacatgcaagagttgcagcggctgctccaactcactgctcaccctcttctgtgagcaggaaaagaaccctactgacatgcatggtttaacttcctcatcagaactctgcccttccttctgttcttttgtgctttcaaataactaacacgaacttccagaaaattaacatttgaacttagctgtaattctaaactgacctttccccgtactaacgtttggtttccccgtgtggcatgttttctgagcgttcctactttaaagcatggaacatgcaggtgatttgggaagtgtagaaagacctgagaaaacgagcctgtttcagaggaacatcgtcacaacgaatacttctggaagcttaacaaaactaaccctgctgtcctttttattgtttttaattaatatttttgttttaattgatagcaaaatagtttatgggtttggaaacttgcatgaaaatattttagccccctcagatgttcctgcagtgctgaaattcatcctacagaagtaaccgcaaaactctagagggggagttgagcaggcgccagggctgtcatcaacatggatatgacatttcacaacagtgactagttgaatcccttgtaacgtagtagttgtctgctctttgtccatgtgttaatgaggactgcaaagtcccttctgttgtgattcctaggacttttcctcaagaggaaatctggatttccacctaccgcttacctgaaatgcaggatcacctacttactgtattctacattattatatgacatagtataatgagacaatatcaaaagtaaacatgtaatgacaatacatactaacattcttgtaggagtggttagagaagctgatgcctcatttctacattctgtcattagctattatcatctaacgtttcagtgtatccttacagaaataaagcagcatatgaataa

SEQ ID NO: 316467 - DNA, 2325 bp, Homo sapiens
cccctgctgtgaagagctgtgccctgctgcattcctcctgtagctgcacgaaagcaccttggaagttgttttcaaccatatccagcctttgccgaatacatcctatctgccacacatccagcgtgaggtccctccagctacaaggtgggcaccatggcggagaagtttgactgccactactgcagggatcccttgcaggggaagaagtatgtgcaaaaggatggccaccactgctgcctgaaatgctttgacaagttctgtgccaacacctgtgtggaatgccgcaagcccatcggtgcggactccaaggaggtgcactataagaaccgcttctggcatgacacctgcttccgctgtgccaagtgccttcaccccttggccaatgagacctttgtggccaaggacaacaagatcctgtgcaacaagtgcaccactcgggaggactcccccaagtgcaaggggtgcttcaaggccattgtggcaggagatcaaaacgtggagtacaaggggaccgtctggcacaaagactgcttcacctgtagtaactgcaagcaagtcatcgggactggaagcttcttccctaaaggggaggacttctactgcgtgacttgccatgagaccaagtttgccaagcattgcgtgaagtgcaacaaggccatcacatctggaggaatcacttaccaggatcagccctggcatgccgattgctttgtgtgtgttacctgctctaagaagctggctgggcagcgtttcaccgctgtggaggaccagtattactgcgtggattgctacaagaactttgtggccaagaagtgtgctggatgcaagaaccccatcactgggtttggtaaaggctccagtgtggtggcctatgaaggacaatcctggcacgactactgcttccactgcaaaaaatgctccgtgaatctggccaacaagcgctttgttttccaccaggagcaagtgtattgtcccgactgtgccaaaaagctgtaaactgacaggggctcctgtcctgtaaaatggcatttgaatctcgttctttgtgtccttactttctgccctataccatcaataggggaagagtggtccttcccttctttaaagttctccttccgtcttttctcccattttacagtattactcaaataagggcacacagtgatcatattagcatttagcaaaaagcaaccctgcagcaaagtgaatttctgtccggctgcaatttaaaaatgaaaacttaggtagattgactcttctgcatgtttctcatagagcagaaaagtgctaatcatttagccacttagtgatgtaagcaagaagcataggagataaaacccccactgagatgcctctcatgcctcagctgggacccaccgtgtagacacacgacatgcaagagttgcagcggctgctccaactcactgctcaccctcttctgtgagcaggaaaagaaccctactgacatgcatggtttaacttcctcatcagaactctgcccttccttctgttcttttgtgctttcaaataactaacacgaacttccagaaaattaacatttgaacttagctgtaattctaaactgacctttccccgtactaacgtttggtttccccgtgtggcatgttttctgagcgttcctactttaaagcatggaacatgcaggtgatttgggaagtgtagaaagacctgagaaaacgagcctgtttcagaggaacatcgtcacaacgaatacttctggaagcttaacaaaactaaccctgctgtcctttttattgtttttaattaatatttttgttttaattgatagcaaaatagtttatgggtttggaaacttgcatgaaaatattttagccccctcagatgttcctgcagtgctgaaattcatcctacagaagtaaccgcaaaactctagagggggagttgagcaggcgccagggctgtcatcaacatggatatgacatttcacaacagtgactagttgaatcccttgtaacgtagtagttgtctgctctttgtccatgtgttaatgaggactgcaaagtcccttctgttgtgattcctaggacttttcctcaagaggaaatctggatttccacctaccgcttacctgaaatgcaggatcacctacttactgtattctacattattatatgacatagtataatgagacaatatcaaaagtaaacatgtaatgacaatacatactaacattcttgtaggagtggttagagaagctgatgcctcatttctacattctgtcattagctattatcatctaacgtttcagtgtatccttacagaaataaagcagcatatgaataa

SEQ ID NO: 316468 - DNA, 2310 bp, Homo sapiens
aatgtatgttcacaaatgagccacagccttatcagctggggttgagggaagactggtctaggtgctgctcctgaacttggtctctgagccatggcttcccatagacactcaggtccctccagctacaaggtgggcaccatggcggagaagtttgactgccactactgcagggatcccttgcaggggaagaagtatgtgcaaaaggatggccaccactgctgcctgaaatgctttgacaagttctgtgccaacacctgtgtggaatgccgcaagcccatcggtgcggactccaaggaggtgcactataagaaccgcttctggcatgacacctgcttccgctgtgccaagtgccttcaccccttggccaatgagacctttgtggccaaggacaacaagatcctgtgcaacaagtgcaccactcgggaggactcccccaagtgcaaggggtgcttcaaggccattgtggcaggagatcaaaacgtggagtacaaggggaccgtctggcacaaagactgcttcacctgtagtaactgcaagcaagtcatcgggactggaagcttcttccctaaaggggaggacttctactgcgtgacttgccatgagaccaagtttgccaagcattgcgtgaagtgcaacaaggccatcacatctggaggaatcacttaccaggatcagccctggcatgccgattgctttgtgtgtgttacctgctctaagaagctggctgggcagcgtttcaccgctgtggaggaccagtattactgcgtggattgctacaagaactttgtggccaagaagtgtgctggatgcaagaaccccatcactgggtttggtaaaggctccagtgtggtggcctatgaaggacaatcctggcacgactactgcttccactgcaaaaaatgctccgtgaatctggccaacaagcgctttgttttccaccaggagcaagtgtattgtcccgactgtgccaaaaagctgtaaactgacaggggctcctgtcctgtaaaatggcatttgaatctcgttctttgtgtccttactttctgccctataccatcaataggggaagagtggtccttcccttctttaaagttctccttccgtcttttctcccattttacagtattactcaaataagggcacacagtgatcatattagcatttagcaaaaagcaaccctgcagcaaagtgaatttctgtccggctgcaatttaaaaatgaaaacttaggtagattgactcttctgcatgtttctcatagagcagaaaagtgctaatcatttagccacttagtgatgtaagcaagaagcataggagataaaacccccactgagatgcctctcatgcctcagctgggacccaccgtgtagacacacgacatgcaagagttgcagcggctgctccaactcactgctcaccctcttctgtgagcaggaaaagaaccctactgacatgcatggtttaacttcctcatcagaactctgcccttccttctgttcttttgtgctttcaaataactaacacgaacttccagaaaattaacatttgaacttagctgtaattctaaactgacctttccccgtactaacgtttggtttccccgtgtggcatgttttctgagcgttcctactttaaagcatggaacatgcaggtgatttgggaagtgtagaaagacctgagaaaacgagcctgtttcagaggaacatcgtcacaacgaatacttctggaagcttaacaaaactaaccctgctgtcctttttattgtttttaattaatatttttgttttaattgatagcaaaatagtttatgggtttggaaacttgcatgaaaatattttagccccctcagatgttcctgcagtgctgaaattcatcctacagaagtaaccgcaaaactctagagggggagttgagcaggcgccagggctgtcatcaacatggatatgacatttcacaacagtgactagttgaatcccttgtaacgtagtagttgtctgctctttgtccatgtgttaatgaggactgcaaagtcccttctgttgtgattcctaggacttttcctcaagaggaaatctggatttccacctaccgcttacctgaaatgcaggatcacctacttactgtattctacattattatatgacatagtataatgagacaatatcaaaagtaaacatgtaatgacaatacatactaacattcttgtaggagtggttagagaagctgatgcctcatttctacattctgtcattagctattatcatctaacgtttcagtgtatccttacagaaataaagcagcatatgaataa

SEQ ID NO: 316469 - DNA, 2603 bp, Homo sapiens
cgcgccctacatccaccgcccggcggagggggctcagtccgcagccgccgccgccaccgccgcgcctcggcctcggtgcaggcagcggccgccgccgccgagacagctgcgcgggcgagcatccccacgcagcaccttggaagttgttttcaaccatatccagcctttgccgaatacatcctatctgccacacatccagcgtgaggtccctccagctacaaggtgggcaccatggcggagaagtttgactgccactactgcagggatcccttgcaggggaagaagtatgtgcaaaaggatggccaccactgctgcctgaaatgctttgacaagttctgtgccaacacctgtgtggaatgccgcaagcccatcggtgcggactccaaggaggtgcactataagaaccgcttctggcatgacacctgcttccgctgtgccaagtgccttcaccccttggccaatgagacctttgtggccaaggacaacaagatcctgtgcaacaagtgcaccactcgggaggactcccccaagtgcaaggggtgcttcaaggccattgtggcaggagatcaaaacgtggagtacaaggggaccgtctggcacaaagactgcttcacctgtagtaactgcaagcaagtcatcgggactggaagcttcttccctaaaggggaggacttctactgcgtgacttgccatgagaccaagtttgccaagcattgcgtgaagtgcaacaaggccatcacatctggaggaatcacttaccaggatcagccctggcatgccgattgctttgtgtgtgttacctgctctaagaagctggctgggcagcgtttcaccgctgtggaggaccagtattactgcgtggattgctacaagaactttgtggccaagaagtgtgctggatgcaagaaccccatcactgggaaaaggactgtgtcaagagtgagccacccagtctctaaagctaggaagcccccagtgtgccacgggaaacgcttgcctctcaccctgtttcccagcgccaacctccggggcaggcatccgggtggagagaggacttgtccctcgtgggtggtggttctttatagaaaaaatcgaagcttagcagctcctcgaggcccgggtttggtaaaggctccagtgtggtggcctatgaaggacaatcctggcacgactactgcttccactgcaaaaaatgctccgtgaatctggccaacaagcgctttgttttccaccaggagcaagtgtattgtcccgactgtgccaaaaagctgtaaactgacaggggctcctgtcctgtaaaatggcatttgaatctcgttctttgtgtccttactttctgccctataccatcaataggggaagagtggtccttcccttctttaaagttctccttccgtcttttctcccattttacagtattactcaaataagggcacacagtgatcatattagcatttagcaaaaagcaaccctgcagcaaagtgaatttctgtccggctgcaatttaaaaatgaaaacttaggtagattgactcttctgcatgtttctcatagagcagaaaagtgctaatcatttagccacttagtgatgtaagcaagaagcataggagataaaacccccactgagatgcctctcatgcctcagctgggacccaccgtgtagacacacgacatgcaagagttgcagcggctgctccaactcactgctcaccctcttctgtgagcaggaaaagaaccctactgacatgcatggtttaacttcctcatcagaactctgcccttccttctgttcttttgtgctttcaaataactaacacgaacttccagaaaattaacatttgaacttagctgtaattctaaactgacctttccccgtactaacgtttggtttccccgtgtggcatgttttctgagcgttcctactttaaagcatggaacatgcaggtgatttgggaagtgtagaaagacctgagaaaacgagcctgtttcagaggaacatcgtcacaacgaatacttctggaagcttaacaaaactaaccctgctgtcctttttattgtttttaattaatatttttgttttaattgatagcaaaatagtttatgggtttggaaacttgcatgaaaatattttagccccctcagatgttcctgcagtgctgaaattcatcctacagaagtaaccgcaaaactctagagggggagttgagcaggcgccagggctgtcatcaacatggatatgacatttcacaacagtgactagttgaatcccttgtaacgtagtagttgtctgctctttgtccatgtgttaatgaggactgcaaagtcccttctgttgtgattcctaggacttttcctcaagaggaaatctggatttccacctaccgcttacctgaaatgcaggatcacctacttactgtattctacattattatatgacatagtataatgagacaatatcaaaagtaaacatgtaatgacaatacatactaacattcttgtaggagtggttagagaagctgatgcctcatttctacattctgtcattagctattatcatctaacgtttcagtgtatccttacagaaataaagcagcatatgaataa

SEQ ID NO: 316470 - DNA, 2126 bp, Homo sapiens
aatgtatgttcacaaatgagccacagccttatcagctggggttgagggaagactggtctaggtgctgctcctgaacttggtctctgagccatggcttcccatagacactcaggtccctccagctacaaggtgggcaccatggcggagaagtttgactgccactactgcagggacccttggccaatgagacctttgtggccaaggacaacaagatcctgtgcaacaagtgcaccactcgggaggactcccccaagtgcaaggggtgcttcaaggccattgtggcaggagatcaaaacgtggagtacaaggggaccgtctggcacaaagactgcttcacctgtagtaactgcaagcaagtcatcgggactggaagcttcttccctaaaggggaggacttctactgcgtgacttgccatgagaccaagtttgccaagcattgcgtgaagtgcaacaaggccatcacatctggaggaatcacttaccaggatcagccctggcatgccgattgctttgtgtgtgttacctgctctaagaagctggctgggcagcgtttcaccgctgtggaggaccagtattactgcgtggattgctacaagaactttgtggccaagaagtgtgctggatgcaagaaccccatcactgggtttggtaaaggctccagtgtggtggcctatgaaggacaatcctggcacgactactgcttccactgcaaaaaatgctccgtgaatctggccaacaagcgctttgttttccaccaggagcaagtgtattgtcccgactgtgccaaaaagctgtaaactgacaggggctcctgtcctgtaaaatggcatttgaatctcgttctttgtgtccttactttctgccctataccatcaataggggaagagtggtccttcccttctttaaagttctccttccgtcttttctcccattttacagtattactcaaataagggcacacagtgatcatattagcatttagcaaaaagcaaccctgcagcaaagtgaatttctgtccggctgcaatttaaaaatgaaaacttaggtagattgactcttctgcatgtttctcatagagcagaaaagtgctaatcatttagccacttagtgatgtaagcaagaagcataggagataaaacccccactgagatgcctctcatgcctcagctgggacccaccgtgtagacacacgacatgcaagagttgcagcggctgctccaactcactgctcaccctcttctgtgagcaggaaaagaaccctactgacatgcatggtttaacttcctcatcagaactctgcccttccttctgttcttttgtgctttcaaataactaacacgaacttccagaaaattaacatttgaacttagctgtaattctaaactgacctttccccgtactaacgtttggtttccccgtgtggcatgttttctgagcgttcctactttaaagcatggaacatgcaggtgatttgggaagtgtagaaagacctgagaaaacgagcctgtttcagaggaacatcgtcacaacgaatacttctggaagcttaacaaaactaaccctgctgtcctttttattgtttttaattaatatttttgttttaattgatagcaaaatagtttatgggtttggaaacttgcatgaaaatattttagccccctcagatgttcctgcagtgctgaaattcatcctacagaagtaaccgcaaaactctagagggggagttgagcaggcgccagggctgtcatcaacatggatatgacatttcacaacagtgactagttgaatcccttgtaacgtagtagttgtctgctctttgtccatgtgttaatgaggactgcaaagtcccttctgttgtgattcctaggacttttcctcaagaggaaatctggatttccacctaccgcttacctgaaatgcaggatcacctacttactgtattctacattattatatgacatagtataatgagacaatatcaaaagtaaacatgtaatgacaatacatactaacattcttgtaggagtggttagagaagctgatgcctcatttctacattctgtcattagctattatcatctaacgtttcagtgtatccttacagaaataaagcagcatatgaataa

SEQ ID NO: 316471 - DNA, 3205 bp, Homo sapiens
cgcgccctacatccaccgcccggcggagggggctcagtccgcagccgccgccgccaccgccgcgcctcggcctcggtgcaggcagcggccgccgccgccgagacagctgcgcgggcgagcatccccacgcagcaccttggaagttgttttcaaccatatccagcctttgccgaatacatcctatctgccacacatccagcgtgaggtccctccagctacaaggtgggcaccatggcggagaagtttgactgccactactgcagggatcccttgcaggggaagaagtatgtgcaaaaggatggccaccactgctgcctgaaatgctttgacaagttctgtgccaacacctgtgtggaatgccgcaagcccatcggtgcggactccaaggaggtgcactataagaaccgcttctggcatgacacctgcttccgctgtgccaagtgccttcaccccttggccaatgagacctttgtggccaaggacaacaagatcctgtgcaacaagtgcaccactcgggaggactcccccaagtgcaaggggtgcttcaaggccattgtggcaggagatcaaaacgtggagtacaaggggaccgtctggcacaaagactgcttcacctgtagtaactgcaagcaagtcatcgggactggaagcttcttccctaaaggggaggacttctactgcgtgacttgccatgagaccaagtttgccaagcattgcgtgaagtgcaacaaggccatcacatctggaggaatcacttaccaggatcagccctggcatgccgattgctttgtgtgtgttacctgctctaagaagctggctgggcagcgtttcaccgctgtggaggaccagtattactgcgtggattgctacaagaactttgtggccaagaagtgtgctggatgcaagaaccccatcactgggtaggctaaagagtccttgctaagtctgccaggctaggttttgcgcatggtaaccatctctcattttcctgtcgtcggtttcatccacaaaggcccccagagaatgcccttctccccctgctattgtggtcccaaaggccccccaagagtttggattcgtccccaggccaggttagcctttgcaatacagaacacttcctgactgttgactaacaatgctgagagttcacaagcctgagacctgccagccaacaccggcaggcactgccactttgcagggggattctggggggaggggtgggaggagggtagaaagaagggggtgggggagggtggggaaggggtaagggaggccgaagagtgataacccgggattgtaataccccatagctgaaggctagttcagagatgcctgttggcagggtttcttttttttttggtttgctgtttatttgtttttgcgatcagcaaagctaatcacttcattcctcatctcgcggccgcgatccacgtgccctgggccctttcccttgcctccaattttcccatcttcccggggagccttgaaatgtacatttgagaagacttttgccatcctcagggaaaaggactgtgtcaagagtgagccacccagtctctaaagctaggaagcccccagtgtgccacgggaaacgcttgcctctcaccctgtttcccagcgccaacctccggggcaggcatccgggtggagagaggacttgtccctcgtgggtggtggttctttatagaaaaaatcgaagcttagcagctcctcgaggcccgggtttggtaaaggctccagtgtggtggcctatgaaggacaatcctggcacgactactgcttccactgcaaaaaatgctccgtgaatctggccaacaagcgctttgttttccaccaggagcaagtgtattgtcccgactgtgccaaaaagctgtaaactgacaggggctcctgtcctgtaaaatggcatttgaatctcgttctttgtgtccttactttctgccctataccatcaataggggaagagtggtccttcccttctttaaagttctccttccgtcttttctcccattttacagtattactcaaataagggcacacagtgatcatattagcatttagcaaaaagcaaccctgcagcaaagtgaatttctgtccggctgcaatttaaaaatgaaaacttaggtagattgactcttctgcatgtttctcatagagcagaaaagtgctaatcatttagccacttagtgatgtaagcaagaagcataggagataaaacccccactgagatgcctctcatgcctcagctgggacccaccgtgtagacacacgacatgcaagagttgcagcggctgctccaactcactgctcaccctcttctgtgagcaggaaaagaaccctactgacatgcatggtttaacttcctcatcagaactctgcccttccttctgttcttttgtgctttcaaataactaacacgaacttccagaaaattaacatttgaacttagctgtaattctaaactgacctttccccgtactaacgtttggtttccccgtgtggcatgttttctgagcgttcctactttaaagcatggaacatgcaggtgatttgggaagtgtagaaagacctgagaaaacgagcctgtttcagaggaacatcgtcacaacgaatacttctggaagcttaacaaaactaaccctgctgtcctttttattgtttttaattaatatttttgttttaattgatagcaaaatagtttatgggtttggaaacttgcatgaaaatattttagccccctcagatgttcctgcagtgctgaaattcatcctacagaagtaaccgcaaaactctagagggggagttgagcaggcgccagggctgtcatcaacatggatatgacatttcacaacagtgactagttgaatcccttgtaacgtagtagttgtctgctctttgtccatgtgttaatgaggactgcaaagtcccttctgttgtgattcctaggacttttcctcaagaggaaatctggatttccacctaccgcttacctgaaatgcaggatcacctacttactgtattctacattattatatgacatagtataatgagacaatatcaaaagtaaacatgtaatgacaatacatactaacattcttgtaggagtggttagagaagctgatgcctcatttctacattctgtcattagctattatcatctaacgtttcagtgtatccttacagaaataaagcagcatatgaataa

SEQ ID NO: 316472 - DNA, 2216 bp, Homo sapiens
cgcgccctacatccaccgcccggcggagggggctcagtccgcagccgccgccgccaccgccgcgcctcggcctcggtgcaggcagcggccgccgccgccgagacagctgcgcgggcgagcatccccacgcagcaccttggaagttgttttcaaccatatccagcctttgccgaatacatcctatctgccacacatccagcgtgaggtccctccagctacaaggtgggcaccatggcggagaagtttgactgccactactgcagggatcccttgcaggggaagaagtatgtgcaaaaggatggccaccactgctgcctgaaatgctttgacaagttctgtgccaacacctgtgtggaatgccgcaagcccatcggtgcggactccaaggaggtgcactataagaaccgcttctggcatgacacctgcttccgctgtgccaagtgccttcaccccttggccaatgagacctttgtggccaaggacaacaagatcctgtgcaacaagtgcaccactcgggaggactcccccaagtgcaaggggtgcttcaaggccattgtggcaggagatcaaaacgtggagtacaaggggaccgtctggcacaaagactgcttcacctgtagtaactgcaagcaagtcatcgggactggaagcttcttccctaaaggggaggacttctactgcgtgacttgccatgagaccaagtttgccaagcattgcgtgaagtgcaacaagggtttggtaaaggctccagtgtggtggcctatgaaggacaatcctggcacgactactgcttccactgcaaaaaatgctccgtgaatctggccaacaagcgctttgttttccaccaggagcaagtgtattgtcccgactgtgccaaaaagctgtaaactgacaggggctcctgtcctgtaaaatggcatttgaatctcgttctttgtgtccttactttctgccctataccatcaataggggaagagtggtccttcccttctttaaagttctccttccgtcttttctcccattttacagtattactcaaataagggcacacagtgatcatattagcatttagcaaaaagcaaccctgcagcaaagtgaatttctgtccggctgcaatttaaaaatgaaaacttaggtagattgactcttctgcatgtttctcatagagcagaaaagtgctaatcatttagccacttagtgatgtaagcaagaagcataggagataaaacccccactgagatgcctctcatgcctcagctgggacccaccgtgtagacacacgacatgcaagagttgcagcggctgctccaactcactgctcaccctcttctgtgagcaggaaaagaaccctactgacatgcatggtttaacttcctcatcagaactctgcccttccttctgttcttttgtgctttcaaataactaacacgaacttccagaaaattaacatttgaacttagctgtaattctaaactgacctttccccgtactaacgtttggtttccccgtgtggcatgttttctgagcgttcctactttaaagcatggaacatgcaggtgatttgggaagtgtagaaagacctgagaaaacgagcctgtttcagaggaacatcgtcacaacgaatacttctggaagcttaacaaaactaaccctgctgtcctttttattgtttttaattaatatttttgttttaattgatagcaaaatagtttatgggtttggaaacttgcatgaaaatattttagccccctcagatgttcctgcagtgctgaaattcatcctacagaagtaaccgcaaaactctagagggggagttgagcaggcgccagggctgtcatcaacatggatatgacatttcacaacagtgactagttgaatcccttgtaacgtagtagttgtctgctctttgtccatgtgttaatgaggactgcaaagtcccttctgttgtgattcctaggacttttcctcaagaggaaatctggatttccacctaccgcttacctgaaatgcaggatcacctacttactgtattctacattattatatgacatagtataatgagacaatatcaaaagtaaacatgtaatgacaatacatactaacattcttgtaggagtggttagagaagctgatgcctcatttctacattctgtcattagctattatcatctaacgtttcagtgtatccttacagaaataaagcagcatatgaataa

SEQ ID NO: 316473 - DNA, 1567 bp, Homo sapiens
cgatcagaggatcccgacggcttcaacgggctacaagaactttgtggccaagaagtgtgctggatgcaagaaccccatcactgggtttggtaaaggctccagtgtggtggcctatgaaggacaatcctggcacgactactgcttccactgcaaaaaatgctccgtgaatctggccaacaagcgctttgttttccaccaggagcaagtgtattgtcccgactgtgccaaaaagctgtaaactgacaggggctcctgtcctgtaaaatggcatttgaatctcgttctttgtgtccttactttctgccctataccatcaataggggaagagtggtccttcccttctttaaagttctccttccgtcttttctcccattttacagtattactcaaataagggcacacagtgatcatattagcatttagcaaaaagcaaccctgcagcaaagtgaatttctgtccggctgcaatttaaaaatgaaaacttaggtagattgactcttctgcatgtttctcatagagcagaaaagtgctaatcatttagccacttagtgatgtaagcaagaagcataggagataaaacccccactgagatgcctctcatgcctcagctgggacccaccgtgtagacacacgacatgcaagagttgcagcggctgctccaactcactgctcaccctcttctgtgagcaggaaaagaaccctactgacatgcatggtttaacttcctcatcagaactctgcccttccttctgttcttttgtgctttcaaataactaacacgaacttccagaaaattaacatttgaacttagctgtaattctaaactgacctttccccgtactaacgtttggtttccccgtgtggcatgttttctgagcgttcctactttaaagcatggaacatgcaggtgatttgggaagtgtagaaagacctgagaaaacgagcctgtttcagaggaacatcgtcacaacgaatacttctggaagcttaacaaaactaaccctgctgtcctttttattgtttttaattaatatttttgttttaattgatagcaaaatagtttatgggtttggaaacttgcatgaaaatattttagccccctcagatgttcctgcagtgctgaaattcatcctacagaagtaaccgcaaaactctagagggggagttgagcaggcgccagggctgtcatcaacatggatatgacatttcacaacagtgactagttgaatcccttgtaacgtagtagttgtctgctctttgtccatgtgttaatgaggactgcaaagtcccttctgttgtgattcctaggacttttcctcaagaggaaatctggatttccacctaccgcttacctgaaatgcaggatcacctacttactgtattctacattattatatgacatagtataatgagacaatatcaaaagtaaacatgtaatgacaatacatactaacattcttgtaggagtggttagagaagctgatgcctcatttctacattctgtcattagctattatcatctaacgtttcagtgtatccttacagaaataaagcagcatatgaataa

SEQ ID NO: 316474 - DNA, 1583 bp, Homo sapiens
gcaggtcgtcattttatctctctgaatcgtggtttcctcacctgtattcattcagctgtttctcttgttttcttttcttttctttttttttccccccagggtttggtaaaggctccagtgtggtggcctatgaaggacaatcctggcacgactactgcttccactgcaaaaaatgctccgtgaatctggccaacaagcgctttgttttccaccaggagcaagtgtattgtcccgactgtgccaaaaagctgtaaactgacaggggctcctgtcctgtaaaatggcatttgaatctcgttctttgtgtccttactttctgccctataccatcaataggggaagagtggtccttcccttctttaaagttctccttccgtcttttctcccattttacagtattactcaaataagggcacacagtgatcatattagcatttagcaaaaagcaaccctgcagcaaagtgaatttctgtccggctgcaatttaaaaatgaaaacttaggtagattgactcttctgcatgtttctcatagagcagaaaagtgctaatcatttagccacttagtgatgtaagcaagaagcataggagataaaacccccactgagatgcctctcatgcctcagctgggacccaccgtgtagacacacgacatgcaagagttgcagcggctgctccaactcactgctcaccctcttctgtgagcaggaaaagaaccctactgacatgcatggtttaacttcctcatcagaactctgcccttccttctgttcttttgtgctttcaaataactaacacgaacttccagaaaattaacatttgaacttagctgtaattctaaactgacctttccccgtactaacgtttggtttccccgtgtggcatgttttctgagcgttcctactttaaagcatggaacatgcaggtgatttgggaagtgtagaaagacctgagaaaacgagcctgtttcagaggaacatcgtcacaacgaatacttctggaagcttaacaaaactaaccctgctgtcctttttattgtttttaattaatatttttgttttaattgatagcaaaatagtttatgggtttggaaacttgcatgaaaatattttagccccctcagatgttcctgcagtgctgaaattcatcctacagaagtaaccgcaaaactctagagggggagttgagcaggcgccagggctgtcatcaacatggatatgacatttcacaacagtgactagttgaatcccttgtaacgtagtagttgtctgctctttgtccatgtgttaatgaggactgcaaagtcccttctgttgtgattcctaggacttttcctcaagaggaaatctggatttccacctaccgcttacctgaaatgcaggatcacctacttactgtattctacattattatatgacatagtataatgagacaatatcaaaagtaaacatgtaatgacaatacatactaacattcttgtaggagtggttagagaagctgatgcctcatttctacattctgtcattagctattatcatctaacgtttcagtgtatccttacagaaataaagcagcatatgaataa

SEQ ID NO: 316475 - DNA, 2221 bp, Homo sapiens
cgcgccctacatccaccgcccggcggagggggctcagtccgcagccgccgccgccaccgccgcgcctcggcctcggtgcaggcagcggccgccgccgccgagacagctgcgcgggcgagcatccccacgcagcaccttggaagttgttttcaaccatatccagcctttgccgaatacatcctatctgccacacatccagcgtgaggtccctccagctacaaggtgggcaccatggcggagaagtttgactgccactactgcagggatcccttgcaggggaagaagtatgtgcaaaaggatggccaccactgctgcctgaaatgctttgacaagttctgtgccaacacctgtgtggaatgccgcaagcccatcggtgcggactccaaggaggtgcactataagaaccgcttctggcatgacacctgcttccgctgtgccaagtgccttcaccccttggccaatgagacctttgtggccaaggacaacaagatcctgtgcaacaagtgcaccactcgggaggactcccccaagtgcaaggggtgcttcaaggccattgtggcaggagatcaaaacgtggagtacaaggggaccgtctggcacaaagactgcttcacctgtagtaactgcaagcaagtcatcgggactggaagcttcttccctaaaggggaggacttctactgcgtgacttgccatgagaccaagtttgccaagcattgcgtgaagtgcaacaaggccatcacatctggaggaatcacttaccaggatcagccctggcatgccgattgctttgtgtgtgttacctgctctaagaagctggctgggcagcgtttcaccgctgtggaggaccagtattactgcgtggattgctacaagaactttgtggccaagaagtgtgctggatgcaagaaccccatcactgggtttggtaaaggctccagtgtggtggcctatgaaggacaatcctggcacgactactgcttccactgcaaaaaatgctccgtgaatctggccaacaagcgctttgttttccaccaggagcaagtgtattgtcccgactgtgccaaaaagctgtaaactgacaggggctcctgtcctgtaaaatggcatttgaatctcgttctttgtgtccttactttctgccctataccatcaataggggaagagtggtccttcccttctttaaagttctccttccgtcttttctcccattttacagtattactcaaataagggcacacagtgatcatattagcatttagcaaaaagcaaccctgcagcaaagtgaatttctgtccggctgcaatttaaaaatgaaaacttaggtagattgactcttctgcatgtttctcatagagcagaaaagtgctaatcatttagccacttagtgatgtaagcaagaagcataggagataaaacccccactgagatgcctctcatgcctcagctgggacccaccgtgtagacacacgacatgcaagagttgcagcggctgctccaactcactgctcaccctcttctgtgagcaggaaaagaaccctactgacatgcatggtttaacttcctcatcagaactctgcccttccttctgttcttttgtgctttcaaataactaacacgaacttccagaaaattaacatttgaacttagctgtaattctaaatgtcctttttattgtttttaattaatatttttgttttaattgatagcaaaatagtttatgggtttggaaacttgcatgaaaatattttagccccctcagatgttcctgcagtgctgaaattcatcctacagaagtaaccgcaaaactctagagggggagttgagcaggcgccagggctgtcatcaacatggatatgacatttcacaacagtgactagttgaatcccttgtaacgtagtagttgtctgctctttgtccatgtgttaatgaggactgcaaagtcccttctgttgtgattcctaggacttttcctcaagaggaaatctggatttccacctaccgcttacctgaaatgcaggatcacctacttactgtattctacattattatatgacatagtataatgagacaatatcaaaagtaaacatgtaatgacaatacatactaacattcttgtaggagtggttagagaagctgatgcctcatttctacattctgtcattagctattatcatctaacgtttcagtgtatccttacagaaataaagcagcatatgaataa

SEQ ID NO: 316476 - DNA, 1406 bp, Homo sapiens
  misc_feature (15)..(15): n is a, c, g, or t
  misc_feature (35)..(35): n is a, c, g, or t
  misc_feature (62)..(62): n is a, c, g, or t
gcctttgctgaaatnctggggactcctcatatggncaagatcctatttcaggcatgacctancttatgacagttcaaactgacaggggctcctgtcctgtaaaatggcatttgaatctcgttctttgtgtccttactttctgccctataccatcaataggggaagagtggtccttcccttctttaaagttctccttccgtcttttctcccattttacagtattactcaaataagggcacacagtgatcatattagcatttagcaaaaagcaaccctgcagcaaagtgaatttctgtccggctgcaatttaaaaatgaaaacttaggtagattgactcttctgcatgtttctcatagagcagaaaagtgctaatcatttagccacttagtgatgtaagcaagaagcataggagataaaacccccactgagatgcctctcatgcctcagctgggacccaccgtgtagacacacgacatgcaagagttgcagcggctgctccaactcactgctcaccctcttctgtgagcaggaaaagaaccctactgacatgcatggtttaacttcctcatcagaactctgcccttccttctgttcttttgtgctttcaaataactaacacgaacttccagaaaattaacatttgaacttagctgtaattctaaactgacctttccccgtactaacgtttggtttccccgtgtggcatgttttctgagcgttcctactttaaagcatggaacatgcaggtgatttgggaagtgtagaaagacctgagaaaacgagcctgtttcagaggaacatcgtcacaacgaatacttctggaagcttaacaaaactaaccctgctgtcctttttattgtttttaattaatatttttgttttaattgatagcaaaatagtttatgggtttggaaacttgcatgaaaatattttagccccctcagatgttcctgcagtgctgaaattcatcctacagaagtaaccgcaaaactctagagggggagttgagcaggcgccagggctgtcatcaacatggatatgacatttcacaacagtgactagttgaatcccttgtaacgtagtagttgtctgctctttgtccatgtgttaatgaggactgcaaagtcccttctgttgtgattcctaggacttttcctcaagaggaaatctggatttccacctaccgcttacctgaaatgcaggatcacctacttactgtattctacattattatatgacatagtataatgagacaatatcaaaagtaaacatgtaatgacaatacatactaacattcttgtaggagtggttagagaagctgatgcctcatttctacattctgtcattagctattatcatctaacgtttcagtgtatccttacagaaataaagcagcatatgaataa

SEQ ID NO: 316477 - DNA, 1200 bp, Homo sapiens
ccatactccgttcaacatctcatccctccttccaacatctcatctctccttccaacatctcatctctccctccaacatctcatcgctttccaacatctcatctccttccaacatctcatctccttccaacatctcatggcaccttccaacatctcatactccttccaacatctcatcgccttccaacatctcatctccttccaacatctcatcactccttccaacatctcatccctccttccaacatctcatgaccccttccaacatctcatccctgttgcagcggctgctccaactcactgctcaccctcttctgtgagcaggaaaagaaccctactgacatgcatggtttaacttcctcatcagaactctgcccttccttctgttcttttgtgctttcaaataactaacacgaacttccagaaaattaacatttgaacttagctgtaattctaaactgacctttccccgtactaacgtttggtttccccgtgtggcatgttttctgagcgttcctactttaaagcatggaacatgcaggtgatttgggaagtgtagaaagacctgagaaaacgagcctgtttcagaggaacatcgtcacaacgaatacttctggaagcttaacaaaactaaccctgctgtcctttttattgtttttaattaatatttttgttttaattgatagcaaaatagtttatgggtttggaaacttgcatgaaaatattttagccccctcagatgttcctgcagtgctgaaattcatcctacagaagtaaccgcaaaactctagagggggagttgagcaggcgccagggctgtcatcaacatggatatgacatttcacaacagtgactagttgaatcccttgtaacgtagtagttgtctgctctttgtccatgtgttaatgaggactgcaaagtcccttctgttgtgattcctaggacttttcctcaagaggaaatctggatttccacctaccgcttacctgaaatgcaggatcacctacttactgtattctacattattatatgacatagtataatgagacaatatcaaaagtaaacatgtaatgacaatacatactaacattcttgtaggagtggttagagaagctgatgcctcatttctacattctgtcattagctattatcatctaacgtttcagtgtatccttacagaaataaagcagcatatgaataa

SEQ ID NO: 316478 - DNA, 1764 bp, Homo sapiens
  misc_feature (1638)..(1638): n is a, c, g, or t
  misc_feature (1668)..(1668): n is a, c, g, or t
  misc_feature (1731)..(1731): n is a, c, g, or t
cgcgccctacatccaccgcccggcggagggggctcagtccgcagccgccgccgccaccgccgcgcctcggcctcggtgcaggcagcggccgccgccgccgagacagctgcgcgggcgagcatccccacgcagcaccttggaagttgttttcaaccatatccagcctttgccgaatacatcctatctgccacacatccagcgtgaggtccctccagctacaaggtgggcaccatggcggagaagtttgactgccactactgcagggatcccttgcaggggaagaagtatgtgcaaaaggatggccaccactgctgcctgaaatgctttgacaagttctgtgccaacacctgtgtggaatgccgcaagcccatcggtgcggactccaaggaggtgcactataagaaccgcttctggcatgacacctgcttccgctgtgccaagtgccttcaccccttggccaatgagacctttgtggccaaggacaacaagatcctgtgcaacaagtgcaccactcgggaggactcccccaagtgcaaggggtgcttcaaggccattgtggcaggagatcaaaacgtggagtacaaggggaccgtctggcacaaagactgcttcacctgtagtaactgcaagcaagtcatcgggactggaagcttcttccctaaaggggaggacttctactgcgtgacttgccatgagaccaagtttgccaagcattgcgtgaagtgcaacaaggccatcacatctggaggaatcacttaccaggatcagccctggcatgccgattgctttgtgtgtgttacctgctctaagaagctggctgggcagcgtttcaccgctgtggaggaccagtattactgcgtggattgctacaagaactttgtggccaagaagtgtgctggatgcaagaaccccatcactgggtttggtaaaggctccagtgtggtggcctatgaaggacaatcctggcacgactactgcttccactgcaaaaaatgctccgtgaatctggccaacaagcgctttgttttccaccaggagcaagtgtattgtcccgactgtgccaaaaagctgtaaactgacaggggctcctgtcctgtaaaatggcatttgaatctcgttctttgtgtccttactttctgccctataccatcaataggggaagagtggtccttcccttctttaaagttctccttccgtcttttctcccattttacagtattactcaaataagggcacacagtgatcatattagcatttagcaaaaagcaaccctgcagcaaagtgaatttctgtccggctgcaatttaaaaatgaaaacttaggtagattgactcttctgcatgtttctcatagagcagaaaagtgctaatcatttagccacttagtgatgtaagcaagaagcataggagataaaacccccactgagatgcctctcatgcctcagctgggacccaccgtgtagacacacgacatgcaagagttgcagcggctgctccaactcactgctcaccctcttctgtgagcaggaaaagaaccctactgacatgcatggtttaacttcctcatcagaatcactatcctcctcctgttccatttggttatccaaatcagggaagaaaaaataaaccatatcgcccnattccagtgacatgggtacctcctcctggnatgcattgtgaccggaatcactggattaatcctcacatgtagcacctcactaacttcgttttngattgtgttggtgtcatcttgagaaaagtagaa

SEQ ID NO: 316479 - DNA, 1460 bp, Homo sapiens
cgcgccctacatccaccgcccggcggagggggctcagtccgcagccgccgccgccaccgccgcgcctcggcctcggtgcaggcagcggccgccgccgccgagacagctgcgcgggcgagcatccccacgcagcaccttggaagttgttttcaaccatatccagcctttgccgaatacatcctatctgccacacatccagcgtgaggtccctccagctacaaggtgggcaccatggcggagaagtttgactgccactactgcagggatcccttgcaggggaagaagtatgtgcaaaaggatggccaccactgctgcctgaaatgctttgacaagttctgtgccaacacctgtgtggaatgccgcaagcccatcggtgcggactccaaggaggtgcactataagaaccgcttctggcatgacacctgcttccgctgtgccaagtgccttcaccccttggccaatgagacctttgtggccaaggacaacaagatcctgtgcaacaagtgcaccactcgggaggactcccccaagtgcaaggggtgcttcaaggccattgtggcaggagatcaaaacgtggagtacaaggggaccgtctggcacaaagactgcttcacctgtagtaactgcaagcaagtcatcgggactggaagcttcttccctaaaggggaggacttctactgcgtgacttgccatgagaccaagtttgccaagcattgcgtgaagtgcaacaaggccatcacatctggaggaatcacttaccaggatcagccctggcatgccgattgctttgtgtgtgttacctgctctaagaagctggctgggcagcgtttcaccgctgtggaggaccagtattactgcgtggattgctacaagaactttgtggccaagaagtgtgctggatgcaagaaccccatcactgggtttggtaaaggctccagtgtggtggcctatgaaggacaatcctggcacgactactgcttccactgcaaaaaatgctccgtgaatctggccaacaagcgctttgttttccaccaggagcaagtgtattgtcccgactgtgccaaaaagctgtaaactgacaggggctcctgtcctgtaaaatggcatttgaatctcgttctttgtgtccttactttctgccctataccatcaataggggaagagtggtccttcccttctttaaagttctccttccgtcttttctcccattttacagtattactcaaataagggcacacagtgatcatattagcatttagcaaaaagcaaccctgcagcaaagtgaatttctgtccggctgcaatttaaaaatgaaaacttaggtagattgactcttctgcatgtttctcatagagcagaaaagtgctaatcatttagccacttagtgatattagccagccgtatacggatgcatggaacccgctactgagaagccgtccatgttactaatcacgggatcc

SEQ ID NO: 316480 - DNA, 1029 bp, Homo sapiens
cgcgccctacatccaccgcccggcggagggggctcagtccgcagccgccgccgccaccgccgcgcctcggcctcggtgcaggcagcggccgccgccgccgagacagctgcgcgggcgagcatccccacgcagcaccttggaagttgttttcaaccatatccagcctttgccgaatacatcctatctgccacacatccagcgtgaggtccctccagctacaaggtgggcaccatggcggagaagtttgactgccactactgcagggatcccttgcaggggaagaagtatgtgcaaaaggatggccaccactgctgcctgaaatgctttgacaagttctgtgccaacacctgtgtggaatgccgcaagcccatcggtgcggactccaaggaggtgcactataagaaccgcttctggcatgacacctgcttccgctgtgccaagtgccttcaccccttggccaatgagacctttgtggccaaggacaacaagatcctgtgcaacaagtgcaccactcgggaggactcccccaagtgcaaggggtgcttcaaggccattgtggcaggtactgcctccttcccaccccgggttcccagggaggaggccctgagggcagacgtgatgtgggcttgcttatcatggtggggctgtcatcaacatggatatgacatttcacaacagtgactagttgaatcccttgtaacgtagtagttgtctgctctttgtccatgtgttaatgaggactgcaaagtcccttctgttgtgattcctaggacttttcctcaagaggaaatctggatttccacctaccgcttacctgaaatgcaggatcacctacttactgtattctacattattatatgacatagtataatgagacaatatcaaaagtaaacatgtaatgacaatacatactaacattcttgtaggagtggttagagaagctgatgcctcatttctacattctgtcattagctattatcatctaacgtttcagtgtatccttacagaaataaagcagcatatgaataa

SEQ ID NO: 316481 - DNA, 503 bp, Homo sapiens
ctctttgtccatgtgttaatgaggactgcaaagtccttctgttgtgattcctaggacttttcctcaagaggaaatctggatttccacctaccgcttacctgaaatgcaggcgccagggctgtcatcaacatggatatgacatttcacaacagtgactagttgaatcccttgtaacgtagtagttgtctgctctttgtccatgtgttaatgaggactgcaaagtcccttctgttgtgattcctaggacttttcctcaagaggaaatctggatttccacctaccgcttacctgaaatgcaggatcacctacttactgtattctacattattatatgacatagtataatgagacaatatcaaaagtaaacatgtaatgacaatacatactaacattcttgtaggagtggttagagaagctgatgcctcatttctacattctgtcattagctattatcatctaacgtttcagtgtatccttacagaaataaagcagcatatgaataa

SEQ ID NO: 316482 - DNA, 1038 bp, Homo sapiens
cgcgccctacatccaccgcccggcggagggggctcagtccgcagccgccgccgccaccgccgcgcctcggcctcggtgcaggcagcggccgccgccgccgagacagctgcgcgggcgagcatccccacgcagcaccttggaagttgttttcaaccatatccagcctttgccgaatacatcctatctgccacacatccagcgtgaggtccctccagctacaaggtgggcaccatggcggagaagtttgactgccactactgcagggatcccttgcaggggaagaagtatgtgcaaaaggatggccaccactgctgcctgaaatgctttgacaagttctgtgccaacacctgtgtggaatgccgcaagcccatcggtgcggactccaaggaggtgcactataagaaccgcttctggcatgacacctgcttccgctgtgccaagtgccttcaccccttggccaatgagacctttgtggccaaggacaacaagatcctgtgcaacaagtgcaccactcgggaggactcccccaagtgcaaggggtgcttcaaggccattgtggcaggtactgcctccttcccaccccgggttcccagggaggaggccctgagggcagacgtgatgtgggcttgcttatcatggtggggctaacgttgctctgagctgctttgagatcttagcatatatatgtacacatatacatacacgtatatatgcgtacacatatatgctcgcacacacgcacacactcggagactaaagaacactggcgagaacagcctgtggcaacagaatgaagtgaacagtatgtagcgctttctcatttgggcgtagtaagtgatgaaagcatgcttcttcctcagggtgtcattctgggccaggcagtccctgatttaatgtctaagtgcacgcagggtatagaggtgggggagtgggggattcaggcactggatcctaaaataataatgctggggtccccacccatgacagaaatcctgggttggcacaagcacaagtagaacacaggtaggttagttggag

SEQ ID NO: 316483 - DNA, 447 bp, Homo sapiens
cgcgccctacatccaccgcccggcggagggggctcagtccgcagccgccgccgccaccgccgcgcctcggcctcggtgcaggcagcggccgccgccgccgagacagctgcgcgggcgagcatccccacgcagcaccttggaagttgttttcaaccatatccagcctttgccgaatacatcctatctgccacacatccagcgtgaggtaagttttactaattgccacaaattcttacactgatctccaaccttctaagttgtggtattaggggcggcattgtacaaagggctttatttgtacaggaggtttcagaaggttcattttaattgactcaaccaatgtcactgcttaccctaaatattagctctcgggggcaatgtcttttcaagggaaaatctcatttgctttcaacttgggcatatgaaaagggaatttgccaggcacaa

SEQ ID NO: 316484 - DNA, 2403 bp, Homo sapiens
cgcgccctacatccaccgcccggcggagggggctcagtccgcagccgccgccgccaccgccgcgcctcggcctcggtgcaggcagcggccgccgccgccgagacagctgcgcgggcgagcatccccacgcagcaccttggaagttgttttcaaccatatccagcctttgccgaatacatcctatctgccacacatccagcgtgaggtccctccagctacaaggtgggcaccatggcggagaagtttgactgccactactgcagggatcccttgcaggggaagaagtatgtgcaaaaggatggccaccactgctgcctgaaatgctttgacaagttctgtgccaacacctgtgtggaatgccgcaagcccatcggtgcggactccaaggaggtgcactataagaaccgcttctggcatgacacctgcttccgctgtgccaagtgccttcaccccttggccaatgagacctttgtggccaaggacaacaagatcctgtgcaacaagtgcaccactcgggaggactcccccaagtgcaaggggtgcttcaaggccattgtggcaggagatcaaaacgtggagtacaaggggaccgtctggcacaaagactgcttcacctgtagtaactgcaagcaagtcatcgggactggaagcttcttccctaaaggggaggacttctactgcgtgacttgccatgagaccaagtttgccaagcattgcgtgaagtgcaacaaggccatcacatctggaggaatcacttaccaggatcagccctggcatgccgattgctttgtgtgtgttacctgctctaagaagctggctgggcagcgtttcaccgctgtggaggaccagtattactgcgtggattgctacaagaactttgtggccaagaagtgtgctggatgcaagaaccccatcactgggtttggtaaaggctccagtgtggtggcctatgaaggacaatcctggcacgactactgcttccactgcaaaaaatgctccgtgaatctggccaacaagcgctttgttttccaccaggagcaagtgtattgtcccgactgtgccaaaaagctgtaaactgacaggggctcctgtcctgtaaaatggcatttgaatctcgttctttgtgtccttactttctgccctataccatcaataggggaagagtggtccttcccttctttaaagttctccttccgtcttttctcccattttacagtattactcaaataagggcacacagtgatcatattagcatttagcaaaaagcaaccctgcagcaaagtgaatttctgtccggctgcaatttaaaaatgaaaacttaggtagattgactcttctgcatgtttctcatagagcagaaaagtgctaatcatttagccacttagtgatgtaagcaagaagcataggagataaaacccccactgagatgcctctcatgcctcagctgggacccaccgtgtagacacacgacatgcaagagttgcagcggctgctccaactcactgctcaccctcttctgtgagcaggaaaagaaccctactgacatgcatggtttaacttcctcatcagaactctgcccttccttctgttcttttgtgctttcaaataactaacacgaacttccagaaaattaacatttgaacttagctgtaattctaaactgacctttccccgtactaacgtttggtttccccgtgtggcatgttttctgagcgttcctactttaaagcatggaacatgcaggtgatttgggaagtgtagaaagacctgagaaaacgagcctgtttcagaggaacatcgtcacaacgaatacttctggaagcttaacaaaactaaccctgctgtcctttttattgtttttaattaatatttttgttttaattgatagcaaaatagtttatgggtttggaaacttgcatgaaaatattttagccccctcagatgttcctgcagtgctgaaattcatcctacagaagtaaccgcaaaactctagagggggagttgagcaggcgccagggctgtcatcaacatggatatgacatttcacaacagtgactagttgaatcccttgtaacgtagtagttgtctgctctttgtccatgtgttaatgaggactgcaaagtcccttctgttgtgattcctaggacttttcctcaagaggaaatctggatttccacctaccgcttacctgaaatgcaggatcacctacttactgtattctacattattatatgacatagtataatgagacaatatcaaaagtaaacatgtaatgacaatacatactaacattcttgtaggagtggttagagaagctgatgcctcatttctacattctgtcattagctattatcatctaacgtttcagtgtatccttacagaaataaagcagcatatgaataa

SEQ ID NO: 316485 - DNA, 2354 bp, Homo sapiens
tttgagctaatacggcttgataatgagggagccagatccactgccagtgctcatgttatatgataaacagacatttggagaagcaccttggaagttgttttcaaccatatccagcctttgccgaatacatcctatctgccacacatccagcgtgaggtccctccagctacaaggtgggcaccatggcggagaagtttgactgccactactgcagggatcccttgcaggggaagaagtatgtgcaaaaggatggccaccactgctgcctgaaatgctttgacaagttctgtgccaacacctgtgtggaatgccgcaagcccatcggtgcggactccaaggaggtgcactataagaaccgcttctggcatgacacctgcttccgctgtgccaagtgccttcaccccttggccaatgagacctttgtggccaaggacaacaagatcctgtgcaacaagtgcaccactcgggaggactcccccaagtgcaaggggtgcttcaaggccattgtggcaggagatcaaaacgtggagtacaaggggaccgtctggcacaaagactgcttcacctgtagtaactgcaagcaagtcatcgggactggaagcttcttccctaaaggggaggacttctactgcgtgacttgccatgagaccaagtttgccaagcattgcgtgaagtgcaacaaggccatcacatctggaggaatcacttaccaggatcagccctggcatgccgattgctttgtgtgtgttacctgctctaagaagctggctgggcagcgtttcaccgctgtggaggaccagtattactgcgtggattgctacaagaactttgtggccaagaagtgtgctggatgcaagaaccccatcactgggtttggtaaaggctccagtgtggtggcctatgaaggacaatcctggcacgactactgcttccactgcaaaaaatgctccgtgaatctggccaacaagcgctttgttttccaccaggagcaagtgtattgtcccgactgtgccaaaaagctgtaaactgacaggggctcctgtcctgtaaaatggcatttgaatctcgttctttgtgtccttactttctgccctataccatcaataggggaagagtggtccttcccttctttaaagttctccttccgtcttttctcccattttacagtattactcaaataagggcacacagtgatcatattagcatttagcaaaaagcaaccctgcagcaaagtgaatttctgtccggctgcaatttaaaaatgaaaacttaggtagattgactcttctgcatgtttctcatagagcagaaaagtgctaatcatttagccacttagtgatgtaagcaagaagcataggagataaaacccccactgagatgcctctcatgcctcagctgggacccaccgtgtagacacacgacatgcaagagttgcagcggctgctccaactcactgctcaccctcttctgtgagcaggaaaagaaccctactgacatgcatggtttaacttcctcatcagaactctgcccttccttctgttcttttgtgctttcaaataactaacacgaacttccagaaaattaacatttgaacttagctgtaattctaaactgacctttccccgtactaacgtttggtttccccgtgtggcatgttttctgagcgttcctactttaaagcatggaacatgcaggtgatttgggaagtgtagaaagacctgagaaaacgagcctgtttcagaggaacatcgtcacaacgaatacttctggaagcttaacaaaactaaccctgctgtcctttttattgtttttaattaatatttttgttttaattgatagcaaaatagtttatgggtttggaaacttgcatgaaaatattttagccccctcagatgttcctgcagtgctgaaattcatcctacagaagtaaccgcaaaactctagagggggagttgagcaggcgccagggctgtcatcaacatggatatgacatttcacaacagtgactagttgaatcccttgtaacgtagtagttgtctgctctttgtccatgtgttaatgaggactgcaaagtcccttctgttgtgattcctaggacttttcctcaagaggaaatctggatttccacctaccgcttacctgaaatgcaggatcacctacttactgtattctacattattatatgacatagtataatgagacaatatcaaaagtaaacatgtaatgacaatacatactaacattcttgtaggagtggttagagaagctgatgcctcatttctacattctgtcattagctattatcatctaacgtttcagtgtatccttacagaaataaagcagcatatgaataa

SEQ ID NO: 316486 - DNA, 2348 bp, Homo sapiens
cccctgctgtgaagagctgtgccctgctgcattcctcctgtagctgcacgaaagggtgtggaatcttctagaaacagcaccttggaagttgttttcaaccatatccagcctttgccgaatacatcctatctgccacacatccagcgtgaggtccctccagctacaaggtgggcaccatggcggagaagtttgactgccactactgcagggatcccttgcaggggaagaagtatgtgcaaaaggatggccaccactgctgcctgaaatgctttgacaagttctgtgccaacacctgtgtggaatgccgcaagcccatcggtgcggactccaaggaggtgcactataagaaccgcttctggcatgacacctgcttccgctgtgccaagtgccttcaccccttggccaatgagacctttgtggccaaggacaacaagatcctgtgcaacaagtgcaccactcgggaggactcccccaagtgcaaggggtgcttcaaggccattgtggcaggagatcaaaacgtggagtacaaggggaccgtctggcacaaagactgcttcacctgtagtaactgcaagcaagtcatcgggactggaagcttcttccctaaaggggaggacttctactgcgtgacttgccatgagaccaagtttgccaagcattgcgtgaagtgcaacaaggccatcacatctggaggaatcacttaccaggatcagccctggcatgccgattgctttgtgtgtgttacctgctctaagaagctggctgggcagcgtttcaccgctgtggaggaccagtattactgcgtggattgctacaagaactttgtggccaagaagtgtgctggatgcaagaaccccatcactgggtttggtaaaggctccagtgtggtggcctatgaaggacaatcctggcacgactactgcttccactgcaaaaaatgctccgtgaatctggccaacaagcgctttgttttccaccaggagcaagtgtattgtcccgactgtgccaaaaagctgtaaactgacaggggctcctgtcctgtaaaatggcatttgaatctcgttctttgtgtccttactttctgccctataccatcaataggggaagagtggtccttcccttctttaaagttctccttccgtcttttctcccattttacagtattactcaaataagggcacacagtgatcatattagcatttagcaaaaagcaaccctgcagcaaagtgaatttctgtccggctgcaatttaaaaatgaaaacttaggtagattgactcttctgcatgtttctcatagagcagaaaagtgctaatcatttagccacttagtgatgtaagcaagaagcataggagataaaacccccactgagatgcctctcatgcctcagctgggacccaccgtgtagacacacgacatgcaagagttgcagcggctgctccaactcactgctcaccctcttctgtgagcaggaaaagaaccctactgacatgcatggtttaacttcctcatcagaactctgcccttccttctgttcttttgtgctttcaaataactaacacgaacttccagaaaattaacatttgaacttagctgtaattctaaactgacctttccccgtactaacgtttggtttccccgtgtggcatgttttctgagcgttcctactttaaagcatggaacatgcaggtgatttgggaagtgtagaaagacctgagaaaacgagcctgtttcagaggaacatcgtcacaacgaatacttctggaagcttaacaaaactaaccctgctgtcctttttattgtttttaattaatatttttgttttaattgatagcaaaatagtttatgggtttggaaacttgcatgaaaatattttagccccctcagatgttcctgcagtgctgaaattcatcctacagaagtaaccgcaaaactctagagggggagttgagcaggcgccagggctgtcatcaacatggatatgacatttcacaacagtgactagttgaatcccttgtaacgtagtagttgtctgctctttgtccatgtgttaatgaggactgcaaagtcccttctgttgtgattcctaggacttttcctcaagaggaaatctggatttccacctaccgcttacctgaaatgcaggatcacctacttactgtattctacattattatatgacatagtataatgagacaatatcaaaagtaaacatgtaatgacaatacatactaacattcttgtaggagtggttagagaagctgatgcctcatttctacattctgtcattagctattatcatctaacgtttcagtgtatccttacagaaataaagcagcatatgaataa

SEQ ID NO: 316487 - DNA, 2457 bp, Homo sapiens
cccctgctgtgaagagctgtgccctgctgcattcctcctgtagctgcacgaaaattcaggtttgacgcttcagttggattgaatcgaaagagaggtatatttggtatcaggcgtttgtggtggcatgtgaaatcattatccacgtttgataacagtttgactttttgcctgctgtaataatagtagcaccttggaagttgttttcaaccatatccagcctttgccgaatacatcctatctgccacacatccagcgtgaggtccctccagctacaaggtgggcaccatggcggagaagtttgactgccactactgcagggatcccttgcaggggaagaagtatgtgcaaaaggatggccaccactgctgcctgaaatgctttgacaagttctgtgccaacacctgtgtggaatgccgcaagcccatcggtgcggactccaaggaggtgcactataagaaccgcttctggcatgacacctgcttccgctgtgccaagtgccttcaccccttggccaatgagacctttgtggccaaggacaacaagatcctgtgcaacaagtgcaccactcgggaggactcccccaagtgcaaggggtgcttcaaggccattgtggcaggagatcaaaacgtggagtacaaggggaccgtctggcacaaagactgcttcacctgtagtaactgcaagcaagtcatcgggactggaagcttcttccctaaaggggaggacttctactgcgtgacttgccatgagaccaagtttgccaagcattgcgtgaagtgcaacaaggccatcacatctggaggaatcacttaccaggatcagccctggcatgccgattgctttgtgtgtgttacctgctctaagaagctggctgggcagcgtttcaccgctgtggaggaccagtattactgcgtggattgctacaagaactttgtggccaagaagtgtgctggatgcaagaaccccatcactgggtttggtaaaggctccagtgtggtggcctatgaaggacaatcctggcacgactactgcttccactgcaaaaaatgctccgtgaatctggccaacaagcgctttgttttccaccaggagcaagtgtattgtcccgactgtgccaaaaagctgtaaactgacaggggctcctgtcctgtaaaatggcatttgaatctcgttctttgtgtccttactttctgccctataccatcaataggggaagagtggtccttcccttctttaaagttctccttccgtcttttctcccattttacagtattactcaaataagggcacacagtgatcatattagcatttagcaaaaagcaaccctgcagcaaagtgaatttctgtccggctgcaatttaaaaatgaaaacttaggtagattgactcttctgcatgtttctcatagagcagaaaagtgctaatcatttagccacttagtgatgtaagcaagaagcataggagataaaacccccactgagatgcctctcatgcctcagctgggacccaccgtgtagacacacgacatgcaagagttgcagcggctgctccaactcactgctcaccctcttctgtgagcaggaaaagaaccctactgacatgcatggtttaacttcctcatcagaactctgcccttccttctgttcttttgtgctttcaaataactaacacgaacttccagaaaattaacatttgaacttagctgtaattctaaactgacctttccccgtactaacgtttggtttccccgtgtggcatgttttctgagcgttcctactttaaagcatggaacatgcaggtgatttgggaagtgtagaaagacctgagaaaacgagcctgtttcagaggaacatcgtcacaacgaatacttctggaagcttaacaaaactaaccctgctgtcctttttattgtttttaattaatatttttgttttaattgatagcaaaatagtttatgggtttggaaacttgcatgaaaatattttagccccctcagatgttcctgcagtgctgaaattcatcctacagaagtaaccgcaaaactctagagggggagttgagcaggcgccagggctgtcatcaacatggatatgacatttcacaacagtgactagttgaatcccttgtaacgtagtagttgtctgctctttgtccatgtgttaatgaggactgcaaagtcccttctgttgtgattcctaggacttttcctcaagaggaaatctggatttccacctaccgcttacctgaaatgcaggatcacctacttactgtattctacattattatatgacatagtataatgagacaatatcaaaagtaaacatgtaatgacaatacatactaacattcttgtaggagtggttagagaagctgatgcctcatttctacattctgtcattagctattatcatctaacgtttcagtgtatccttacagaaataaagcagcatatgaataa

SEQ ID NO: 316488 - DNA, 2417 bp, Homo sapiens
atttcctttgtttggaggcttggttctgagtgagagttcaacagcctttgcccaggcggcttctcaaacacagggtgtggtttccttagctcactctctgctgtttggttgctcatggcaacaagatccaaataacttggacatgtgtttgtataaaaaaaacctgggaatggaacccaaagtgagactttggggctttcagttagtggaagagctgcggtccctccagctacaaggtgggcaccatggcggagaagtttgactgccactactgcagggatcccttgcaggggaagaagtatgtgcaaaaggatggccaccactgctgcctgaaatgctttgacaagttctgtgccaacacctgtgtggaatgccgcaagcccatcggtgcggactccaaggaggtgcactataagaaccgcttctggcatgacacctgcttccgctgtgccaagtgccttcaccccttggccaatgagacctttgtggccaaggacaacaagatcctgtgcaacaagtgcaccactcgggaggactcccccaagtgcaaggggtgcttcaaggccattgtggcaggagatcaaaacgtggagtacaaggggaccgtctggcacaaagactgcttcacctgtagtaactgcaagcaagtcatcgggactggaagcttcttccctaaaggggaggacttctactgcgtgacttgccatgagaccaagtttgccaagcattgcgtgaagtgcaacaaggccatcacatctggaggaatcacttaccaggatcagccctggcatgccgattgctttgtgtgtgttacctgctctaagaagctggctgggcagcgtttcaccgctgtggaggaccagtattactgcgtggattgctacaagaactttgtggccaagaagtgtgctggatgcaagaaccccatcactgggtttggtaaaggctccagtgtggtggcctatgaaggacaatcctggcacgactactgcttccactgcaaaaaatgctccgtgaatctggccaacaagcgctttgttttccaccaggagcaagtgtattgtcccgactgtgccaaaaagctgtaaactgacaggggctcctgtcctgtaaaatggcatttgaatctcgttctttgtgtccttactttctgccctataccatcaataggggaagagtggtccttcccttctttaaagttctccttccgtcttttctcccattttacagtattactcaaataagggcacacagtgatcatattagcatttagcaaaaagcaaccctgcagcaaagtgaatttctgtccggctgcaatttaaaaatgaaaacttaggtagattgactcttctgcatgtttctcatagagcagaaaagtgctaatcatttagccacttagtgatgtaagcaagaagcataggagataaaacccccactgagatgcctctcatgcctcagctgggacccaccgtgtagacacacgacatgcaagagttgcagcggctgctccaactcactgctcaccctcttctgtgagcaggaaaagaaccctactgacatgcatggtttaacttcctcatcagaactctgcccttccttctgttcttttgtgctttcaaataactaacacgaacttccagaaaattaacatttgaacttagctgtaattctaaactgacctttccccgtactaacgtttggtttccccgtgtggcatgttttctgagcgttcctactttaaagcatggaacatgcaggtgatttgggaagtgtagaaagacctgagaaaacgagcctgtttcagaggaacatcgtcacaacgaatacttctggaagcttaacaaaactaaccctgctgtcctttttattgtttttaattaatatttttgttttaattgatagcaaaatagtttatgggtttggaaacttgcatgaaaatattttagccccctcagatgttcctgcagtgctgaaattcatcctacagaagtaaccgcaaaactctagagggggagttgagcaggcgccagggctgtcatcaacatggatatgacatttcacaacagtgactagttgaatcccttgtaacgtagtagttgtctgctctttgtccatgtgttaatgaggactgcaaagtcccttctgttgtgattcctaggacttttcctcaagaggaaatctggatttccacctaccgcttacctgaaatgcaggatcacctacttactgtattctacattattatatgacatagtataatgagacaatatcaaaagtaaacatgtaatgacaatacatactaacattcttgtaggagtggttagagaagctgatgcctcatttctacattctgtcattagctattatcatctaacgtttcagtgtatccttacagaaataaagcagcatatgaataa

SEQ ID NO: 316489 - DNA, 2292 bp, Homo sapiens
cgcgccctacatccaccgcccggcggagggggctcagtccgcagccgccgccgccaccgccgcgcctcggcctcggtgcaggcagcggccgccgccgccgagacagctgcgcgggcgagcatccccacgcagcaccttggaagttgttttcaaccatatccagcctttgccgaatatgtgcaaaaggatggccaccactgctgcctgaaatgctttgacaagttctgtgccaacacctgtgtggaatgccgcaagcccatcggtgcggactccaaggaggtgcactataagaaccgcttctggcatgacacctgcttccgctgtgccaagtgccttcaccccttggccaatgagacctttgtggccaaggacaacaagatcctgtgcaacaagtgcaccactcgggaggactcccccaagtgcaaggggtgcttcaaggccattgtggcaggagatcaaaacgtggagtacaaggggaccgtctggcacaaagactgcttcacctgtagtaactgcaagcaagtcatcgggactggaagcttcttccctaaaggggaggacttctactgcgtgacttgccatgagaccaagtttgccaagcattgcgtgaagtgcaacaaggccatcacatctggaggaatcacttaccaggatcagccctggcatgccgattgctttgtgtgtgttacctgctctaagaagctggctgggcagcgtttcaccgctgtggaggaccagtattactgcgtggattgctacaagaactttgtggccaagaagtgtgctggatgcaagaaccccatcactgggtttggtaaaggctccagtgtggtggcctatgaaggacaatcctggcacgactactgcttccactgcaaaaaatgctccgtgaatctggccaacaagcgctttgttttccaccaggagcaagtgtattgtcccgactgtgccaaaaagctgtaaactgacaggggctcctgtcctgtaaaatggcatttgaatctcgttctttgtgtccttactttctgccctataccatcaataggggaagagtggtccttcccttctttaaagttctccttccgtcttttctcccattttacagtattactcaaataagggcacacagtgatcatattagcatttagcaaaaagcaaccctgcagcaaagtgaatttctgtccggctgcaatttaaaaatgaaaacttaggtagattgactcttctgcatgtttctcatagagcagaaaagtgctaatcatttagccacttagtgatgtaagcaagaagcataggagataaaacccccactgagatgcctctcatgcctcagctgggacccaccgtgtagacacacgacatgcaagagttgcagcggctgctccaactcactgctcaccctcttctgtgagcaggaaaagaaccctactgacatgcatggtttaacttcctcatcagaactctgcccttccttctgttcttttgtgctttcaaataactaacacgaacttccagaaaattaacatttgaacttagctgtaattctaaactgacctttccccgtactaacgtttggtttccccgtgtggcatgttttctgagcgttcctactttaaagcatggaacatgcaggtgatttgggaagtgtagaaagacctgagaaaacgagcctgtttcagaggaacatcgtcacaacgaatacttctggaagcttaacaaaactaaccctgctgtcctttttattgtttttaattaatatttttgttttaattgatagcaaaatagtttatgggtttggaaacttgcatgaaaatattttagccccctcagatgttcctgcagtgctgaaattcatcctacagaagtaaccgcaaaactctagagggggagttgagcaggcgccagggctgtcatcaacatggatatgacatttcacaacagtgactagttgaatcccttgtaacgtagtagttgtctgctctttgtccatgtgttaatgaggactgcaaagtcccttctgttgtgattcctaggacttttcctcaagaggaaatctggatttccacctaccgcttacctgaaatgcaggatcacctacttactgtattctacattattatatgacatagtataatgagacaatatcaaaagtaaacatgtaatgacaatacatactaacattcttgtaggagtggttagagaagctgatgcctcatttctacattctgtcattagctattatcatctaacgtttcagtgtatccttacagaaataaagcagcatatgaataa

SEQ ID NO: 316490 - DNA, 2290 bp, Homo sapiens
cgcgccctacatccaccgcccggcggagggggctcagtccgcagccgccgccgccaccgccgcgcctcggcctcggtgcaggcagcggccgccgccgccgagacagctgcgcgggcgagcatccccacgcagcaccttggaagttgttttcaaccatatccagcctttgccgaatacatcctatctgccacacatccagcgtgaggtccctccagctacaaggtgggcaccatggcggagaagtttgactgccactactgcagggatcccttgcaggggaagaagtatgtgcaaaaggatggccaccactgctgcctgaaatgctttgacaagttctgtgccaacacctgtgtggaatgccgcaagcccatcggtgcggactccaaggaggtgcactataagaaccgcttctggcatgacacctgcttccgctgtgccaagtgccttcaccccttggccaatgagacctttgtggccaaggacaacaagatcctgtgcaacaagtgcaccactcgggaggactcccccaagtgcaaggggtgcttcaaggccattgtggcaggagatcaaaacgtggagtacaaggggaccgtctggcacaaagactgcttcacctgtagtaactgcaagcaagtcatcgggactggaagcttcttccctaaaggggaggacttctactgcgtgacttgccatgagaccaagtttgccaagcattgcgtgaagtgcaacaaggccatcacatctggaggaatcacttaccaggatcagccctggcatgccgattgctttgtgtgtgttacctgctctaagaagctggctgggcagcgtttcaccgctgtggaggaccagtattactgcgtggattttccactgcaaaaaatgctccgtgaatctggccaacaagcgctttgttttccaccaggagcaagtgtattgtcccgactgtgccaaaaagctgtaaactgacaggggctcctgtcctgtaaaatggcatttgaatctcgttctttgtgtccttactttctgccctataccatcaataggggaagagtggtccttcccttctttaaagttctccttccgtcttttctcccattttacagtattactcaaataagggcacacagtgatcatattagcatttagcaaaaagcaaccctgcagcaaagtgaatttctgtccggctgcaatttaaaaatgaaaacttaggtagattgactcttctgcatgtttctcatagagcagaaaagtgctaatcatttagccacttagtgatgtaagcaagaagcataggagataaaacccccactgagatgcctctcatgcctcagctgggacccaccgtgtagacacacgacatgcaagagttgcagcggctgctccaactcactgctcaccctcttctgtgagcaggaaaagaaccctactgacatgcatggtttaacttcctcatcagaactctgcccttccttctgttcttttgtgctttcaaataactaacacgaacttccagaaaattaacatttgaacttagctgtaattctaaactgacctttccccgtactaacgtttggtttccccgtgtggcatgttttctgagcgttcctactttaaagcatggaacatgcaggtgatttgggaagtgtagaaagacctgagaaaacgagcctgtttcagaggaacatcgtcacaacgaatacttctggaagcttaacaaaactaaccctgctgtcctttttattgtttttaattaatatttttgttttaattgatagcaaaatagtttatgggtttggaaacttgcatgaaaatattttagccccctcagatgttcctgcagtgctgaaattcatcctacagaagtaaccgcaaaactctagagggggagttgagcaggcgccagggctgtcatcaacatggatatgacatttcacaacagtgactagttgaatcccttgtaacgtagtagttgtctgctctttgtccatgtgttaatgaggactgcaaagtcccttctgttgtgattcctaggacttttcctcaagaggaaatctggatttccacctaccgcttacctgaaatgcaggatcacctacttactgtattctacattattatatgacatagtataatgagacaatatcaaaagtaaacatgtaatgacaatacatactaacattcttgtaggagtggttagagaagctgatgcctcatttctacattctgtcattagctattatcatctaacgtttcagtgtatccttacagaaataaagcagcatatgaataa

SEQ ID NO: 316491 - DNA, 2406 bp, Homo sapiens
cgcgccctacatccaccgcccggcggagggggctcagtccgcagccgccgccgccaccgccgcgcctcggcctcggtgcaggcagcggccgccgccgccgagacagctgcgcgggcgagcatccccacgcagcaccttggaagttgttttcaaccatatccagcctttgccgaatacatcctatctgccacacatccagcgtgaggtccctccagctacaaggtgggcaccatggcggagaagtttgactgccactactgcagggatcccttgcaggggaagaagtatgtgcaaaaggatggccaccactgctgcctgaaatgctttgacaagttctgtgccaacacctgtgtggaatgccgcaagcccatcggtgcggactccaaggaggtgcactataagaaccgcttctggcatgacacctgcttccgctgtgccaagtgccttcaccccttggccaatgagacctttgtggccaaggacaacaagatcctgtgcaacaagtgcaccactcgggaggactcccccaagtgcaaggggtgcttcaaggccattgtggcaggagatcaaaacgtggagtacaaggggaccgtctggcacaaagactgcttcacctgtagtaactgcaagcaagtcatcgggactggaagcttcttccctaaaggggaggacttctactgcgtgacttgccatgagaccaagtttgccaagcattgcgtgaagtgcaacaaggccatcacatctggaggaatcacttaccaggatcagccctggcatgccgattgctttgtgtgtgttacctgctctaagaagctggctgggcagcgtttcaccgctgtggaggaccagtattactgcgtggattgctacaagaactttgtggccaagaagtgtgctggatgcaagaaccccatcactgggtttggtaaaggctccagtgtggtggcctatgaaggacaatcctggcacgactactgcttccactgcaaaaaatgctccgtgaatctggccaacaagcgctttgttttccaccaggagcaagtgtattgtcccgactgtgccaaaaagctgtaaactgacaggggctcctgtcctgtaaaatggcatttgaatctcgttctttgtgtccttactttctgccctataccatcaataggggaagagtggtccttcccttctttaaagttctccttccgtcttttctcccattttacagtattactcaaataagggcacacagtgatcatattagcatttagcaaaaagcaaccctgcagcaaagtgaatttctgtccggctgcaatttaaaaatgaaaacttaggtagattgactcttctgcatgtttctcatagagcagaaaagtgctaatcatttagccacttagtgatgtaagcaagaagcataggagataaaacccccactgagatgcctctcatgcctcagctgggacccaccgtgtagacacacgacatgcaagagttgcagcggctgctccaactcactgctcaccctcttctgtgagcaggaaaagaaccctactgacatgcatggtttaacttcctcatcagaactctgcccttccttctgttcttttgtgctttcaaataactaacacgaacttccagaaaattaacatttgaacttagctgtaattctaaactgacctttccccgtactaacgtttggtttccccgtgtggcatgttttctgagcgttcctactttaaagcatggaacatgcaggtgatttgggaagtgtagaaagacctgagaaaacgagcctgtttcagaggaacatcgtcacaacgaatacttctggaagcttaacaaaactaaccctgctgtcctttttattgtttttaattaatatttttgttttaattgatagcaaaatagtttatgggtttggaaacttgcatgaaaatattttagccccctcagatgttcctgcagtgctgaaattcatcctacagaagtaaccgcaaaactctagagggggagttgagcaggcgccagggctgtcatcaacatggatatgacatttcacaacagtgactagttgaatcccttgtaacgtagtagttgtctgctctttgtccatgtgttaatgaggactgcaaagtcccttctgttgtgattcctaggacttttcctcaagaggaaatctggatttccacctaccgcttacctgaaatgcaggatcacctacttactgtattctacattattatatgacatagtataatgagacaatatcaaaagtaaacatgtaatgacaatacatactaacattcttgtaggagtggttagagaagctgatgcctcatttctacattctgtcatatgctgctttatttctgtaaggatacactgacacaataaccaataatagctaatgacgtcgac
